United States Patent Application Publication US 2004/0029133 A1 - sequence listing, part 2

SEQ ID NO: 176 - DNA, 16568 bp, Homo sapiens mitochondrial
  3106: "n" refers to a nucleotide at position 3107 of the Cambridge Reference Sequence (CRS, Anderson et al. 1981 Nature 290:457-465), later determined to be absent from the human mtDNA sequence according to the revised CRS (rCRS, Andrews et al. 1999 Nature Genetics 23:147); "n" therefore represents a single nucleotide deletion at a position corresponding to nucleotide 3107 of SEQ ID NO:1 as provided herein.
gatcacaggtctatcaccctattaaccactcacgggagctctccatgcatttggtattttcgtctggggggtgtgcacgcgatagcattgcgagacgctggagccggagcaccctatgtcgcagtatctgtctttgattcctgcctcattccattatttatcgcacctacgttcaatattataggcgaacatacctattaaagcgtgttaattaattaatgcttgtaggacataataataacaattgaatgtctgcacagccgctttccacacagacatcataacaaaaaatttccaccaaaccccccctcccccgccttctggccacagcacttaaacacatctctgccaaaccccaaaaacaaagaaccctaacaccagcctaaccagatttcaaattttatcttttggcggtatgtacttttaacagtcaccccccaactaacacattattttcccctcccactcccatactactaatctcatcaatacaacccccgcccatcctacccagcacacacaccgctgctaaccccataccccgaaccaaccaaaccccaaagacaccccccacagtttatgtagcttacctcctcaaagcaatacactgaaaatgtttagacgggctcacatcaccccataaacaaataggtttggtcctagcctttctattagctcttagtaagattacacatgcaagcatccccgttccagtgagttcaccctctaaatcaccacgatcaaaagggacaagcatcaagcacgcaacaatgcagctcaaaacgcttagcctagccacacccccacgggaaacagcagtgattaacctttagcaataaacgaaagtttaactaagctatactaaccccagggttggtcaatttcgtgccagccaccgcggtcacacgattaacccaagtcaatagaagccggcgtaaagagtgttttagatcaccccctccccaataaagctaaaactcacctgagttgtaaaaaactccagttcacacaaaataaactacgaaagtggctttaacatatctgaacacacaatagctaagacccaaactgggattagataccccactatgcttagccctaaacctcaacagttaaatcaacaaaactgctcgccagaacactacgagccacagcttaaaactcaaaggacctggcggtgcttcatatccctctagaggagcctgttctgtaatcgataaaccccgatcaacctcaccacctcttgctcagcctatataccgccatcttcagcaaaccctgatgaaggctacaaagtaagcgcaagtacccacgtaaagacgttaggtcaaggtgtagcccatgaggtggcaagaaatgggctacattttctaccccagaaaactacgatagcccttatgaaacttaagggtcgaaggtggatttagcagtaaactgagaatagagtgcttagttgaacagggccctgaagcgcgtacacaccgcccgtcaccctcctcaagtatacttcaaaggacatttaactaaaacccctacgcatttatatagaggagacaagtcgtaacatggtaagtgtactggaaagtgcacttggacgaaccagagtgtagcttaacacaaagcacccaacttacacttaggagatttcaacttaacttgaccgctctgagctaaacctagccccaaacccactccaccttactatcagacaaccttagccaaaccatttacccaaataaagtataggcgatagaaattgaaacctggcgcaatagatatagtaccgcaagggaaagatgaaaaattataaccaagcataatatagcaaggactaacccctataccttctgcataatgaattaactagaaataactttgcaaggagagccaaagctaagacccccgaaaccagacgagctacctaagaacagctaaaagagcacacccgtctatgtagcaaaatagtgggaagatttataggtagaggcgacaaacctaccgagcctggtgatagctggttgtccaagatagaatcttagttcaactttaaatttgcccacagaaccctctaaatccccttgtaaatttaactgttagtccaaagaggaacagctctttggacactaggaaaaaaccttgtagagagagtaaaaaatttaacacccatagtaggcctaaaagcagccaccaattaagaaagcgttcaagctcaacacccactacctaaaaaatcccaaacatataactgaactcctcacacccaattggaccaatctatcaccctatagaagaactaatgttagtataagtaacatgaaaacattctcctctgcataagcctgcgtcagattaaaacgctgaactgacaattaacagcccaatatctacaatcaaccaacaagtcattattacccccactgtcaacccaacacaggcatgctcataaggaaaggttaaaaaaagtaaaaggaactcggcaaatcttaccccgcctgtttaccaaaaacatcacctctagcatcaccagtattagaggcaccgcctgcccagtgacacatgtttaacggccgcggtaccctaaccgtgcaaaggtagcataatcacttgttccttaaatagggacctgtatgaatggctccacgagggttcagctgtctcttacttttaaccagtgaaattgacctgcccgtgaagaggcgggcatgacacagcaagacgagaagaccctatggagctttaatttattaatgcaaacagtacctaacaaacccacaggtcctaaactaccaaacctgcattaaaaatttcggttggggcgacctcggagcagaacccaacctccgagcagtacatgctaagacttcaccagtcaaagcgaactactatactcaattgatccaataacttgaccaacggaacaagttaccctagggataacagcgcaatcctattctagagtccatatcaacaatagggtttacgacctcgatgttggatcaggacatcccgatggtgcagccgctattaaaggttcgtttgttcaacgattaaagtcctacgtgatctgagttcagaccggagtaatccaggtcggtttctatctacnttcaaattcctccctgtacgaaaggacaagagaaataaggcctacttcacaaagcgccttcccccgtaaatgatatcatctcaacttagtattatacccacacccacccaagaacagggtttgttaagatggcagagcccggtaatcgcataaaacttaaaactttacagtcagaggttcaattcctcttcttaacaacatacccatggccaacctcctactcctcattgtacccattctaatcgcaatggcattcctaatgcttaccgaacgaaaaattctaggctatatacaactacgcaaaggccccaacgttgtaggcccctacgggctactacaacccttcgctgacgccataaaactcttcaccaaagagcccctaaaacccgccacatctaccatcaccctctacatcaccgccccgaccttagctctcaccatcgctcttctactatgaacccccctccccatacccaaccccctggttaacctcaacctaggcctcctatttattctagccacctctagcctagccgtttactcaatcctctgatcagggtgagcatcaaactcaaactacgccctgatcggcgcactgcgagcagtagcccaaacaatctcatatgaagtcaccctagccatcattctactatcaacattactaataagcggctcctttaacctctccacccttatcacaacacaagaacacctctgattactcctgccatcatgacccttggccataatatgatttatctccacactagcagagaccaaccgaacccccttcgaccttgccgaaggggagtccgaactagtctcaggcttcaacatcgaatacgccgcaggccccttcgccctattcttcatagccgaatacacaaacattattataataaacaccctcaccactacaatcttcctaggaacaacatatgacgcactctcccctgaactctacacaacatattttgtcaccaagaccctacttctgacctccctgttcttatgaattcgaacagcatacccccgattccgctacgaccagctcatacacctcctatgaaaaaacttcctaccactcaccctagcattacttatatgatatgtctccatacccattacaatctccagcattccccctcaaacctaagaaatatgtctgataaaagagttactttgatagagtaaataataggagcttaaacccccttatttctaggactatgagaatcgaacccatccctgagaatccaaaactctccgtgccacctatcacaccccatcctaaagtaaggtcagctaaataagctatcgggcccataccccgaaaatgttggttatacccttcccgtactaattaatcccctggcccaacccgtcatctactctaccatctttgcaggcacactcatcacagcgctaagctcgcactgattttttacctgagtaggcctagaaataaacatgctagcttttattccagttctaaccaaaaaaataaaccctcgttccacagaagctgccatcaagtatttcctcacgcaagcaaccgcatccataatccttctaatagctatcctcttcaacaatatactctccggacaatgaaccataaccaatactaccaatcaatactcatcattaataatcatagtggctatagcaataaaactaggaatagccccctttcacttctgagtcccagaggttacccaaggcacccctctgacatccggcctgcttcttctcacatgacaaaaactagcccccatctcaatcatataccaaatctctccctcactaaacgtaagccttctcctcactctctcaatcttatccatcatagcaggcagttgaggtggattaaaccaaacccagctacgcaaaatcttagcatactcctcaattacccatataggatgaataatagcagttctaccgtacaaccctaacataaccattcttaatttaactatttatattatcctaactactaccgcattcctactactcaacttaaactccagcaccacgaccctactactatctcgcacctgaaacaagctaacatgactaacacccttaattccatccaccctcctctccctaggaggcctgcccccgctaaccggctttttgcccaaatgggccattatcgaagaattcacaaaaaacaatagcctcatcatccccaccatcatagccaccatcaccctcattaacctctacttctacctacgcctaatctactccacctcaatcacactactccccatatctaacaacgtaaaaataaaatgacagtttgaacatacaaaacccaccccattcctccccacactcatcgcccttaccacgctactcctacctatctccccttttatactaataatcttatagaaatttaggttaaatacagaccaagagccttcaaagccctcagtaagttgcaatacttaatttctgtaacagctaaggactgcaaaaccccactctgcatcaactgaacgcaaatcagccactttaattaagctaagcccttactagaccaatgggacttaaacccacaaacacttagttaacagctaagcaccctaatcaactggcttcaatctacttctcccgccgccgggaaaaaaggcgggagaagccccggcaggtttgaagctgcttcttcgaatttgcaattcaatatgaaaaccacctcggagctggtaaaaagaggcctaacccctgtctttagatttacagtccaatgcttcactcagccattttacctcacccccactgatgttcgccgaccgttgactattctctacaaaccacaaagacattggaacactatacctattattcggcgcatgagctggagtcctaggcacagctctaagcctccttattcgagccgagctaggccagccaggcaaccttctaggtaacgaccacatctacaacgttatcgtcacagcccatgcatttgtaataatcttcttcatagtaatacccatcataatcggaggctttggcaactgactagttcccctaataatcggtgcccccgatatggcgtttccccgcataaacaacataagcttctgactcttacctccctctctcctactcctgctcgcatctgctatagtggaggccggagcaggaacaggttgaacagtctaccctcccttagcagggaactactcccaccctggagcctccgtagacctaaccatcttctccttacacctagcaggtgtctcctctatcttaggggccatcaatttcatcacaacaattatcaatataaaaccccctgccataacccaataccaaacgcccctcttcgtctgatccgtcctaatcacagcagtcctacttctcctatctctcccagtcctagctgctggcatcactatactactaacagaccgcaacctcaacaccaccttcttcgaccccgccggaggaggagaccccattctataccaacacctattctgatttttcggtcaccctgaagtttatattcttatcctaccaggcttcggaataatctcccatattgtaacttactactccggaaaaaaagaaccatttggatatataggtatggtctgagctatgatatcaattggcttcctagggtttatcgtgtgagcacaccatatatttacagtaggaatagacgtagacacacgagcatatttcacctccgctaccataatcatcgctatccccaccggcgtcaaagtatttagctgactcgccacactccacggaagcaatatgaaatgatctgctgcagtgctctgagccctaggattcatctttcttttcaccgtaggtggcctgactggcattgtattagcaaactcatcactagacatcgtactacacgacacgtactacgttgtagctcacttccactatgtcctatcaataggagctgtatttgccatcataggaggcttcattcactgatttcccctattctcaggctacaccctagaccaaacctacgccaaaatccatttcactatcatattcatcggcgtaaatctaactttcttcccacaacactttctcggcctatccggaatgccccgacgttactcggactaccccgatgcatacaccacatgaaatatcctatcatctgtaggctcattcatttctctaacagcagtaatattaataattttcatgatttgagaagccttcgcttcgaagcgaaaagtcctaatagtagaagaaccctccataaacctggagtgactatatggatgccccccaccctaccacacattcgaagaacccgtatacataaaatctagacaaaaaaggaaggaatcgaaccccccaaagctggtttcaagccaaccccatggcctccatgactttttcaaaaagatattagaaaaaccatttcataactttgtcaaagttaaattataggctaaatcctatatatcttaatggcacatgcagcgcaagtaggtctacaagacgctacatcccctatcatagaagagcttatcacctttcatgatcacgccctcataatcattttccttatctgcttcctagtcctgtatgcccttttcctaacactcacaacaaaactaactaatactaacatctcagacgctcaggaaatagaaaccgtctgaactatcctgcccgccatcatcctagtcctcatcgccctcccatccctacgcatcctttacataacagacgaggtcaacgatccctcccttaccatcaaatcaattggccaccaatggtactgaacctacgagtacaccgactacggcggactaatcttcaactcctacatacttcccccattattcctagaaccaggcgacctgggactccttgacgttgacaatcgagtagtactcccgattgaagcccccattcgtataataattacatcacaagacgtcttgcactcatgagctgtccccacattaggcttaaaaacagatgcaattcccggacgtctaaaccaaaccactttcaccgctacacgaccgggggtatactacggtcaatgctctgaaatctgtggagcaaaccacagtttcatacccatcgtcctagaattaattcccctaaaaatctttgaaatagggcccgtatttaccctatagcaccccctctaccccctctagagcccactgtaaagctaacttagcattaaccttttaagttaaagattaagagaaccaacacctctttacagtgaaatgccccaactaaatactaccatatggcccaccataattacccccatactccttacactattcctcatcacccaactaaaaatattaaacacaaactaccacctacctccctcaccaaagcccataaaaataaaaaattataacaaaccctgagaaccaaaatgaacgaaaatctgttcgcttcattcattgcccccacaatcctaggcctacccgccgcagtactgatcattctatttccccctctattgatccccacctccaaatatctcatcaacaaccgactaatcaccacccaacaatgactaatcaaactaacctcaaaacaaatgatagccatacacaacactaaaggacgaacctgatctcttatactagtatccttaatcatttttattgccacaactaacctcctcggactcctgcctcactcatttacaccaaccacccaactatctataaacctagccatggccatccccttatgagcgggcgcagtgattataggctttcgctctaagattaaaaatgccctagcccacttcttaccacaaggcacacctacaccccttatccccatactagttattatcgaaaccatcagcctactcattcaaccaatagccctggccgtacgcctaaccgctaacattactgcaggccacctactcatgcacctaattggaagcgccaccctagcaatatcaaccattaaccttccctctacacttatcatcttcacaattctaattctactgactatcctagaaatcgctgtcgccttaatccaagcctacgttttcacacttctagtaagcctctacctgcacgacaacacataatgacccaccaatcgcatgcctatcatatagtaaaacccagcccatgacccctaacaggggccctctcagccctcctaatgacctccggcctagccatgtgatttcacttccactccataacgctcctcatactaggcctactaaccaacacactaaccatataccaatgatggcgcgatgtaacacgagaaagcacataccaaggccaccacacaccacctgtccaaaaaggccttcgatacgggataatcctatttattacctcagaagtttttttcttcgcaggatttttctgagccttttaccactccagcctagcccctaccccccaactaggagggcactggcccccaacaggcatcaccccgctaaatcccctagaagtcccactcctaaacacatccgtattactcgcatcaggagtatcaatcacctgagctcaccatagtctaatagaaaacaaccgaaaccaaataattcaagcactgcttattacaattttactgggtctctattttaccctcctacaagcctcagagtacttcgagtctcccttcaccatttccgacggcatctacggctcaacattttttgtagccacaggcttccacggacttcacgtcattattggctcaactttcctcactatctgcttcatccgccaactaatatttcactttacatccaaacatcactttggcttcgaagccgccgcctgatactggcattttgtagatgtggtttgactatttctgtatgtctccatctattgatgagggtcttactcttttagtataaatagtaccgttaacttccaattaactagttttgacaacattcaaaaaagagtaataaacttcgccttaattttaataatcaacaccctcctagccttactactaataatcattacattttgactaccacaactcaacggctacatagaaaaatccaccccttacgagtgcggcttcgaccctatatcccccgcccgcgtccctttctccataaaattcttcttagtagctattaccttcttattatttgatctagaaattgccctccttttacccctaccatgagccctacaaacaactaacctgccactaatagttatgtcatccctcttattaatcatcatcctagccctaagtctggcctatgagtgactacaaaaaggattagactgagccgaattggtatatagtttaaacaaaacgaatgatttcgactcattaaattatgataatcatatttaccaaatgcccctcatttacataaatattatactagcatttaccatctcacttctaggaatactagtatatcgctcacacctcatatcctccctactatgcctagaaggaataatactatcgctgttcattatagctactctcataaccctcaacacccactccctcttagccaatattgtgcctattgccatactagtctttgccgcctgcgaagcagcggtgggcctagccctactagtctcaatctccaacacatatggcctagactacgtacataacctaaacctactccaatgctaaaactaatcgtcccaacaattatattactaccactgacatgactttccaaaaaacacataatttgaatcaacacaaccacccacagcctaattattagcatcatccccctactattttttaaccaaatcaacaacaacctatttagctgttccccaaccttttcctccgaccccctaacaacccccctcctaatactaactacctgactcctacccctcacaatcatggcaagccaacgccacttatccagtgaaccactatcacgaaaaaaactctacctctctatactaatctccctacaaatctccttaattataacattcacagccacagaactaatcatattttatatcttcttcgaaaccacacttatccccaccttggctatcatcacccgatgaggcaaccagccagaacgcctgaacgcaggcacatacttcctattctacaccctagtaggctcccttcccctactcatcgcactaatttacactcacaacaccctaggctcactaaacattctactactcactctcactgcccaagaactatcaaactcctgagccaacaacttaatatgactagcttacacaatagcttttatagtaaagatacctctttacggactccacttatgactccctaaagcccatgtcgaagcccccatcgctgggtcaatagtacttgccgcagtactcttaaaactaggcggctatggtataatacgcctcacactcattctcaaccccctgacaaaacacatagcctaccccttccttgtactatccctatgaggcataattataacaagctccatctgcctacgacaaacagacctaaaatcgctcattgcatactcttcaatcagccacatagccctcgtagtaacagccattctcatccaaaccccctgaagcttcaccggcgcagtcattctcataatcgcccacggacttacatcctcattactattctgcctagcaaactcaaactacgaacgcactcacagtcgcatcataatcctctctcaaggacttcaaactctactcccactaatagctttttgatgacttctagcaagcctcgctaacctcgccttaccccccactattaacctactgggagaactctctgtgctagtaaccacgttctcctgatcaaatatcactctcctactcacaggactcaacatactagtcacagccctatactccctctacatatttaccacaacacaatggggctcactcacccaccacattaacaacataaaaccctcattcacacgagaaaacaccctcatgttcatacacctatcccccattctcctcctatccctcaaccccgacatcattaccgggttttcctcttgtaaatatagtttaaccaaaacatcagattgtgaatctgacaacagaggcttacgaccccttatttaccgagaaagctcacaagaactgctaactcatacccccatgtctaacaacatggctttctcaacttttaaaggataacagctatccattggtcttaggccccaaaaattttggtgcaactccaaataaaagtaataaccatgcacactactataaccaccctaaccctgacttccctaattccccccatccttaccaccctcgttaaccctaacaaaaaaaactcatacccccattatgtaaaatccattgtcgcatccacctttattatcagtctcttccccacaacaatattcatgtgcctagaccaagaagttattatctcgaactgacactgagccacaacccaaacaacccagctctccctaagcttcaaactagactacttctccataatattcatccctgtagcattgttcgttacatggtccatcatagaattctcactgtgatatataaactcagacccaaacattaatcagttcttcaaatatctactcattttcctaattaccatactaatcttagttaccgctaacaacctattccaactgttcatcggctgagagggcgtaggaattatatccttcttgctcatcagttgatgatacgcccgagcagatgccaacacagcagccattcaagcaatcctatacaaccgtatcggcgatatcggtttcatcctcgccttagcatgatttatcctacactccaactcatgagacccacaacaaatagcccttctgaacgctaatccaagcctcaccccactactaggcctcctcctagcagcagcaggcaaatcagcccaattaggtctccacccctgactcccctcagccatagaaggccccaccccagtctcagccctactccactcaagcactatagttgtagcaggaatcttcttactcatccgcttccaccccctagcagaaaatagcccactaatccaaactctaacactatgcttaggcgctatcaccactctgttcgcagcagtctgcgcccttacacaaaatgacatcaaaaaaatcgtagccttctccacttcaagtcaactaggactcataatagttacaatcggcatcaaccaaccacacctagcattcctgcacatctgtacccacgccttcttcaaagccatactatttatgtgctccgggtccatcatccacaaccttaacaatgaacaagatattcgaaaaataggaggactactcaaaaccatacctctcacttcaacctccctcaccattggcagcctagcattagcaggaatacctttcctcacaggtttctactccaaagaccacatcatcgaaaccgcaaacatatcatacacaaacgcctgagccctatctattactctcatcgctacctccctaacaagcgcctatagcactcgaataattcttctcaccctgacaggtcaacctcgcttccctacccttactaacattaacgaaaataaccccaccctactaaaccccattaaacgcctggcagccggaagcctattcgcaggatttctcattactaacaacatttcccccgcatcccccttccaaacaacaatccccctctacctaaaactcacagccctcgctgtcactttcctaggacttctaacagccctagacctcaactacctaaccaacaaacttaaaataaaatccccactatgcacattttatttctccaacatactcggattctactctagcatcacacaccgcacaatcccctatctaggccttcttacgagccaaaacctgcccctactcctcctagacctaacctgactagaaaagctattacctaaaacaatttcacagcaccaaatctccacctccgtcatcacctcaacccaaaaaggcataattaaactttacttcctctctttcttcttcccactcatcctaaccctactcctaatcacataacctattcccccgagcaatctcaattacaatatatacaccaacaaacaatgttcaaccagtaactactactaatcaacgcccataatcatacaaagcccccgcaccaataggatcctcccgaatcaaccctgacccctctccttcataaattattcagcttcctacactattaaagtttaccacaaccaccaccccatcatactctttcacccacagcaccaatcctacctccatcgctaaccccactaaaacactcaccaagacctcaacccctgacccccatgcctcaggatactcctcaatagccatcgctgtagtatatccaaagacaaccatcattccccctaaataaattaaaaaaactattaaacccatataacctcccccaaaattcagaataataacacacccgaccacaccgctaacaatcaatactaaacccccataaataggagaaggcttagaagaaaaccccacaaaccccattactaaacccacactcaacagaaacaaagcatacatcattattctcgcacggactacaaccacgaccaatgatatgaaaaaccatcgttgtatttcaactacaagaacaccaatgaccccaatacgcaaaattaaccccctaataaaattaattaaccactcattcatcgacctccccaccccatccaacatctccgcatgatgaaacttcggctcactccttggcgcctgcctgatcctccaaatcaccacaggactattcctagccatgcactactcaccagacgcctcaaccgccttttcatcaatcgcccacatcactcgagacgtaaattatggctgaatcatccgctaccttcacgccaatggcgcctcaatattctttatctgcctcttcctacacatcgggcgaggcctatattacggatcatttctctactcagaaacctgaaacatcggcattatcctcctgcttacaactatagcaacagccttcataggctatgtcctcccgtgaggccaaatatcattctgaggggccacagtaattacaaacttactatccgccatcccatacattggaacagacctagttcaatgaatctgaggaggctactcagtagacagtcccaccctcacacgattctttacctttcacttcatcttacccttcattattgcagccctagcagcactccacctcctattcttgcacgaaacgggatcaaacaaccccctaggaatcacctcccattccgataaaatcaccttccacccttactacacaatcaaagacgccctcggcttacttctcttccttctctccttaatgacattaacactattctcaccagacctcctaggcgacccagacaattataccctagccaaccccttaaacacccctccccacatcaagcccgaatgatatttcctattcgcctacacaattctccgatccgtccctaacaaactaggaggcgtccttgccctattactatccatcctcatcctagcaataatccccatcctccatatatccaaacaacaaagcataatatttcgcccactaagccaatcactttattgactcctagccgcagacctcctcattctaacctgaatcggaggacaaccagtaagctacccttttaccatcattggacaagtagcatccgtactatacttcacaacaatcctaatcctaataccaactatctccctaattgaaaacaaaatactcaaatgggcctgtccttgtagtataaactaatacaccagtcttgtaaaccggagatgaaaacctttttccaaggacaaatcagagaaaaagtctttaactccaccattagcacccaaagctaagattctaatttaaactattctctgttctttcatggggaagcagatttgggtaccacccaagtattgactcacccatcaacaaccgctatgtatttcgtacattactgccagccaacatgaatattgtacagtaccataaatacttgaccacctgtagtacataaaaacccaatccacatcaaaaccccctccccatgcttacaagcaagtacaacaatcaaccttcaactatcacacatcaactgcaactccaaagccacccctcacccactaggatatcaacaaacctacccacccttaacagtacatagtacataaagccatttaccgtacatagcacattacagtcaaatcctttctcgcccccatggatgacccccctcagataggagtcccttgaccaccatcctccgtgaaatcaatatcccgcacaagagtgctactctcctcgctccgggcccataacacttgggggtagctaaagtgaactgtatccgacatctggttcctacttcagggtcataaagcctaaatagcccacacgttccccttaaataagacatcacgatg

SEQ ID NO: 177 - DNA, 16568 bp, Homo sapiens mitochondrial
  3106: "n" refers to a nucleotide at position 3107 of the Cambridge Reference Sequence (CRS, Anderson et al. 1981 Nature 290:457-465), later determined to be absent from the human mtDNA sequence according to the revised CRS (rCRS, Andrews et al. 1999 Nature Genetics 23:147); "n" therefore represents a single nucleotide deletion at a position corresponding to nucleotide 3107 of SEQ ID NO:1 as provided herein.
gatcacaggtctatcaccctattaaccactcacgggagctctccatgcatttggtattttcgtctggggggtgtgcacgcgatagcattgcgagacgctggagccggagcaccctatgtcgcagtatctgtctttgattcctgccccatcctgttatttatcgcacctacgttcaatattacaggcgaacatacttactaaagtgtgttaattaattaatgcttgtaggacatagtaataacaattgaatgtctgcacagccgctttccacacagacatcataacaagaaatttccaccaaaccccccctcccccgccttctggccacagcacttaaacacatctctgccaaaccccaaaaacaaagaaccctaacaccagcctaaccagatttcaaattttatcttttggcggtatgcacttttaacagtcaccccccaactaacacattattttcccctcccactcccatactactaatctcatcaatacaacccccgcccatcctacccagcacacacaccgctgctaaccccataccccgaaccaaccaaaccccaaagacaccccccacagtttatgtagcttacctcctcaaagcaatacactgaaaatgtttagacgggctcacatcaccccataaacaaataggtttggtcctggcctttctattagctcttagtaagattacacatgcaagcatccccgttccagtgagttcaccctctaaatcaccacgatcaaaagggacaagcatcaagcacgcagcaatgcagctcaaaacgcttagcctagccacacccccacgggaaacagcagtgattaacctttagcaataaacgaaagtttaactaagctatactaaccccagggttggtcaatttcgtgccagccaccgcggtcacacgattaacccaagtcaatagaagccggcgtaaagagtgttttagatcaccccctccccaataaagctaaaactcacctgagttgtaaaaaactccagttgacacaaaatagactacgaaagtggctttaacatatctgaacacacaatagctaagacccaaactgggattagataccccactatgcttagccctaaacctcaacagttaaatcaacaaaactgctcgccagaacactacgagccacagcttaaaactcaaaggacctggcggtgcttcatatccctctagaggagcctgttctgtaatcgataaaccccgatcaacctcaccacctcttgctcagcctatataccgccatcttcagcaaaccctgatgaaggctacaaagtaagcgcaagtacccacgtaaagacgttaggtcaaggtgtagcccatgaggtggcaagaaatgggctacattttctaccccagaaaactacgatagcccttatgaaacttaagggtcgaaggtggatttagcagtaaactgagagtagagtgcttagttgaacagggccctgaagcgcgtacacaccgcccgtcaccctcctcaagtatacttcaaaggacatttaactaaaacccctacgcatttatatagaggagacaagtcgtaacatggtaagtgtactggaaagtgcacttggacgaaccagagtgtagcttaacacaaagcacccaacttacacttaggagatttcaacttaacttgaccgctctgagctaaacctagccccaaacccactccaccttactaccagacaaccttagccaaaccatttacccagataaagtataggcgatagaaattgaaacctggcgcaatagatatagtaccgcaagggaaagatgaaaaattataaccaagcataatatagcaaggactaacccctataccttctgcataatgaattaactagaaataactttgcaaggagagccaaagctaagacccccgaaaccagacgagctacctaagaacagctaaaagagcacacccgtctatgtagcaaaatagtgggaagatttataggtagaggcgacaaacctaccgagcctggtgatagctggttgtccaagatagaatcttagttcaactttaaatttgcccacagaaccctctaaatccccttgtaaatttaactgttagtccaaagaggaacagctctttggacactaggaaaaaaccttgtagagagagtaaaaaatttaacacccatagtaggcctaaaagcagccaccaattaagaaagcgttcaagctcaacacccactacctaaaaaatcccaaacatataactgaactcctcacacccaattggaccaatctatcaccctatagaagaactaatgttagtataagtaacatgaaaacattctcctccgcataagcctgcgtcagattaaaacactgaactgacaattaacagcccaatatctacaatcaaccaacaagtcattattaccctcactgtcaacccaacacaggcatgctcataaggaaaggttaaaaaaagtaaaaggaactcggcaaatcttaccccgcctgtttaccaaaaacatcacctctagcatcaccagtattagaggcaccgcctgcccagtgacacatgtttaacggccgcggtaccctaaccgtgcaaaggtagcataatcacttgttccttaaatagggacctgtatgaatggctccacgagggttcagctgtctcttacttttaaccagtgaaattgacctgcccgtgaagaggcgggcatgacacagcaagacgagaagaccctatggagctttaatttattaatgcaaacagtacctaacaaacccacaggtcctaaactaccaaacctgcattaaaaatttcggttggggcgacctcggagcagaacccaacctccgagcagtacatgctaagacttcaccagtcaaagcgaactactatactcaattgatccaataacttgaccaacggaacaagttaccctagggataacagcgcaatcctattctagagtccatatcaacaatagggtttacgacctcgatgttggatcaggacatcccgatggtgcagccgctattaaaggttcgtttgttcaacgattaaagtcctacgtgatctgagttcagaccggagtaatccaggtcggtttctatctacnttcaaattcctccctgtacgaaaggacaagagaaataaggcctacttcacaaagcgccttcccccgtaaatgatatcatctcaacttagtattatacccacacccacccaagaacagggtttgttaagatggcagagcccggtaatcgcataaaacttaaaactttacagtcagaggttcaattcctcttcttaacaacatacccatggccaacctcctactcctcattgtacccattctaatcgcaatggcattcctaatgcttaccgaacgaaaaattctaggctatatacaactacgcaaaggccccaacgttgtaggcccctacgggctactacaacccttcgctgacgccataaaactcttcaccaaagagcccctaaaacccgccacatctaccatcaccctctacatcaccgccccgaccttagctctcaccatcgctcttctactatgaacccccctccccatacccaaccccctggtcaacctcaacctaggcctcctatttattctagccacctctagcctagccgtttactcaatcctctgatcagggtgagcatcaaactcaaactacgccctgatcggcgcactgcgagcagtagcccaaacaatctcatatgaagtcaccctagccatcattctactatcaacattactaataagtggctcctttaacctctccacccttatcacaacacaagaacacctctgattactcctgccatcatgacccttggccataatatgatttatctccacactagcagagaccaaccgaacccccttcgaccttgccgaaggggagtccgaactagtctcaggcttcaacatcgaatacgccgcaggccccttcgccctattcttcatagccgaatacacaaacattattataataaacaccctcaccactacaatcttcctaggaacaacatatgacgcactctcccctgaactctacacaacatattttgtcaccaagaccctacttctaacctccctgttcttatgaattcgaacagcatacccccgattccgctacgaccaactcatacacctcctatgaaaaaacttcctaccactcaccctagcattacttatatgatatgtctccatacccattacaatctccagcatcccccctcaaacctaagaaatatgtctgataaaagagttactttgatagagtaaataataggagcttaaacccccttatttctaggactatgagaatcgaacccatccctgagaatccaaaattctccgtgccacctatcacaccccatcctaaagtaaggtcagctaaataagctatcgggcccataccccgaaaatgttggttatacccttcccgtactaattaatcccctggcccaacccgtcatctactctaccatctttgcaggcacactcatcacagcgctaagctcgcactgattttttacctgagtaggcctagaaataaacatgctagcttttattccagttctaaccaaaaaaataaaccctcgttccacagaagctgccatcaagtatttcctcacgcaagcaaccgcatccataatccttctaatagctatcctcttcaacaatatactctccggacaatgaaccataaccaatactaccaatcaatactcatcattaataatcataatggctatagcaataaaactaggaatagccccctttcacttctgagtcccagaggttgcccaaggcacccctctgacatccggcctgcttcttctcacatgacaaaaactagcccccatctcaatcatataccaaatctctccctcactaaacgtaagccttctcctcactctctcaatcttatccatcatagcaggcagttgaggtggattaaaccaaacccagctacgcaaaatcttagcatactcctcaattacccacataggatgaataatagcagttctaccgtacaaccctaacataaccattcttaatttaactatttatattatcctaactactaccgcattcctactactcaacttaaactccagcaccacgaccctactactatctcgcacctgaaacaagctaacatgactaacacccttaattccatccaccctcctctccctaggaggcctgcccccgctaaccggctttttgcccaaatgggccattatcgaagaattcacaaaaaacaatagcctcatcatccccaccatcatagccaccatcaccctccttaacctctacttctacctacgcctaatctactccacctcaatcacactactccccatatctaacaacgtaaaaataaaatgacagtttgaacatacaaaacccaccccattcctccccacactcatcgcccttaccacgctactcctacctatctccccttttatactaataatcttatagaaatttaggttaaatacagaccaagagccttcaaagccctcagtaagttgcaatacttaatttctgtaacagctaaggactgcaaaaccccactctgcatcaactgaacgcaaatcagccactttaattaagctaagcccttactagaccaatgggacttaaacccacaaacacttagttaacagctaagcaccctaatcaactggcttcaatctacttctcccgccgccgggaaaaaaggcgggagaagccccggcaggtttgaagctgcttcttcgaatttgcaattcaatatgaaaatcacctcggagctggtaaaaagaggcctaacccctgtctttagatttacagtccaatgcttcactcagccattttacctcacccccactgatgttcgccgaccgttgactattctctacaaaccacaaagacattggaacactatacctattattcggcgcatgagctggagtcctaggcacagctctaagcctccttattcgagccgagctgggccagccaggcaaccttctaggtaacgaccacatctacaacgttatcgtcacagcccatgcatttgtaataatcttcttcatagtaatacccatcataatcggaggctttggcaactgactagttcccctaataatcggtgcccccgatatggcgtttccccgcataaacaacataagcttctgactcttacctccctctctcctactcctgctcgcatctgctatagtggaagccggagcaggaacaggttgaacagtctaccctcccttagcagggaactactcccaccctggagcctccgtagacctaaccatcttctccttacacctagcaggtgtctcctctatcttaggggccatcaatttcatcacaacaattatcaatataaaaccccctgccataacccaataccaaacgcccctcttcgtctgatccgtcctaatcacagcagtcctacttctcctatctctcccagtcctagctgctggcatcactatactactaacagaccgcaacctcaacaccaccttcttcgaccccgccggaggaggagaccccattctataccaacacctattctgatttttcggtcaccctgaagtttatattcttatcctaccaggcttcggaataatctcccatattgtaacttactactccggaaaaaaagaaccatttggatacataggtatggtctgagctatgatatcaattggcttcctagggtttatcgtgtgagcacaccatatatttacagtaggaatagacgtagacacacgagcatatttcacctccgctaccataatcatcgctatccccaccggcgtcaaagtatttagctgactcgccacactccacggaagcaatatgaaatgatctgctgcagtgctctgagccctaggattcatctttcttttcaccgtaggtggcctgactggcattgtattagcaaactcatcactagacatcgtactacacgacacgtactacgttgtagctcacttccactatgtcctatcaataggagctgtatttgccatcataggaggcttcattcactgatttcccctattctcaggctacaccctagaccaaacctacgccaaaatccatttcactatcatattcatcggcgtaaatctaactttcttcccacaacactttctcggcctatccggaatgccccgacgttactcggactaccccgatgcatacaccacatgaaacatcctatcatctgtaggctcattcatttctctaacagcagtaatattaataattttcatgatttgagaagccttcgcttcgaagcgaaaagtcctaatagtagaagaaccctccataaacctggagtgactatatggatgccccccaccctaccacacattcgaagaacccgtatacataaaatctagacaaaaaaggaaggaatcgaaccccccaaagctggtttcaagccaaccccatggcctccatgactttttcaaaaaggtattagaaaaaccatttcataactttgtcaaagttaaattataggctaaatcctatatatcttaatggcacatgcagcgcaagtaggtctacaagacgctacttcccctatcatagaagagcttatcacctttcatgatcacgccctcataatcattttccttatctgcttcctagtcctgtatgcccttttcctaacactcacaacaaaactaactaatactaacatctcagacgctcaggaaatagaaaccgtctgaactatcctgcccgccatcatcctagtcctcatcgccctcccatccctacgcatcctttacataacagacgaggtcaacgatccctcccttaccatcaaatcaattggccaccaatggtactgaacctacgagtacaccgactacggcggactaatcttcaactcctacatacttcccccattattcctagaaccaggcgacctgcgactccttgacgttgacaatcgagtagtactcccgattgaaacccccattcgtataataattacatcacaagacgtcttgcactcatgagctgtccccacattaggcttaaaaacagatgcaattcccggacgtctaaaccaaaccactttcaccgctacacgaccgggggtatactacggtcaatgctctgaaatctgtggagcaaaccacagtttcatgcccatcgtcctagaattaattcccctaaaaatctttgaaatagggcccgtatttaccctatagcaccccctctaccccctctagagcccactgtaaagctaacttagcattaaccttttaagttaaagattaagagaaccaacacctctttacagtgaaatgccccaactaaatactaccgtatggcccaccataattacccccatactccttacactattcctcatcacccaactaaaaatattaaacacaaactaccacctacctccctcaccaaagcccataaaaataaaaaattataacaaaccctgagaaccaaaatgaacgaaaatctgttcgcttcattcattgcccccacaatcctaggcctacccgccgcagtactgatcattctatttccccctctattgatccccacctccaaatatctcatcaacaaccgactaatcaccacccaacaatgactaatcaaactaacctcaaaacaaatgataaccatacacaacactaaaggacgaacctgatctcttatactagtatccttaatcatttttattgccacaactaacctcctcggactcctgccttactcatttacaccaaccacccaactatctataaacctagccatggccatccccttatgagcgggcgcagtgattataggctttcgctctaagattaaaaatgccctagcccacttcttaccacaaggcacacctacaccccttatccccatactagttattatcgaaaccatcagcctactcattcaaccaatagccctggccgtacgcctaaccgctaacattactgcaggccacctactcatgcacctaattggaagcgccaccctagcaatatcaaccattaaccttccctctacacttatcatcttcacaattctaattctactgactatcctagaaatcgctgtcgccttaatccaagcctacgttttcacacttctagtaagcctctacctgcacgacaacacataatgacccaccaatcacatgcctatcatatagtaaaacccagcccatgacccctaacaggggccctctcagccctcctaatgacctccggcctagccatgtgatttcacttccactccataacgctcctcatactaggcctactaaccaacacactaaccatataccaatgatggcgcgatgtaacacgagaaagcacataccaaggccaccacacaccacctgtccaaaaaggccttcgatacgggataatcctatttattacctcagaagtttttttcttcgcaggatttttctgagccttttaccactccagcctagcccctaccccccaattaggagggcactggcccccaacaggcatcaccccgctaaatcccctagaagtcccactcctaaacacatccgtattactcgcatcaggagtatcaatcacctgagctcaccatagtctaatagaaaacaaccgaaaccaaataattcaagcactgcttattacaattttactgggtctctattttaccctcctacaagcctcagagtacttcgagtctcccttcaccatttccgacggcatctacggctcaacattttttgtagccacaggcttccacggacttcacgtcattattggctcaactttcctcactatctgcttcatccgccaactaatatttcactttacatccaaacatcactttggcttcgaagccgccgcctgatactggcattttgtagatgtggtttgactatttctgtatgtctccatctattgatgagggtcttactcttttagtataaatagtaccgttaacttccaattaaccagttttgacaacattcaaaaaagagtaataaacttcgccttaattttaataatcaacaccctcctagccttactactaataattattacattttgactaccacaactcaacggctacatagaaaaatccaccccttacgagtgcggcttcgaccctatatcccccgcccgcgtccctttctccataaaattcttcttagtagctattaccttcttattatttgatctagaaattgccctccttttacccctaccatgagccctacaaacaactaacctgccactaatagttatgtcatccctcttattaatcatcatcctagccctaagtctggcctatgagtgactacaaaaaggattagactgaaccgaattggtatatagtttaaacaaaacgaatgatttcgactcattaaattatgataatcatatttaccaaatgcccctcatttacataaatattatactagcatttaccatctcacttctaggaatactagtatatcgctcacacctcatatcctccctactatgcctagaaggaataatactatcgctgttcattatagctactctcataaccctcaacacccactccctcttagccaatattgtgcctattgccatactagtctttgccgcctgcgaagcagcggtgggcctagccctactagtctcaatctccaacacatatggcctagactacgtacataacctaaacctactccaatgctaaaactaatcgtcccaacaattatattactaccactgacatgactttccaaaaaacacataatttgaatcaacacaaccacccacagcctaattattagcatcatccctctactattttttaaccaaatcaacaacaacctatttagctgttccccaaccttttcctccgaccccctaacaacccccctcctaatactaactacctgactcctacccctcacaatcatggcaagccaacgccacttatccagtgaaccactatcacgaaaaaaactctacctctctatactaatctccctacaaatctccttaattataacattcacagccacagaactaatcatattttatatcttcttcgaaaccacacttatccccaccttggctatcatcacccgatgaggcaaccagccagaacgcctgaacgcaggcacatacttcctattctacaccctagtaggctcccttcccctactcatcgcactaatttacactcacaacaccctaggctcactaaacattctactactcactctcactgcccaagaactatcaaactcctgagccaacaacttaatatgactagcttacacaatagcttttatagtaaagatacctctttacggactccacttatgactccctaaagcccatgtcgaagcccccatcgctgggtcaatagtacttgccgcagtactcttaaaactaggcggctatggtataatacgcctcacactcattctcaaccccctgacaaaacacatagcctaccccttccttgtactatccctatgaggcataattataacaagctccatctgcctacgacaaacagacctaaaatcgctcattgcatactcttcaatcagccacatagccctcgtagtaacagccattctcatccaaaccccctgaagcttcaccggcgcagtcattctcataatcgcccacggacttacatcctcattactattctgcctagcaaactcaaactacgaacgcactcacagtcgcatcataatcctctctcaaggacttcaaactctactcccactaatagctttttgatgacttctagcaagcctcgctaacctcgccttaccccccactattaacctactgggagaactctctgtgctagtaaccacgttctcctgatcaaatatcactctcctacttacaggactcaacatactagtcacagccctatactccctctacatatttaccacaacacaatgaggctcactcacccaccacattaacaacataaaaccctcattcacacgagaaaacaccctcatgttcatacacctatcccccattctcctcctatccctcaaccccgacatcattaccgggttttcctcttgtaaatatagtttaaccaaaacatcagattgtgaatctgacaacagaggcttacgaccccttatttaccgagaaagctcacaagaactgctaactcatgcccccatgtctaacaacatggctttctcaacttttaaaggataacagctatccattggtcttaggccccaaaaattttggtgcaactccaaataaaagtaataaccatgcacactactataaccaccctaaccctgacttccctaattccccccatccttaccaccctcgttaaccctaacaaaaaaaactcatacccccattatgtaaaatccattgtcgcatccacctttattatcagtctcttccccacaacaatattcatgtgcctagaccaagaagttattatctcgaactgacactgagccacaacccaaacaacccagctctccctaagcttcaaactagactacttctccataatattcatccctgtagcattgttcgttacatggtccatcatagaattctcactgtgatatataaactcagacccaaacattaatcagttcttcaaatatctactcattttcctaattaccatactaatcttagttaccgctaacaacctattccaactgttcatcggctgagagggcgtaggaattatatccttcttgctcatcagttgatgatacgcccgagcagatgccaacacagcagccattcaagcaatcctatacaaccgtatcggcgatatcggtttcatcctcgccttagcatgatttatcctacactccaactcatgagacccacaacaaatagcccttctaaacgctaatccaagcctcaccccactactaggcctcctcctagcagcagcaggcaaatcagcccaattaggtctccacccctgactcccctcagccatagaaggccccaccccagtctcagccctactccactcaagcactatagttgtagcaggaatcttcttactcatccgcttccaccccctagcagaaaatagcccactaatccaaactctaacactatgcttaggcgctatcaccactctgttcgcagcagtctgcgcccttacacaaaatgacatcaaaaaaatcgtagccttctccacttcaagtcaactaggactcataatagttacaatcggcatcaaccaaccacacctagcattcctgcacatctgtacccacgccttcttcaaagccatactatttatgtgctccgggtccatcatccacaaccttaacaatgaacaagatattcgaaaaataggaggactactcaaaaccatacctctcacttcaacctccctcaccattggcagcctagcattagcaggaatacctttcctcacaggtttctactccaaagaccacatcatcgaaaccgcaaacatatcatacacaaacgcctgagccctatctattactctcatcgctacctccctgacaagcgcctatagcactcgaataattcttctcaccctaacaggtcaacctcgcttccccacccttactaacattaacgaaaataaccccaccctactaaaccccattaaacgcctggcagccggaagcctattcgcaggatttctcattactaacaacatttcccccgcatcccccttccaaacaacaatccccctctacctaaaactcacagccctcgctgtcactttcctaggacttctaacagccctagacctcaactacctaaccaacaaacttaaaataaaatccccactatgcacattttatttctccaacatactcggattctaccctagcatcacacaccgcacaatcccctatctaggccttcttacgagccaaaacctgcccctactcctcctagacctaacctgactagaaaagctattacctaaaacaatttcacagcaccaaatctccacctccatcatcacctcaacccaaaaaggcataattaaactttacttcctctctttcttcttcccactcatcctaaccctactcctaatcacataacctattcccccgagcaatctcaattacaatatatacaccaacaaacaatgttcaaccagtaactactactaatcaacgcccataatcatacaaagcccccgcaccaataggatcctcccgaatcaaccctgacccctctccttcataaattattcagcttcctacactattaaagtttaccacaaccaccaccccatcatactctttcacccacagcaccaatcctacctccatcgctaaccccactaaaacactcaccaagacctcaacccctgacccccatgcctcaggatactcctcaatagccatcgctgtagtatatccaaagacaaccatcattccccctaaataaattaaaaaaactattaaacccatataacctcccccaaaattcagaataataacacacccgaccacaccgctaacaatcaatactaaacccccataaataggagaaggcttagaagaaaaccccacaaaccccattactaaacccacactcaacagaaacaaagcatacatcattattctcgcacggactacaaccacgaccaatgatatgaaaaaccatcgttgtatttcaactacaagaacaccaatgaccccaatacgcaaaattaaccccctaataaaattaattaaccactcattcatcgacctccccaccccatccaacatctccgcatgatgaaacttcggctcactccttggcgcctgcctgatcctccaaatcaccacaggactattcctagccatgcactactcaccagacgcctcaaccgccttttcatcaatcgcccacatcactcgagacgtaaattatggctgaatcatccgctaccttcacgccaatggcgcctcaatattctttatctgcctcttcctacacatcgggcgaggcctatattacggatcatttctctactcagaaacctgaaacatcggcattatcctcctgcttgcaactatagcaacagccttcataggctatgtcctcccgtgaggccaaatatcattctgaggggccacagtaattacaaacttactatccgccatcccatacattgggacagacctagttcaatgaatctgaggaggctactcagtagacagtcccaccctcacacgattctttacctttcacttcatcttgcccttcattattgcagccctagcagcactccacctcctattcttgcacgaaacgggatcaaacaaccccctaggaatcacctcccattccgataaaatcaccttccacccttactacacaatcaaagacgccctcggcttacttctcttccttctctccttaatgacattaacactattctcaccagacctcctaggcgacccagacaattataccctagccaaccccttaaacacccctccccacatcaagcccgaatgatatttcctattcgcctacacaattctccgatccgtccctaacaaactaggaggcgtccttgccctattactatccatcctcatcctagcaataatccccatcctccatatatccaaacaacaaagcataatatttcgcccactaagccaatcactttattgactcctagccgcagacctcctcattctaacctgaatcggaggacaaccagtaagctacccttttaccatcattggacaagtagcatccgtactatacttcacaacaatcctaatcctaataccaactatctccctaattgaaaacaaaatactcaaatgggcctgtccttgtagtataaactaatacaccagtcttgtaaaccggagatgaaaacctttttccaaggacaaatcagagaaaaagtctttaactccaccattagcacccaaagctaagattctaatttaaactattctctgttctttcatggggaagcagatttgggtaccacccaagtattgactcacccatcaacaaccgctatgtatttcgtacattactgccagtcaccatgaatattgtacggtaccataaatacttgaccacctgtagtacataaaaacccaatccacatcaaaaccccctccccatgcttacaagcaagtacagcaatcaaccttcaactatcatacatcaactgcaactccaaagccacccctcacccactaggataccaacaaacctatccacccttaacagtacatagtacataaaaccatttaccgtacatagcacattacagtcaaatcccttctcgcccccatggatgacccccctcagataggggtcccttgaccaccatcctccgtgaaatcaatatcccgcacaagagtgctactctcctcgctccgggcccataacacttgggggtagctaaagtgaactgtatccgacatctggttcctacctcagggtcataaagcctaaatagcccacacgttccccttaagtaagacatcacgatg

SEQ ID NO: 178 - DNA, 16568 bp, Homo sapiens mitochondrial
  3106: "n" refers to a nucleotide at position 3107 of the Cambridge Reference Sequence (CRS, Anderson et al. 1981 Nature 290:457-465), later determined to be absent from the human mtDNA sequence according to the revised CRS (rCRS, Andrews et al. 1999 Nature Genetics 23:147); "n" therefore represents a single nucleotide deletion at a position corresponding to nucleotide 3107 of SEQ ID NO:1 as provided herein.
gatcacaggtctatcaccctattaaccactcacgggagctctccatgcatttggtattttcgtctggggggtgtgcacgcgatagcattgcgagacgctggagccggagcaccctatgtcgcagtatctgtctttgattcctgcctcatcccattatttatcgcacctacgttcaatattacaggcgaacatacttactaaagtgtgttaattaattaatgcttgtaggacataataataacaattgatgtctgcacagccgctttccacacagacatcataacaaaatttccaccaaaccccccctcccccccgcttctggccacagcacttaaacacatctctgccaaaccccaaaaacaaagaaccctaacaccagcctaaccagatttcaaattttatcttttggcggtatgcacttttaacagtcaccccccaactaacacattattttcccctcccactcccatactactaatctcatcaacacaacccccgcccatcctacccagcacacacacaccgctgctaaccccataccccgaaccaaccaaaccccaaagacaccccccacagtttatgtagcttacctcctcaaagcaatacactgaaaatgtttagacgggctcacatcaccccataaacaaataggtttggtcctagcctttctattagctcttagtaagattacacatgcaagcatccccgttccagtgagttcaccctctaaatcaccacgatcaaaagggacaagcatcaagcacgcagcaatgcagctcaaaacgcttagcctagccacacccccacgggaaacagcagtgattaacctttagcaataaacgaaagtttaactaagctatactaaccccagggttggtcaatttcgtgccagccaccgcggtcacacgattaacccaagtcaatagaagccggcgtaaagagtgttttagatcaccccctccccaataaagctaaaactcacctgagttgtaaaaaactccagttgacacaaaatagactacgaaagtggctttaacatatctgaacacacaatagctaagacccaaactgggattagataccccactatgcttagccctaaacctcaacagttaaatcaacaaaactgctcgccagaacactacgagccacagcttaaaactcaaaggacctggcggtgcttcatatccctctagaggagcctgttctgtaatcgataaaccccgatcaacctcaccacctcttgctcagcctatataccgccatcttcagcaaaccctgatgaaggctacaaagtaagcgcaagtacccacgtaaagacgttaggtcaaggtgtagcccatgaggtggcaagaaatgggctacattttctaccccagaaaactacgatagcccttatgaaacttaagggtcgaaggtggatttagcagtaaactgagagtagagtgcttagttgaacagggccctgaagcgcgtacacaccgcccgtcaccctcctcaagtatacttcaaaggacatttaactaaaacccctacgcatttatatagaggagacaagtcgtaacatggtaagtgtactggaaagtgcacttggacgaaccagagtgtagcttaacacaaagcacccaacttacacttaggagatttcaacttaacttgaccgctctgagctaaacctagccccaaacccactccaccttactaccagacaaccttagccaaaccatttacccaaataaagtataggcgatagaaattgaaacctggcgcaatagatatagtaccgcaagggaaagatgaaaaattataaccaagcataatatagcaaggactaacccctataccttctgcataatgaattaactagaaataactttgcaaggagaaccaaagctaagacccccgaaaccagacgagctacctaagaacagctaaaagagcacacccgtctatgtagcaaaatagtgggaagatttataggtagaggcgacaaacctaccgagcctggtgatagctggttgtccaagatagaatcttagttcaactttaaatttgcccacagaaccctctaaatccccttgtaaatttaactgttagtccaaagaggaacagctctttggacactaggaaaaaaccttgtagagagagtaaaaaatttaacacccatagtaggcctaaaagcagccaccaattaagaaagcgttcaagctcaacacccactacctaaaaaatcccaaacatataactgaactcctcacacccaattggaccaatctatcaccctatagaagaactaatgttagtataagtaacatgaaaacattctcctccgcataagcctgcgtcagattaaaacactgaactgacaattaacagcccaatatctacaatcaaccaacaagtcattattaccctcactgtcaacccaacacaggcatgctcataaggaaaggttaaaaaaagtaaaaggaactcggcaaatcttaccccgcctgtttaccaaaaacatcacctctagcatcaccagtattagaggcaccgcctgcccagtgacacatgtttaacggccgcggtaccctaaccgtgcaaaggtagcataatcacttgttccttaaatagggacctgtatgaatggctccacgagggttcagctgtctcttacttttaaccagtgaaattgacctgcccgtgaagaggcgggcatgacacagcaagacgagaagaccctatggagctttaatttattaatgcaaacagtacctaacaaacccacaggtcctaaactaccaaacctgcattaaaaatttcggttggggcgacctcggagcagaacccaacctccgagcagtacatgctaagacttcaccagtcaaagcgaactactatactcaattgatccaataacttgaccaacggaacaagttaccctagggataacagcgcaatcctattctagagtccatatcaacaatagggtttacgacctcgatgttggatcaggacatcccgatggtgcagccgctattaaaggttcgtttgttcaacgattaaagtcctacgtgatctgagttcagaccggagtaatccaggtcggtttctatctacnttcaaattcctccctgtacgaaaggacaagagaaataaggcctacttcacaaagcgccttcccccgtaaatgatatcatctcaacttagtattatacccacacccacccaagaacagggtttgttaagatggcagagcccggtaatcgcataaaacttaaaactttacagtcagaggttcaattcctcttcttaacaacatacccatggccaacctcctactcctcattgtacccattctaatcgcaatggcattcctaatgcttaccgaacgaaaaattctaggctatatacaactacgcaaaggccccaacgttgtaggcccctacgggctactacaacccttcgctgacgccataaaactcttcaccaaagagcccctaaaacccgccacatctaccatcaccctctacatcaccgccccgaccttagctctcaccatcgcacttctactatgaacccccctccccatacccaaccccctggtcaacctcaacctaggcctcctatttattctagccacctctagcctagccgtttactcaatcctctgatcagggtgagcatcaaactcaaactacgccctgatcggcgcactgcgagcagtagcccaaacaatctcatatgaagtcaccctagccatcattctactatcaacattactaataagtggctcctttaacctctccacccttatcacaacacaagaacacctctgattactcctgccatcatgacccttggccataatatgatttatctccacactagcagagaccaaccgaacccccttcgaccttgccgaaggggagtccgaactagtctcaggcttcaacatcgaatacgccgcaggccccttcgccctattcttcatagccgaatacacaaacattattataataaacaccctcaccactacaatcttcctaggaacaacatatgacgcactctcccctgaactctacacaacatattttgtcaccaagaccctacttctaacctccctgttcttatgaattcgaacagcatacccccgattccgctacgaccaactcatacacctcctatgaaaaaacttcctaccactcaccctagcattacttatatgatatgtctccatacccattacaatctccagcattccccctcaaacctaagaaatatgtctgataaaagagttactttgatagagtaaataataggagcttaaacccccttatttctaggactatgagaatcgaacccatccctgagaatccaaaattctccgtgccacctatcacaccccatcctaaagtaaggtcagctaaataagctatcgggcccataccccgaaaatgttggttatacccttcccgtactaattaatcccctggcccaacccgtcatctactctaccatctttgcaggcacactcatcacagcgctaagctcgcactgattttttacctgagtaggcctagaaataaacatgctagcttttattccagttctaaccaaaaaaataaaccctcgttccacagaagctgccatcaagtatttcctcacgcaagcaaccgcatccataatccttctaatagctatcctcttcaacaatatactctccgggcaatgaaccataaccaatactaccaatcaatactcatcattaataatcataatggctatagcaataaaactaggaatagccccctttcacttctgagtcccagaggttacccaaggcacccctctgacatccggcctgcttcttctcacatgacaaaaactagcccccatctcaatcatataccaaatctctccctcactaaacgtaagccttctcctcactctctcaatcttatccatcatagcaggcagttgaggtggattaaaccaaacccagctacgcaaaatcttagcatactcctcaattacccacataggatgaataatagcagttctaccgtacaaccctaacataaccattcttaatttaactatttatattatcctaactactaccgcattcctactactcaacttaaactccagcaccacgaccctactactatctcgcacctgaaacaagctaacatgactaacacccttaattccatccaccctcctctccctaggaggcctgcccccgctaaccggctttttgcccaaatgggccattatcgaagaattcacaaaaaacaatagcctcatcatccccaccatcatagccaccatcaccctccttaacctctacttctacctacgcctaatctactccacctcaatcacactactccccatatctaacaacgtaaaaataaaatgacagtttgaacatacaaaacccaccccattcctccccacactcatcgcccttaccacgctactcctacctatctccccttttatactaataatcttatagaaatttaggttaaatacagaccaagagccttcaaagccctcagtaagttgcaatacttaatttctgtaacagctaaggactgcaaaaccccactctgcatcaactgaacgcaaatcagccactttaattaagctaagcccttactagaccaatgggacttaaacccacaaacacttagttaacagctaagcaccctaatcaactggcttcaatctacttctcccgccgccgggaaaaaaggcgggagaagccccggcaggtttgaagctgcttcttcgaatttgcaattcaatatgaaaatcacctcggagctggtaaaaagaggcctaacccctgtctttagatttacagtccaatgcttcactcagccattttacctcacccccactgatgttcgccgaccgttgactattctctacaaaccacaaagacattggaacactatacctattattcggcgcatgagctggagtcctaggcacagctctaagcctccttattcgagccgagctgggccagccaggcaaccttctaggtaacgaccacatctacaacgttatcgtcacagcccatgcatttgtaataatcttcttcatagtaatacccatcataatcggaggctttggcaactgactagttcccctaataatcggtgcccccgatatggcgtttccccgcataaacaacataagcttctgactcttacctccctctctcctactcctgctcgcatctgctatagtggaggccggagcaggaacaggttgaacagtctaccctcccttagcagggaactactcccaccctggagcctccgtagacctaaccatcttctccttacacctagcaggtgtctcctctatcttaggggccatcaatttcatcacaacaattatcaatataaaaccccctgccataacccaataccaaacgcccctcttcgtctgatccgtcctaatcacagcagtcctacttctcctatctctcccagtcctagctgctggcatcactatactactaacagaccgcaacctcaacaccaccttcttcgaccccgccggaggaggagaccccattctataccaacacctattctgatttttcggtcaccctgaagtttatattcttatcctaccaggcttcggaataatctcccatattgtaacttactactccggaaaaaaagaaccatttggatacataggtatggtctgagctatgatatcaattggcttcctagggtttatcgtgtgagcacaccatatatttacagtaggaatagacgtagacacacgagcatatttcacctccgctaccataatcatcgctatccccaccggcgtcaaagtatttagctgactcgccacactccacggaagcaatatgaaatgatctgctgcagtgctctgagccctaggattcatctttcttttcaccgtaggtggcctgactggcattgtattagcaaactcatcactagacatcgtactacacgacacgtactacgttgtagctcacttccactatgtcctatcaataggagctgtatttgccatcataggaggcttcattcactgatttcccctattctcaggctacaccctagaccaaacctacgccaaaatccatttcactatcatattcatcggcgtaaatctaactttcttcccacaacactttctaggcctatccggaatgccccgacgttactcggactaccccgatgcatacaccacatgaaacatcctatcatctgtaggctcattcatttctctaacagcagtaatattaataattttcatgatttgagaagccttcgcttcgaagcgaaaagtcctaatagtagaagaaccctccataaacctggagtgactatatggatgccccccaccctaccacacattcgaagaacccgtatacataaaatctagacaaaaaaggaaggaatcgaaccccccaaagctggtttcaagccaaccccatggcctccatgactttttcaaaaaggtattagaaaaaccatttcataactttgtcaaagttaaattataggctaaatcctatatatcttaatggcacatgcagcgcaagtaggtctacaagacgctacttcccctatcatagaagagcttatcacctttcatgatcacgccctcataatcattttccttatctgcttcctagtcctgtatgcccttttcctaacactcacaacaaaactaactaatactaacatctcagacgctcaggaaatagaaaccgtctgaactatcctgcccgccatcatcctagtcctcatcgccctcccatccctacgcatcctttacataacagacgaggtcaacgatccctcccttaccatcaaatcaattggccaccaatggtactgaacctacgagtacaccgactacggcggactaatcttcaactcctacatacttcccccattattcctagaaccaggcgacctgcgactccttgacgttgacaatcgagtagtactcccgattgaagcccccattcgtataataattacatcacaagacgtcttgcactcatgagctgtccccacattaggcttaaaaacagatgcaattcccggacgtctaaaccaaaccactttcaccgctacacgaccgggggtatactacggtcaatgctctgaaatctgtggagcaaaccacagtttcatgcccatcgtcctagaattaattcccctaaaaatctttgaaatagggcccgtatttaccctatagcaccccctctaccccctctagagcccactgtaaagctaacttagcattaaccttttaagttaaagattaagagaaccaacacctctttacagtgaaatgccccaactaaatactaccgtatggcccaccataattacccccatactccttacactattcctcatcacccaactaaaaatattaaacacaaactaccacctacctccctcaccaaagcccataaaaataaaaaattataacaaaccctgagaaccaaaatgaacgaaaatctgttcgcttcattcattgcccccacaatcctaggcctacccgccacagtactgatcattctatttccccctctattgatccccacctccaaatatctcatcaacaaccgactaatcaccacccaacaatgactaatcaaactaacctcaaaacaaatgatagccatacacaacactaaaggacgaacctgatctcttatactagtatccttaatcatttttattgccacaactaacctcctcggactcctgcctcactcatttacaccaaccacccaactatctataaacctagccatggccatccccttatgagcgggcgcagtgattataggctttcgctctaagattaaaaatgccctagcccacttcttaccacaaggcacacctacaccccttatccccatactagttattatcgaaaccatcagcctactcattcaaccaatagccctggccgtacgcctaaccgctaacattactgcaggccacctactcatgcacctaattggaagcgccaccctagcaatatcaaccattaaccttccctctacacttatcatcttcacaattctaattctactgactatcctagaaatcgctgtcgccttaatccaagcctacgttttcacacttctagtaagcctctacctgcacgacaacacataatgacccaccaatcacatgcctatcatatagtaaaacccagcccatgacccctaacaggggccctctcagccctcctaatgacctccggcctagccatgtgatttcacttccactccataacgctcctcatactaggcctactaaccaacacactaaccatataccaatgatggcgcgatgtaacacgagaaagcacataccaaggccaccacacaccacctgtccaaaaaggccttcgatacgggataatcctatttattacctcagaagtttttttcttcgcaggatttttctgagccttttaccactccagcctagcccctaccccccaactaggggggcactggcccccaacaggcatcaccccgctaaatcccctagaagtcccactcctaaacacatccgtattactcgcatcaggagtatcaatcacctgagctcaccatagtctaatagaaaacaaccgaaaccaaataattcaagcactgcttattacaattttactgggtctctattttaccctcctacaagcctcagagtacttcgagtctcccttcaccatttccgacggcatctacggctcaacattttttgtagccacaggcttccacggacttcacgtcattattggctcaactttcctcactatctgcttcatccgccaactaatatttcactttacatccaaacatcactttggcttcgaagccgccgcctgatactggcattttgtagatgtggtttgactatttctgtatgtctccatctattgatgagggtcttactcttttagtataaatagtaccgttaacttccaattaactagttttgacaacattcaaaaaagagtaataaacttcgccttaattttaataatcaacaccctcctagccttactactaataattattacattttgactaccacaactcaacggctacatagaaaaatccaccccttacgagtgcggcttcgaccctatatcccccgcccgcgtccctttctccataaaattcttcttagtagctattaccttcttattatttgatctagaaattgccctccttttacccctaccatgagccctacaaacaactaacctgccactaatagttatgtcatccctcttattaatcatcatcctagccctaagtctggcctatgagtgactacaaaaaggattagactgagctgaattggtatatagtttaaacaaaacgaatgatttcgactcattaaattatgataatcatatttaccaaatgcccctcatttacataaatattatactagcatttaccatctcacttctaggaatactagtatatcgctcacacctcatatcctccctactatgcctagaaggaataatactatcgctgttcattatagctactctcataaccctcaacacccactccctcttagccaatattgtgcctattgccatactagtctttgccgcctgcgaagcagcggtgggcctagccctactagtctcaatctccaacacatatggcctagactacgtacataacctaaacctactccaatgctaaaactaatcgtcccaacaattatattactaccactgacatgactttccaaaaaacacataatttgaatcaacacaaccacccacagcttaattattagcatcatccccctactattttttaaccaaatcaacaacaacctatttagctgttccccaaccttttcctccgaccccctaacaacccccctcctaatactaactacctgactcctacccctcacaatcatggcaagccaacgccacttatccagtgaaccactatcacgaaaaaaactctacctctctatactaatctccctacaaatctccttaattataacattcacagccacagaactaatcatattttatatcttcttcgaaaccacacttatccccaccttggctatcatcacccgatgaggcaaccagccagaacgcctgaacgcaggcacatacttcctattctacaccctagtaggctcccttcccctactcatcgcactaatttacactcacaacaccctaggctcactaaacattctactactcactctcactgcccaagaactatcaaactcctgagccaacaacttaatatgactagcttacacaatagcttttatagtaaagatacctctttacggactccacttatgactccctaaagcccatgtcgaagcccccatcgctgggtcaatagtacttgccgcagtactcttaaaactaggcggctatggtataatacgcctcacactcattctcaaccccctgacaaaacacatagcctaccccttccttgtactatccctatgaggcataattataacaagctccatctgcctacgacaaacagacctaaaatcgctcattgcatactcttcaatcagccacatagccctcgtagtaacagccattctcatccaaaccccctgaagcttcaccggcgcagtcattctcataatcgcccacggacttacatcctcattactattctgcctagcaaactcaaactacgaacgcactcacagtcgcatcataatcctctctcaaggacttcaaactctactcccactaatagctttttgatgacttctagcaagcctcgctaacctcgccttaccccccactattaacctactgggagaactctctgtgctagtaaccacattctcctgatcaaatatcactctcctacttacaggactcaacatactagtcacagccctatactccctctacatatttaccacaacacaatggggctcactcacccaccacattaacaacataaaaccctcattcacacgagaaaacaccctcatgttcatacacctatcccccattttcctcctatccctcaaccccgacatcattaccgggttttcctcttgtaaatatagtttaaccaaaacatcagattgtgaatctgacaacagaggcttacgaccccttatttaccgagaaagctcacaagaactgctaactcatgcccccatgtctaacaacatggctttctcaacttttaaaggataacagctatccattggtcttaggccccaaaaattttggtgcaactccaaataaaagtaataaccatgcacactactataaccaccctaaccctgacttccctaattccccccatccttaccaccctcgttaaccccaacaaaaaaaactcatacccccattatgtaaaatccattgtcgcatccacctttattatcagtctcttccccacaacaatattcatgtgcctagaccaagaagttattatctcgaactgacactgagccacaacccaaacaacccagctctccctaagcttcaaactagactacttctccataatattcatccctgtagcattgttcgttacatggtccatcatagaattctcactgtgatatataaactcagacccaaacattaatcagttcttcaaatatctactcattttcctaattaccatactaatcttagttaccgctaacaacctattccaactgttcatcggctgagagggcgtaggaattatatccttcttgctcatcagttgatgatacgcccgagcagatgccaacacagcagccattcaagcaatcctatacaaccgtatcggcgatatcggtttcatcctcgccttagcatgatttatcctacactccaactcatgagacccacaacaaatagcccttctaaacgctaatccaagcctcaccccactactaggcctcctcctagcagcagcaggcaaatcagcccaattaggtctccacccctgactcccctcagccatagaaggccccaccccagtctcagccctactccactcaagcactatagttgtagcaggaatcttcttactcatccgcttccaccccctagcagaaaatagcccactaatccaaactctaacactatgcttaggcgctatcaccactctgttcgcagcagtctgcgcccttacacaaaatgacatcaaaaaaatcgtagccttctccacttcaagtcagctaggactcataatagttacaatcggcatcaaccaaccacacctagcattcctgcacatctgtacccacgccttcttcaaagccatactatttatgtgctccgggtccatcatccacaaccttaacaatgaacaagatattcgaaaaataggaggactactcaaaaccatacctctcacttcaacctccctcaccattggcagcctagcattagcaggaatacctttcctcacaggtttctactccaaagaccacatcatcgaaaccgcaaacatatcatacacaaacgcctgagccctatctattactctcatcgctacctccctgacaagcgcctatagcactcgaataattcttctcaccctaacaggtcaacctcgcttccccacccttactaacattaacgaaaataaccccaccctactaaaccccattaaacgcctggcagccggaagcctattcgcaggatttctcattactaacaacatttcccccgcatcccccttccaaacaacaatccccctctacctaaaactcacagccctcgctgtcactttcctaggacttctaacagccctagacctcaactacctaaccaacaaacttaaaataaaatccccactatgcacattttatttctccaacatactcggattctaccctagcatcacacaccgcacaatcccctatctaggccttcttacgagccaaaacctgcccctactcctcctagacctaacctgactagaaaagctattacctaaaacaatttcacagcaccaaatctccacctccatcatcacctcaacccaaaaaggcataattaaactttacttcctctctttcttcttcccactcatcctaaccctactcctaatcacataacctattcccccgagcaatctcaattacaatatatacaccaacaaacaatgttcaaccagtaactactactaatcaacgcccataatcatacaaagcccccgcaccaataggatcctcccgaatcaaccctgacccctctccttcataaattattcagcttcctacactactaaagtttaccacaaccaccaccccatcatactctttcacccacagcaccaatcctacctccatcgctaaccccactaaaacactcaccaagacctcaacccctgacccccatgcctcaggatactcctcaatagccatcgctgtagtatatccaaagacaaccatcattccccctaaataaattaaaaaaactattaaacccatataacctcccccaaaattcagaataataacacacccgaccacaccgctaacaatcaatactaaacccccataaataggagaaggcttagaagaaaaccccacaaaccccattactaaacccacactcaacagaaacaaagcatacatcattattctcgcacggactacaaccacgaccaatgatatgaaaaaccatcgttgtatttcaactacaagaacaccaatgaccccaatacgcaaaattaaccccctaataaaactaattaaccactcattcatcgacctccccaccccatccaacatctccgcatgatgaaacttcggctcactccttggcgcctgcctgatcctccaaatcaccacaggactattcctagccatgcactactcaccagacgcctcaaccgccttttcatcaatcgcccacatcactcgagacgtaaattatggctgaatcatccgctaccttcacgccaatggcgcctcaatattctttatctgcctcttcctacacatcggacgaggcctatattacggatcatttctctactcagaaacctgaaacatcggcattatcctcctgcttgcaactatagcaacagccttcataggctatgtcctcccgtgaggccaaatatcattctgaggggccacagtaattacaaacttactatccgccatcccatacattgggacagacctagttcaatgaatctgaggaggctactcagtagacagtcccaccctcacacgattctttacctttcacttcatcttacccttcattattgcagccctagcagcactccacctcctattcttgcacgaaacgggatcaaacaaccccctaggaatcacctcccattccgataaaatcaccttccacccttactacacaatcaaagacgccctcggcttacttctcttccttctctccttaatgacattaacactattctcacctgacctcctaggcgacccagacaattataccctagccaaccccttaaacacccctccccacatcaagcccgaatgatatttcctattcgcctacacaattctccgatccgtccctaacaaactaggaggcgtccttgccctattactatccatcctcatcctagcaataatccccatcctccacatatccaaacaacaaagcataatatttcgcccactaagccaatcactttattgactcctagccgcagacctcctcattctaacctgaatcggaggacaaccagtaagctacccttttaccatcattggacaagtagcatccgtactatacttcacaacaatcctaatcctaataccaactatctccctaattgaaaacaaaatactcaaatgggcctgtccttgtagtataaactaatacaccagtcttgtaaaccggaaatgaaaacctttttccaaggacaaatcagagaaaaagtctttaactccaccattagcacccaaagctaagattctaatttaaactattctctgttctttcatggggaagcagatttgggtaccacccaagtattgactcacccatcaacaaccgctatgtatttcgtacattactgccagccaccatgaatattgtacggtaccataaatacttgaccacctatagtacataaaaacccaatccacatcaaaaccccctccccatgcttacaagcaagtacagcaatcaaccttcaactatcacacatcaactgcaactccaaagccacccctcacccactaggataccaacaaacctacccaccctcaacagtacatagtacataaagccattcatcgtacatagcacattacagtcaaatcccttctcgtccccatggatgacccccctcagataggggtcccttgaccaccatcctccgtgaaatcaatatcccgcacaagagtgctactctcctcgctccgggcccataacacttgggggtagctaaagtgaactgtatccgacatctggttcctacttcagggtcataaagcctaaatagcccacacgttccccttaaataagacatcacgatg

SEQ ID NO: 179 - DNA, 16563 bp, Homo sapiens mitochondrial
  3110: "n" refers to a nucleotide at position 3107 of the Cambridge Reference Sequence (CRS, Anderson et al. 1981 Nature 290:457-465), later determined to be absent from the human mtDNA sequence according to the revised CRS (rCRS, Andrews et al. 1999 Nature Genetics 23:147); "n" therefore represents a single nucleotide deletion at a position corresponding to nucleotide 3107 of SEQ ID NO:1 as provided herein.
gatcacaggtctatcaccctattaaccactcacgggagctctccatgcatttggtattttcgtctggggggtgtgcacgcgatagcattgcgagacgctggagccggagcaccctatgtcgcagtatctgtctttgattcctgccccattccattatttatcgcacctacgttcaatattacaggcgaacatacctactaaagtgtgttaattaattaatgcttgtaggacataataataacaattgaatgtctgcacagccgctttccacacagacatcataacaaaaaatttccaccaaaccccccctccccccccggttttggccacagcacttaaacacatctctgccaaaccccaaaaacaaagaaccctaacaccagcctaaccagatttcaaattttatcttttggcggtatgcacttttaacagtcaccccccaactaacacattattttcccctcccactcccatactactaatctcatcaatacaacccccggccatcctacccagcacacacacaccgctgctaaccccataccccgaaccaaccaaaccccaaagacaccccccacagtttatgtagcttacctcctcaaagcaatacactgaaaatgtttagacgggctcacatcaccccataaacaaataggtttggtcctagcctttctattagctcttagtaagattacacatgcaagcatccccattccagtgagttcaccctctaaatcaccacgatcaaaagggacaagcatcaagcacgcagcaatgcagctcaaaacgcttagcctagccacacccccacgggaaacagcagtgattaacctttagcaataaacgaaagtttaactaagctatactaaccccagggttggtcaatttcgtgccagccaccgcggtcacacgattaacccaagtcaatagaagccggcgtaaagagtgttttagatcaccccctccccaataaagctaaaactcacctgagttgtaaaaaactccagttgacacaaaatagactacgaaagtggctttaacatatctgaacacacaatagctaagacccaaactgggattagataccccactatgcttagccctaaacctcaacagttaaaccaacaaaactgctcgccagaacactacgagccacagcttaaaactcaaaggacctggcggtgcttcatatccctctagaggagcctgttctgtaatcgataaaccccgatcaacctcaccacctcttgctcagcctatataccgccatcttcagcaaaccctgatgaaggctacaaagtaagcgcaagtacccacgtaaagacgttaggtcaaggtgtagcccatgaggtggcaagaaatgggctacattttctaccccagaaaactacgatagcccttatgaaacttaagggtcgaaggtggatttagcagtaaactgagagtagagtgcttagttgaacagggccctgaagcgcgtacacaccgcccgtcaccctcctcaagtatacttcaaaggacatttaactaaaacccctacgcatttatatagaggagacaagtcgtaacatggtaagtgtactggaaagtgcacttggacgaaccagagtgtagcttaacacaaagcacccaacttacacttaggagatttcaacttaacttgaccgctctgagctaaacctagccccaaacccactccaccttactaccagacaaccttagccaaaccatttacccaaataaagtataggcgatagaaattgaaacctggcgcaatagatatagtaccgcaagggaaagatgaaaaattataaccaagcataatatagcaaggactaacccctataccttctgcataatgaattaactagaaataactttgcaaggagagccaaagctaagacccccgaaaccagacgagctacctaagaacagctaaaagagcacacccgtctatgtagcaaaatagtgggaagatttataggtagaggcgacaaacctaccgagcctggtgatagctggttgtccaagatagaatcttagttcaactttaaatttgcccacagaaccctctaaatccccttgtaaatttaactgttagtccaaagaggaacagctctttggacactaggaaaaaaccttgtagagagagtaaaaaatttaacacccatagtaggcctaaaagcagccaccaattaagaaagcgttcaagctcaacacccactacctaaaaaatcccaaacatataactgaactcctcacacccaattggaccaatctatcaccctatagaagaactaatgttagtataagtaacatgaaaacattctcctccgcataagcctgcgtcagattaaaacactgaactgacaattaacagcccaatatctacaatcaaccaacaagtcattattaccctcactgtcaacccaacacaggcatgctcataaggaaaggttaaaaaaagtaaaaggaactcggcaaatcttaccccgcctgtttaccaaaaacatcacctctagcatcaccagtattagaggcaccgcctgcccagtgacacatgtttaacggccgcggtaccctaaccgtgcaaaggtagcataatcacttgttccttaaatagggacctgtatgaatggctccacgagggttcagctgtctcttacttttaaccagtgaaattgacctgcccgtgaagaggcgggcatgacacagcaagacgagaagaccctatggagctttaatttattaatgcaaacagtacctaacaaacccacaggtcctaaactaccaaacctgcattaaaaatttcggttggggcgacctcggagcagaacccaacctccgagcagtacatgctaagacttcaccagtcaaagcgaactactatactcaattgatccaataacttgaccaacggaacaagttaccctagggataacagcgcaatcctattctagagtccatatcaacaatagggtttacgacctcgatgttggatcaggacatcccgatggtgcagccgctattaaaggttcgtttgttcaacgattaaagtcctacgtgatctgagttcagaccggagtaatccaggtcggtttctatctacnttcaaattcctccctgtacgaaaggacaagagaaataaggcctacttcacaaagcgccttcccccgtaaatgatatcatctcaacttagtattatacccacacccacccaagaacagggtttgttaagatggcagagcccggtaatcgcataaaacttaaaactttacagtcagaggttcaattcctcttcttaacaacatacccatggccaacctcctactcctcattgtacccattctaatcgcaatggcattcctaatgcttaccgaacgaaaaattctaggctatatacaactacgcaaaggccccaacgttgtaggcccctacgggctactacaacccttcgctgacgccataaaactcttcaccaaagagcccctaaaacccgtcacatctaccatcaccctctacatcaccgccccgaccttagctctcaccatcgctcttctactatgaacccccttccccatacccaaccccctggtcaacctcaacctaggcctcctatttattctagccacctctagcctagccgtttactcaatcctctgatcagggtgagcatcaaactcaaactacgccctgatcggcgcactgcgagcagtagcccaaacaatctcatatgaagtcaccctagccatcattctactatcaacattactaataagtggctcctttaacctctccacccttatcacaacacaagaacacctctgattactcctgccatcatgacccttggccataatatgatttatctccacactagcagagaccaaccgaacccccttcgaccttgccgaaggggagtccgaactagtctcaggcttcaacatcgaatacgccgcaggccccttcgccctattcttcatagccgaatacacaaacattattataataaacaccctcaccactacaatcttcctaggaacaacatatgacgcactctcccctgaactctacacaacatattttgtcaccaagaccctacttctaacctccctgttcttatgaattcgaacagcatacccccgattccgctacgaccaactcatacacctcctatgaaaaaacttcctaccactcaccctagcattacttatatgatatgtctccatacccattacaatctccagcattccccctcaaacctaagaaatatgtctgataaaagagttactttgatagagtaaataataggagcttaaacccccttatttctaggactatgagaatcgaacccatccctgagaatccaaaattctccgtgccacctatcacaccccatcctaaagtaaggtcagctaaataagctatcgggcccataccccgaaaatgttggttatacccttcccgtactaattaatcccctggcccaacccgtcatctactctaccatctttgcaggcacactcatcacagcgctaagctcgcactgattttttacctgagtaggcctagaaataaacatgctagcttttattccagttctaaccaaaaaaataaaccctcgttccacagaagctgccatcaagtatttcctcacgcaagcaaccgcatccataatccttctaatagctatcctcttcaacaatatactctccggacaatgaaccataaccaatactaccaatcaatactcatcattaataatcataatggctatagcaataaaactaggaatagccccctttcacttctgagtcccagaggttacccaaggcacccctctgacatccggcctgcttcttctcacatgacaaaaactagcccccatctcaatcatataccaaatctctccctcactaaacgtaagccttctcctcactctctcaatcttatccatcatagcaggcagttgaggtggattaaaccaaacccagctacgcaaaatcttagcatactcctcaattacccacataggatgaataatagcagttctaccgtacaaccctaacataaccattcttaatttaactatttatattatcctaactactaccgcattcctactactcaacttaaactccagcaccacgaccctactactatctcgcacctgaaacaagctaacatgactaacacccttaattccatccaccctcctctccctaggaggcctgcccccgctaaccggctttttgcccaaatgggccattatcgaagaattcacaaaaaacaatagcctcatcatccccaccatcatagccaccatcaccctccttaacctctacttctacctacgcctaatctactccacctcaatcacactactccccatatctaacaacgtaaaaataaaatgacagtttgaacatacaaaacccaccccattcctccccacactcatcgcccttaccacgctactcctacctatctccccttttatactaataatcttatagaaatttaggttaaatacagaccaagagccttcaaagccctcagtaagttgcaatacttaatttctgtaacagctaaggactgcaaaaccccactctgcatcaactgaacgcaaatcagccactttaattaagctaagcccttactagaccaatgggacttaaacccacaaacacttagttaacagctaagcaccctaatcaactggcttcaatctacttctcccgccgccgggaaaaaaggcgggagaagccccggcaggtttgaagctgcttcttcgaatttgcaattcaatatgaaaatcacctcggagctggtaaaaagaggcctaacccctgtctttagatttacagtccaatgcttcactcagccattttacctcacccccactgatgttcgccgaccgttgactattctctacaaaccacaaagacattggaacactatacctattattcggcgcatgagctggagtcctaggcacagctctaagcctccttattcgagccgagctgggccagccaggcaaccttctaggtaacgaccacatctacaacgttatcgtcacagcccatgcatttgtaataatcttcttcatagtaatacccatcataatcggaggctttggcaactgactagttcccctaataatcggtgcccccgatatggcgtttccccgcataaacaacataagcttctgactcttacctccctctctcctactcctgctcgcatctgctatagtggaggccggagcaggaacaggttgaacagtctaccctcccttagcagggaactactcccaccctggagcctccgtagacctaaccatcttctccttacacctagcaggtgtctcctctatcttaggggccatcaatttcatcacaacaattatcaatataaaaccccctgccataacccaataccaaacgcccctcttcgtctgatccgtcctaatcacagcagtcctacttctcctatctctcccagtcctagctgctggcatcactatactactaacagaccgcaacctcaacaccaccttcttcgaccccgccggaggaggagaccccattctataccaacacctattctgatttttcggtcaccctgaagtttatattcttatcctaccaggcttcggaataatctcccatattgtaacttactactccggaaaaaaagaaccatttggatacataggtatggtctgagctatgatatcaattggcttcctagggtttatcgtgtgagcacaccatatatttacagtaggaatagacgtagacacacgagcatatttcacctccgctaccataatcatcgctatccccaccggcgtcaaagtatttagctgactcgccacactccacggaagcaatatgaaatgatctgctgcagtgctctgagccctaggattcatctttcttttcaccgtaggtggcctgactggcattgtattagcaaactcatcactagacatcgtactacacgacacgtactacgttgtagctcacttccactatgtcctatcaataggagctgtatttgccatcataggaggcttcattcactgatttcccctattctcaggctacaccctagaccaaacctacgccaaaatccatttcactatcatattcatcggcgtaaatctaactttcttcccacaacactttctcggcctatccggaatgccccgacgttactcggactaccccgatgcatacaccacatgaaacatcctatcatctgtaggctcattcatttctctaacagcagtaatattaataattttcatgatttgagaagccttcgcttcgaagcgaaaagtcctaatagtagaagaaccctccataaacctggagtgactatatggatgccccccaccctaccacacattcgaagaacccgtatacataaaatctagacaaaaaaggaaggaatcgaaccccccaaagctggtttcaagccaaccccatggcctccatgactttttcaaaaaggtattagaaaaaccatttcataactttgtcaaagttaaattataggctaaatcctatatatcttaatggcacatgcagcgcaagtaggtctacaagacgctacttcccctatcatagaagagcttatcacctttcatgatcacgccctcataatcattttccttatctgcttcctagtcctgtatgcccttttcctaacactcacaacaaaactaactaatactaacatctcagacgctcaggaaatagaaaccgtctgaactatcctgcccgccatcatcctagtcctcatcgccctcccatccctacgcatcctttacataacagacgaggtcaacgatccctcccttaccatcaaatcaattggccaccaatggtactgaacctacgagtacaccgactacggcggactaatcttcaactcctacatacttcccccattattcctagaaccaggcgacctgcgactccttgacgttgacaatcgagtagtactcccgattgaagcccccattcgtataataattacatcacaagacgtcttgcactcatgagctgtccccacattaggcttaaaaacagatgcaattcccggacgtctaaaccaaaccactttcaccgctacacgaccgggggtatactacggtcaatgctctgaaatctgtggagcaaaccacagtttcatgcccatcgtcctagaattaattcccctaaaaatctttgaaatagggcccgtatttaccctatagcaccccctctagagcccactgtaaagctaacttagcattaaccttttaagttaaagattaagagaaccaacacctctttacagtgaaatgccccaactaaatactaccgtatggcccaccataattacccccatactccttacactattcctcatcacccaactaaaaatattaaacacaaactaccacctacctccctcaccaaagcccataaaaataaaaaattataacaaaccctgagaaccaaaatgaacgaaaatctgttcgcttcattcattgcccccacaatcctaggcctacccgccgcagtactgatcattctatttccccctctattgatccccacctccaaatatctcatcaacaaccgactaatcaccacccaacaatgactaatcaaactaacctcaaaacaaatgataaccatacacaacactaaaggacgaacctgatctcttatactagtatccttaatcatttttattgccacaaccaacctcctcggactcctgcctcactcatttacaccaaccacccaactatctataaacctagccatggccatccccttatgagcgggcgcagtgattataggctttcgctctaagattaaaaatgccctagcccacttcttaccacaaggcacacctacaccccttatccccatactagttattatcgaaaccatcagcctactcattcaaccaatagccctggccgtacgcctaaccgctaacattactgcaggccacctactcatgcacctaattggaagcgccaccctagcaatatcaaccattaaccttccctctacacttatcatcttcacaattctaattctactgactatcctagaaatcgctgtcgccttaatccaagcctacgttttcacacttctagtaagcctctacctgcacgacaacacataatgacccaccaatcacatgcctatcatatagtaaaacccagcccatgacccctaacaggggccctctcagccctcctaatgacctccggcctagccatgtgatttcacttccactccataacgctcctcatactaggcctactaaccaacacactaaccatataccaatgatggcgcgatgtaacacgagaaagcacataccaaggccaccacacaccacctgtccaaaaaggccttcgatacgggataatcctatttattacctcagaagtttttttcttcgcaggatttttctgagccttttaccactccagcctagcccctaccccccaattaggagggcactggcccccaacaggcatcaccccgctaaatcccctagaagtcccactcctaaacacatccgtattactcgcatcaggagtatcaatcacctgagctcaccatagtctaatagaaaacaaccgaaaccaaataattcaagcactgcttattacaattttactgggtctctattttaccctcctacaagcctcagagtacttcgagtctcccttcaccatttccgacggcatctacggctcaacattttttgtagccacaggcttccacggacttcacgtcattattggctcaactttcctcactatctgcttcatccgccaactaatatttcactttacatccaaacatcactttggcttcgaagccgccgcctgatactggcattttgtagatgtggtttgactatttctatatgtctccatctattgatgagggtcttactcttttagtataaatagtaccgttaacttccaattaactagttttgacaacattcaaaaaagagtaataaacttcgccttaattttaataatcaacaccctcctagccttactactaataattattacattttgactaccacaactcaacggctacatagaaaaatccaccccttacgagtgcggcttcgaccctatatcccccgcccgcgtccctttctccataaaattcttcttagtagctattaccttcttattatttgatctagaaattgccctccttttacccctaccatgagccctacaaacaactaacctgccactaatagttatgtcatccctcttattaatcatcatcctagccctaagtctggcctatgagtgactacaaaaaggattagactgaaccgaattggtatatagtttaaacaaaacgaatgatttcgactcattaaattatgataatcatatttaccaaatgcccctcatttacataaatattatactagcatttaccatctcacttctaggaatactagtatatcgctcacacctcatatcctccctactatgcctagaaggaataatactatcgctgttcattatagctactctcataaccctcaacacccactccctcttagccaatattgtgcctattgccatactagtctttgccgcctgcgaagcagcggtgggcctagccctactagtctcaatctccaacacatatggcctagactacgtacataacctaaacctactccaatgctaaaactaatcgtcccaacaattatattactaccactgacatgactttccaaaaaacacataatttgaatcaacacaaccacccacagcctaattattagcatcatccctctactattttttaaccaaatcaacaacaacctatttagctgttccccaaccttttcctccgaccccctaacaacccccctcctaatactaactacctgactcctacccctcacaatcatggcaagccaacgccacttatccagtgaaccactatcacgaaaaaaactctacctctctatactaatctccctacaaatctccttaattataacattcacagccacagaactaatcatattttatatcttcttcgaaaccacacttatccccaccttggctatcatcacccgatgaggcaaccagccagaacgcctgaacgcaggcacatacttcctattctacaccctagtaggctcccttcccctactcatcgcactaatttacactcacaacaccctaggctcactaaacattctactactcactctcactgcccaagaactatcaaactcctgagccaacaacttaatatgactagcttacacaatagcttttatagtaaagatacctctttacggactccacttatgactccctaaagcccatgtcgaagcccccatcgctgggtcaatagtacttgccgcagtactcttaaaactaggcggctatggtataatacgcctcacactcattctcaaccccctgacaaaacacatagcctaccccttccttgtactatccctatgaggcataattataacaagctccatctgcctacgacaaacagacctaaaatcgctcattgcatactcttcaatcagccacatagccctcgtagtaacagccattctcatccaaaccccctgaagcttcaccggcgcagtcattctcataatcgcccacggacttacatcctcattactattctgcctagcaaactcaaactacgaacgcactcacagtcgcatcataatcctctctcaaggacttcaaactctactcccactaatagctttttgatgacttctagcaagcctcgctaacctcgccttaccccccactattaacctactgggagaactctctgtgctagtaaccacgttctcctgatcaaatatcactctcctacttacaggactcaacatactagtcacagccctatactccctctacatatttaccacaacacaatggggctcactcacccaccacattaacaacataaaaccctcattcacacgagaaaacaccctcatgttcatacacctatcccccattctcctcctatccctcaaccccgacatcattaccgggttttcctcttgtaaatatagtttaaccaaaacatcagattgtgaatctgacaacagaggcttacgaccccttatttaccgagaaagctcacaagaactgctaactcatgcccccatgtctaacaacatggctttctcaacttttaaaggataacagctatccattggtcttaggccccaaaaattttggtgcaactccaaataaaagtaataaccatgcacactactataaccaccctaaccctgacttccctaattccccccatccttaccaccctcgttaaccctaacaaaaaaaactcatacccccattatgtaaaatccattgtcgcatccacctttattatcagtctcttccccacaacaatattcatgtgcctagaccaagaagttattatctcgaactgacactgagccacaacccaaacaacccagctctccctaagcttcaaactagactacttctccataatattcatccctgtagcattgttcgttacatggtccatcatagaattctcactgtgatatataaactcagacccaaacattaatcagttcttcaaatatctactcatcttcctaattaccatactaatcttagttaccgctaacaacctattccaactgttcatcggctgagagggcgtaggaattatatccttcttgctcatcagttgatgatacgcccgagcagatgccaacacagcagccattcaagcaatcctatacaaccgtatcggcgatatcggtttcatcctcgccttagcatgatttatcctacactccaactcatgagacccacaacaaatagcccttctaaacgctaatccaagcctcaccccactactaggcctcctcctagcagcagcaggcaaatcagcccaattaggtctccacccctgactcccctcagccatagaaggccccaccccagtctcagccctactccactcaagcactatagttgtagcaggaatcttcttactcatccgcttccaccccctagcagaaaatagcccactaatccaaactctaacactatgcttaggcgctatcaccactctgttcgcagcagtctgcgcccttacacaaaatgacatcaaaaaaatcgtagccttctccacttcaagtcaactaggactcataatagttacaatcggcatcaaccaaccacacctagcattcctgcacatctgtacccacgccttcttcaaagccatactatttatgtgctccgggtccatcatccacaaccttaacaatgaacaagatattcgaaaaataggaggactactcaaaaccatacctctcacttcaacctccctcaccattggcagcctagcattagcaggaatacctttcctcacaggtttctactccaaagaccacatcatcgaaaccgcaaacatatcatacacaaacgcctgagccctatctattactctcatcgctacctccctgacaagcgcctatagcactcgaataattcttctcaccctaacaggtcaacctcgcttccccacccttactaacattaacgaaaataaccccaccctactaaaccccattaaacgcctggcagccggaagcctattcgcaggatttctcattactaacaacatttcccccgcatcccccttccaaacaacaatccccctctacctaaaactcacagccctcgctgtcactttcctagggcttctaacagccctagacctcaactacctaaccaacaaacttaaaataaaatccccactatgcacattttatttctccaacatactcggattctaccctagcatcacacaccgcacaatcccctatctaggccttcttacgagccaaaacctgcccctactcctcctagacctaacctgactagaaaagctattacctaaaacaatttcacagcaccaaatctccacctccatcatcacctcaacccaaaaaggcataattaaactttacttcctctctttcttcttcccactcatcctaaccctactcctaatcacataacctattcccccgagcaatctcaattacaatatatacaccaacaaacaatgttcaaccagtaactactactaatcaacgcccataatcatacaaagcccccgcaccaataggatcctcccgaatcaaccctgacccctctccttcataaattattcagcttcctacactattaaagtttaccacaaccaccaccccatcatactctttcacccacagcaccaatcctacctccatcgctaaccccactaaaacactcaccaagacctcaacccctgacccccatgcctcaggatactcctcaatagccatcgctgtagtatatccaaagacaaccatcattccccctaaataaattaaaaaaactattaaacccatataacctcccccaaaattcagaataataacacacccgaccacaccgctaacaatcaatactaaacccccataaataggagaaggcttagaagaaaaccccacaaaccccattactaaacccacactcaacagaaacaaagcatacatcattattctcgcacggactacaaccacgaccaatgatatgaaaaaccatcgttgtatttcaactacaagaacaccaatgaccccaatacgcaaaattaaccccctaataaaattaattaaccactcattcatcgacctccccaccccatccaacatctccgcatgatgaaacttcggctcactccttggcgcctgcctgatcctccaaatcaccacaggactattcctagccatgcactactcaccagacgcctcaaccgccttttcatcaatcgcccacatcactcgagacgtaaattatggctgaatcatccgctaccttcacgccaatggcgcctcaatattctttatctgcctcttcctacacatcgggcgaggcctatattacggatcatttctctactcagaaacctgaaacatcggcattatcctcctgcttgcaactatagcaacagccttcataggctatgtcctcccgtgaggccaaatatcattctgaggggccacagtaattacaaacttactatccgccatcccatacattgggacagacctagttcaatgaatctgaggaggctactcagtagacagtcccaccctcacacgattctttacctttcacttcatcttacccttcattattgcagccctagcagcactccacctcctattcttacacgaaacgggatcaaacaaccccctaggaatcacctcccattccgataaaatcaccttccacccttactacacaatcaaagacgccctcggcttacttctcttccttctctccttaatgacattaacactattctcaccagacctcctaggcgacccagacaattataccctagccaaccccttaaacacccctccccacatcaagcccgaatgatatttcctattcgcctacacaattctccgatccgtccctaacaaactaggaggcgtccttgccctattactatccatcctcatcctagcaataatccccatcctccatatatccaaacaacaaagcataatatttcgcccactaagccaatcactttattgactcctagccgcagacctcctcattctaacctgaatcggaggacaaccagtaagctacccttttaccatcattggacaagtagcatccgtactatacttcacaacaatcctaatcctaataccaactatctccctaattgaaaacaaaatactcaaatgggcctgtccttgtagtataaactaatacaccagtcttgtaaaccggagatgaaaacctttttccaaggacaaatcagagaaaaagtctttaactccaccattagcacccaaagctaagattctaatttaaactattctctgttctttcatggggaagcagatttgggtaccacccaagtattgactcacccatcaacaaccgctatgtatttcgtacattactgccagccaccatgaatattgtacggtaccataaacacttgaccacctgtagtacataaaaacccaatccacatcaaccccccccccccatgcttacaagcaagtacagcaaccaaccctcaactatcacacatcaactgcaactccaaagccacccctcacccactagaataccaacaaacctacccacccttaacagtacatagtacataaagccatttaccgtacatggcacattacagtcaaatcccttctcgtccccatggatgacccccctcagataggggtcccttgaccaccatcctccgtgaaatcaatatcccgcacaagagtgctactctcctcgctccgggcccataacacttgggggtagctaaagtgaactgtatccgacatctggttcctacttcagggccataaagcctaaatagcccacacgttccccttaaataagacatcacgatg

SEQ ID NO: 180 - DNA, 16562 bp, Homo sapiens mitochondrial
  3109: "n" refers to a nucleotide at position 3107 of the Cambridge Reference Sequence (CRS, Anderson et al. 1981 Nature 290:457-465), later determined to be absent from the human mtDNA sequence according to the revised CRS (rCRS, Andrews et al. 1999 Nature Genetics 23:147); "n" therefore represents a single nucleotide deletion at a position corresponding to nucleotide 3107 of SEQ ID NO:1 as provided herein.
gatcacaggtctatcaccctattaaccactcacgggagctctccatgcatttggtattttcgtctggggggtgtgcacgcgatagcattgcgagacgctggagccggagcaccctatgtcgcagtatctgtctttgattcctgcctcatcctattatttatcgcacctacgttcaatattacaggcgaacatacttactaaagtgtgttaattaattaatgcttgtaggacataataataacaattgaatgtctgcacagccgctttccacacagacatcataacaaaaaatttccaccaaaccccccctcccccccgcttttggccacagcacttaaacacatttctgccaaaccccaaaaacaaagaaccctaacaccagcctaaccagatttcaaattttatcttttggcggtatgcacttttaacagtcaccccccaactaacacattattttcccctcccactcccatactactaatctcatcaatacaacccccacccatcctacccagcacacacacaccgctgctaaccccataccccgaaccaaccaaaccccaaagacaccccccacagtttatgtagcttacctcctcaaagcaatacactgaaaatgtttagacgggctcacatcaccccataaacaaataggtttggtcctagcctttctattagctcttagtaagattacacatgcaagcatccccgttccagtgagttcaccctctaaatcaccacgatcaaaagggacaagcatcaagcacgcagcaatgcagctcaaaacgcttagcctagccacacccccacgggaaacagcagtgattagcctttagcaataaacgaaagtttaactaagctatactaaccccagggttggtcaatttcgtgccagccaccgcggtcacacgattaacccaagtcaatagaagccggcgtaaagagtgttttagatcaccccctccccaataaagctaaaactcacctgagttgtaaaaaactccagttgacacaaaatagactacgaaagtggctttaacatatctgaacacacaatagctaagacccaaactgggattagataccccactatgcttagccctaaacctcaacagttaaatcaacaaaactgctcgccagaacactacgagccacagcttaaaactcaaaggacctggcggtgcttcatatccctctagaggagcctgttctgtaatcgataaaccccgatcaacctcaccacctcttgctcagcctatataccgccatcttcagcaaaccctgatgaaggctacaaagtaagcgcaagtacccacgtaaagacgttaggtcaaggtgtagcccatgaggtggcaagaaatgggctacattttctaccccagaaaactacgatagcccttatgaaacttaagggtcgaaggtggatttagcagtaaactgagagtagagtgcttagttgaacagggccctgaagcgcgtacacaccgcccgtcaccctcctcaagtatacttcaaaggacatttaactaaaacccctacgcatttatatagaggagacaagtcgtaacatggtaagtgtactggaaagtgcacttggacgaaccagagtgtagcttaacacaaagcacccaacttacacttaggagatttcaacttaacttgaccgctctgagctaaacctagccccaaacccactccaccttactaccagacaaccttagccaaaccatttacccaaataaagtataggcgatagaaattgaaacctggcgcaatagatatagtaccgcaagggaaagatgaaaaattataaccaagcataatatagcaaggactaacccctataccttctgcataatgaattaactagaaataactttgcaaggagagccaaagctaagacccccgaaaccagacgagctacctaagaacagctaaaagagcacacccgtctatgtagcaaaatagtgggaagatttataggtagaggcgacaaacctaccgagcctggtgatagctggttgtccaagatagaatcttagttcaactttaaatttgcccacagaaccctctaaatccccttgtaaatttaactgttagtccaaagaggaacagctctttggacactaggaaaaaaccttgtagagagagtaaaaaatttaacacccatagtaggcctaaaagcagccaccaattaagaaagcgttcaagctcaacacccactacctaaaaaatcccaaacatataactgaactcctcacacccaattggaccaatctatcaccctatagaagaactaatgttagtataagtaacatgaaaacattctcctccgcataagcctgcgtcagattaaaacactgaactgacaattaacagcccaatatctacaatcaaccaacaagtcattattaccctcactgtcaacccaacacaggcatgctcataaggaaaggttaaaaaaagtaaaaggaactcggcaaatcttaccccgcctgtttaccaaaaacatcacctctagcatcaccagtattagaggcaccgcctgcccagtgacacatgtttaacggccgcggtaccctaaccgtgcaaaggtagcataatcacttgttccttaaatagggacctgtatgaatggctccacgagggttcagctgtctcttacttttaaccagtgaaattgacctgcccgtgaagaggcgggcatgacacagcaagacgagaagaccctatggagctttaatttattaatgcaaacagtacctaacaaacccacaggtcctaaactaccaaacctgcattaaaaatttcggttggggcgacctcggagcagaacccaacctccgagcagtacatgctaagacttcaccagtcaaagcgaactactatactcaattgatccaataacttgaccaacggaacaagttaccctagggataacagcgcaatcctattctagagtccatatcaacaatagggtttacgacctcgatgttggatcaggacatcccgatggtgcagccgctattaaaggttcgtttgttcaacgattaaagtcctacgtgatctgagttcagaccggagtaatccaggtcggtttctatctacnttcaaattcctccctgtacgaaaggacaagagaaataaggcctacttcacaaagcgccttcccccgtaaatgatatcatctcaacttagtattatacccacacccacccaagaacagggtttgttaagatggcagagcccggtaatcgcataaaacttaaaactttacagtcagaggttcaattcctcttcttaacaacatacccatggccaacctcctactcctcattgtacccattctaatcgcaatggcattcctaatgcttaccgaacgaaaaattctaggctatatacaactacgcaaaggccccaacgttgtaggcccctacgggctactacaacccttcgctgacgccataaaactcttcaccaaagagcccctaaaacccgccacatctaccatcaccctctacatcaccgccccgaccttagctctcaccgtcgctcttctactatgaacccccctccccatacccaaccccctggtcaacctcaacctaggcctcctatttattctagccacctctagcctagccgtttactcaatcctctgatcagggtgagcatcaaactcaaactacgccctgatcggcgcactgcgagcagtagcccaaacaatctcatatgaagtcaccctagccatcattctactatcaacattactaataagtggctcctttaacctctccacccttatcacaacacaagaacacctctgattactcctgccatcatgacccttggccataatatgatttatctccacactagcagagaccaaccgaacccccttcgaccttgccgaaggggagtccgaactagtctcaggcttcaacatcgaatacgccgcaggccccttcgccctattcttcatagccgaatacacaaacattattataataaacaccctcaccactacaatcttcctaggaacaacatatgacgcactctcccctgaactctacacaacatattttgtcaccaagaccctacttctaacctccctgttcttatgaattcgaacagcatacccccgattccgctacgaccaactcatacacctcctatgaaaaaacttcctaccactcaccctagcattacttatatgatatgtctccatacccattacaatctccagcattccccctcaaacctaagaaatatgtctgataaaagagttactttgatagagtaaataataggagcttaaacccccttatttctaggactatgagaatcgaacccatccctgagaatccaaaattctccgtgccacctatcacaccccatcctaaagtaaggtcagctaaataagctatcgggcccataccccgaaaatgttggttatacccttcccgtactaattaatcccctggcccaacccgtcatctactctaccatctttgcaggcacactcatcacagcgctaagctcgcactgattttttacctgagtaggcctagaaataaacatgctagcttttattccagttctaaccaaaaaaataaaccctcgttccacagaagctgccatcaagtatttcctcacgcaagcaaccgcatccataatccttctaatagctatcctcttcaacaatatactctccggacaatgaaccataaccaatactaccaatcaatactcatcattaataatcataatggctatagcaataaaactaggaatagccccctttcacttctgagtcccagaagttacccaaggcacccctctgacatccggcctgcttcttctcacatgacaaaaactagcccccatctcaatcatataccaaatctctccctcactaaacgtaagccttctcctcactctctcaatcttatccatcatagcaggcagttgaggtggactaaaccaaacccagctacgcaaaatcttagcatactcctcaattacccacataggatgaataatagcagttctaccgtacaaccctaacataaccattcttaatttaactatttatattatcctaactactaccgcattcctactactcaacttaaactccagcaccacgaccctactactatctcgcacctgaaacaagctaacatgactaacacccttaattccatccaccctcctctccctaggaggcctgcccccgctaaccggctttttgcccaaatgggccattatcgaagaattcacaaaaaacaatagcctcatcatccccaccatcatagccaccatcaccctccttaacctctacttctacctacgcctaatctactccacctcaatcacactactccccatatctaacaacgtaaaaataaaatgacagtttgaacatacaaaacccaccccattcctccccacactcatcgcccttaccacgctactcctacctatctccccttttatactaataatcttatagaaatttaggttaaatacagaccaagagccttcaaagccctcagtaagttgcaatacttaatttctgtaacagctaaggactgcaaaaccccactctgcatcaactgaacgcaaatcagccactttaattaagctaagcccttactagaccaatgggacttaaacccacaaacacttagttaacagctaagcaccctaatcaactggcttcaatctacttctcccgccgccgggaaaaaaggcgggagaagccccggcaggtttgaagctgcttcttcgaatttgcaattcaatatgaaaatcacctcggagctggtaaaaagaggcctaacccctgtctttagatttacagtccaatgcttcactcagccattttacctcacccccactgatgttcgccgaccgttgactattctctacaaaccacaaagacattggaacactatacctattattcggcgcatgagctggagtcctaggcacagctctaagcctccttattcgagccgagctgggccagccaggcaaccttctaggtaacgaccacatctacaacgttatcgtcacagcccatgcatttgtaataatcttcttcatagtaatacccatcataatcggaggctttggcaactgactagttcccctaataatcggtgcccccgatatggcgtttccccgcataaacaacataagcttctgactcttacctccctctctcctactcctgctcgcatctgctatagtggaggccggagcaggaacaggttgaacagtctaccctcccttagcagggaactactcccaccctggagcctccgtagacctaaccatcttctccttacacctagcaggtgtctcctctatcttaggggccatcaatttcatcacaacaattatcaatataaaaccccctgccataacccaataccaaacgcccctcttcgtctgatccgtcctaattacagcagtcctacttctcctatctctcccagtcctagctgctggcatcactatactactaacagaccgcaacctcaacaccaccttcttcgaccccgccggaggaggagaccccattctataccaacacctattctgatttttcggtcaccctgaagtttatattcttatcctaccaggcttcggaataatctcccatattgtaacttactactccggaaaaaaagaaccatttggatacataggtatagtctgagctatgatatcaattggcttcctagggtttatcgtgtgagcacaccatatatttacagtaggaatagacgtagacacacgagcatatttcacctccgctaccataatcatcgctatccccaccggcgtcaaagtatttagctgactcgccacactccacggaagcaatatgaaatgatctgctgcagtgctctgagccctaggattcatctttcttttcaccgtaggtggcctgactggcattgtattagcaaactcatcactagacatcgtactacacgacacgtactacgttgtagctcacttccactatgtcctatcaataggagctgtatttgccatcataggaggcttcattcactgatttcccctattctcaggctacaccctagaccaaacctacgccaaaatccatttcactatcatattcatcggcgtaaatctaactttcttcccacaacactttctcggcctatccggaatgccccgacgttactcggactaccccgatgcgtacaccacatgaaacatcctatcatctgtaggctcattcatttctctaacagcagtaatattaataattttcatgatttgagaagccttcgcttcgaagcgaaaagtcctaatagtagaagaaccctccataaacctggagtgactatatggatgccccccaccctaccacacattcgaagaacccgtatacataaaatctagacaaaaaaggaaggaatcgaaccccccaaagctggtttcaagccaaccccatggcctccatgactttttcaaaaaggtattagaaaaaccatttcataactttgtcaaagttaaattataggctaaatcctatatatcttaatggcacatgcagcgcaagtaggtctacaagacgctacttcccctatcatagaagagcttatcacctttcatgatcacgccctcataatcattttccttatctgcttcctagtcctgtatgcccttttcctaacactcacaacaaaactaactaatactaacatctcagacgctcaggaaatagaaaccgtctgaactatcctgcccgccatcatcctagtcctcatcgccctcccatccctacgcatcctttacataacagacgaggtcaacgatccctcccttaccatcaaatcaattggccaccaatggtactgaacctacgagtacaccgactacggcggactaatcttcaactcctacatacttcccccattattcctagaaccaggcgacctgcgactccttgacgttgacaatcgagtagtactcccgattgaagcccccattcgtataataattacatcacaagacgtcttgcactcatgagctgtccccacattaggcttaaaaacagatgcaattcccggacgtctaaaccaaaccactttcaccgctacacgaccgggggtatactacggtcaatgctctgaaatctgtggagcaaaccacagtttcatgcccatcgtcctagaattaattcccctaaaaatctttgaaatagggcccgtatttaccctatagcaccccctctagagcccactgtaaagctaacttagcattaaccttttaagttaaagattaagagaaccaacacctctttacagtgaaatgccccaactaaatactaccgtatggcccaccataattacccccatactccttacactattcctcatcacccaactaaaaatattaaacacaaactaccacctacctccctcaccaaagcccataaaaataaaaaattataacaaaccctgagaaccaaaatgaacgaaaatctgttcgcttcattcattgcccccacaatcctaggcctacccgccgcagtactgatcattctatttccccctctattgatccccacctccaaatatctcatcaacaaccgactaatcaccacccaacaatgactaatcaaactaacctcaaaacaaatgataaccatacacaacactaaaggacgaacctgatctcttatactagtatccttaatcatttttattgccacaactaacctcctcggactcctgcctcactcatttacaccaaccacccaactatctataaacctagccatggccatccccttatgagcgggcgcagtgattataggctttcgctctaagattaaaaatgccctagcccacttcttaccacaaggcacacctacaccccttatccccatactagttattatcgaaaccatcagcctactcattcaaccaatagccctggccgtacgcctaaccgctaacattactgcaggccacctactcatgcacctaattggaagcgccaccctagcaatatcaaccattaaccttccctctacacttaccatcttcacaattctaattctactgactatcctagaaatcgctgtcgccttaatccaagcctacgttttcacacttctagtaagcctctacctgcacgacaacacataatgacccaccaatcacatgcctatcatatagtaaaacccagcccatgacccctaacaggggccctctcagccctcctaatgacctccggcctagccatgtgatttcacttccactccataacgctcctcatactaggcctactaaccaacacactaaccatataccaatgatggcgcgatgtaacacgagaaagcacataccaaggccaccacacaccacctgtccaaaaaggccttcgatacgggataatcctatttattacctcagaagtttttttcttcgcaggatttttctgagccttttaccactccagcctagcccctaccccccaattaggagggcactggcccccaacaggcatcaccccgctaaatcccctagaagtcccactcctaaacacatccgtattactcgcatcaggagtatcaatcacctgagctcaccatagtctaatagaaaacaaccgaaaccaaataattcaagcactgcttattacaattttactgggtctctattttaccctcctacaagcctcagagtacttcgagtctcccttcaccatttccgacggcatctacggctcaacattttttgtagccacaggcttccacggacttcacgtcattattggctcaactttcctcactatctgcttcatccgccaactaatatttcactttacatccaaacatcactttggcttcgaagccgccgcctgatactggcattttgtagatgtggtctgactatttctgtatgtctccatctattgatgagggtcttactcttttagtataaatagtaccgttaacttccaattaactagttttgacaacattcaaaaaagagtaataaacttcgccttaattttaataatcaacaccctcctagccttactactaataattattacattttgactaccacaactcaacggctacatagaaaaatccaccccttacgagtgcggcttcgaccctatatcccccgcccgcgtccctttctccataaaattcttcttagtagctattaccttcttattatttgatctagaaattgccctccttttacccctaccatgagccctacaaacaactaacctgccactaatagttatgtcatccctcctattaatcatcatcctagccctaagtctggcctatgagtgactacaaaaaggattagactgaaccgaattggtatatagtttaaacaaaacgaatgatttcgactcattaaattatgataatcatatttaccaaatgcccctcatttacataaatattatactagcatttaccatctcacttctaggaatactagtatatcgctcacacctcatatcctccctactatgcctagaaggaataatactatcgctgttcattatagctactctcataaccctcaacacccactccctcttagccaatattgtgcctattgccatactagtctttgccgcctgcgaagcagcggtgggcctagccctactagtctcaatctccaacacatatggcctagactacgtacataacctaaacctactccaatgctaaaactaatcgtcccaacaattatattactaccactgacatgactttccaaaaaacacataatttgaatcaacacaaccacccacagcctaattattagcatcatccctctactattttttaaccaaatcaacaacaacctatttagctgttccccaaccttttcctccgaccccctaacaacccccctcctaatactaactacctgactcctacccctcacaatcatggcaagccaacgccacttatccagtgaaccactatcacgaaaaaaactctacctctctatactaatctccctacaaatctccttaattataacattcacagccacagaactaatcatattttatatcttcttcgaaaccacacttatccccaccttggctatcatcacccgatgaggcaaccagtcagaacgcctgaacgcaggcacatacttcctattctacaccctagtaggctcccttcccctactcatcgcactaatttacactcacaacaccctaggctcactaaacattctactactcactctcactgcccaagaactatcaaactcctgagccaacaacttaatatgactagcttacacaatagcttttatagtaaagatacctctttacggactccacttatgactccctaaagcccatgtcgaagcccccatcgctgggtcaatagtacttgccgcagtactcttaaaactaggcggctatggtataatacgcctcacactcattctcaaccccctgacaaaacacatagcctaccccttccttgtactatccctatgaggcataattataacaagctccatctgcctacgacaaacagacctaaaatcgctcattgcatactcttcaatcagccacatagccctcgtagtaacagccattctcatccaaaccccctgaagcttcaccggcgcagtcattctcataatcgcccacggacttacatcctcattactattctgcctagcaaactcaaactacgaacgcactcacagtcgcatcataatcctctctcaaggacttcaaactctactcccactaatagctttttgatgacttctagcaagcctcgctaacctcgccttaccccccactattaacctactgggagaactctctgtgctagtaaccacgttctcctgatcaaatatcactctcctacttacaggactcaacatactagtcacagccctatactccctctacatatttaccacaacacaatggggctcactcacccaccacattaacaacataaaaccctcattcacacgagaaaacaccctcatgttcatacacctatcccccattctcctcctatccctcaaccccgacatcattaccgggttttcctcttgtaaatatagtttaaccaaaacatcagattgtgaatctgacaacagaggcttacgaccccttatttaccgagaaagctcacaagaactgctaactcatgcccccatgtctaacaacatggctttctcaacttttaaaggataacagctatccattggtcttaggccccaaaaattttggtgcaactccaaataaaagtaataaccatgcacactactataaccaccctaaccctgacttccctaattccccccatccttaccaccctcgttaaccctaacaaaaaaaactcatacccccattatgtaaaatccattgtcgcatccacctttattatcagtctcttccccacaacaatattcatgtgcctagaccaagaagttattatctcgaactgacactgagccacaacccaaacaacccagctctccctaagcttcaaactagactacttctccataatattcatccctgtagcattgttcgttacatggtccatcatagaattctcactgtgatatataaactcagacccaaacattaatcagttcttcaaatatctactcatcttcctaattaccatactaatcttagttaccgctaacaacctattccaactgttcatcggctgagagggcgtaggaattatatccttcttgctcatcagttgatgatacgcccgagcagatgccaacacagcagccattcaagcaatcctatacaaccgtatcggcgatatcggtttcatcctcgccttagcatgatttatcctacactccaactcatgagacccacaacaaatagcccttctaaacgctaatccaagcctcaccccactactaggcctcctcctagcagcagcaggcaaatcagcccaattaggtctccacccctgactcccctcagccatagaaggccccaccccagtctcagccctactccactcaagcactatagttgtagcaggaatcttcttactcatccgcttccaccccctagcagaaaatagcccactaatccaaactctaacactatgcttaggcgctatcaccactctgttcgcagcagtctgcgcccttacacaaaatgacatcaaaaaaatcgtagccttctccacttcaagtcaactaggactcataatagttacaatcggcatcaaccaaccacacctagcattcctgcacatctgtacccacgccttcttcaaagccatactatttatgtgctccgggtccatcatccacaaccttaacaatgaacaagatattcgaaaaataggaggactactcaaaaccatacctctcacttcaacctccctcaccattggcagcctagcattagcaggaatacctttcctcacaggtttctactccaaagaccacatcatcgaaaccgcaaacatatcatacacaaacgcctgagccctatctattactctcatcgctacctccctaacaagcgcctatagcactcgaataattcttctcaccctaacaggtcaacctcgcttccccacccttactaacattaacgaaaataaccccaccctactaaaccccattaaacgcctggcagccggaagcctattcgcaggatttctcattactaacaacatttcccccgcatcccccttccaaacaacaatccccctctacctaaaactcacagccctcgctgtcactttcctaggacttctaacagccctagacctcaactacctaaccaacaaacttaaaataaaatccccactatgcacattttatttctccaacatactcggattctaccctagcatcacacaccgcacaatcccctatctaggccttcttacgagccaaaacctgcccctactcctcctagacctaacctgactagaaaagctattacctaaaacaatttcacagcaccaaatctccacctccatcatcacctcaacccaaaaaggcataattaaactttacttcctctctttcttcttcccactcatcctaaccctactcctaatcacataacctattcccccgagcaatctcaattacaatatatacaccaacaaacaatgttcaaccagtaactactactaatcaacgcccataatcatacaaagcccccgcaccaataggatcctcccgaatcaaccctgacccctctccttcataaattattcagcttcctacactattaaagtttaccacaaccaccaccccatcatactctttcacccacagcaccaatcctacctccatcgctaaccccactaaaacactcaccaagacctcaacccctgacccccatgcctcaggatactcctcaatagccatcgctgtagtatatccaaagacaaccatcattccccctaaataaattaaaaaaactattaaacccatataacctcccccaaaattcagaataataacacacccgaccacaccgctaacaatcaatactaaacccccataaataggagaaggcttagaagaaaaccccacaaaccccattactaaacccacactcaacagaaacaaagcatacatcattattctcgcacggactacaaccacgaccaatgatatgaaaaaccatcgttgtatttcaactacaagaacaccaatgaccccaatacgcaaaattaaccccctaataaaattaattaaccactcattcatcgacctccccaccccatccaacatctccgcatgatgaaacttcggctcactccttggcgcctgcctgatcctccaaatcaccacaggactattcctagccatgcactactcaccagacgcctcaaccgccttttcatcaatcgcccacatcactcgagacgtaaattatggctgaatcatccgctaccttcacgccaatggcgcctcaatattctttatctgcctcttcctacacatcgggcgaggcctatattacggatcatttctctactcagaaacctgaaacatcggcattatcctcctgcttgcaactatagcaacagccttcataggctatgtcctcccgtgaggccaaatatcattctgaggggccacagtaattacaaacttactatccgccatcccatacattgggacagacctagttcaatgaatctgaggaggctactcagtagacagtcccaccctcacacgattctttacctttcacttcatcttgcccttcattattgcagccctagcagcactccacctcctattcttgcacgaaacgggatcaaacaaccccctaggaatcacctcccattccgataaaatcaccttccacccttactacacaatcaaagacgccctcggcttacttctcttccttctctccttaatgacattaacactattctcaccagacctcctaggcgacccagacaattataccctagccaaccccttaaatacccctccccacatcaagcccgaatgatatttcctattcgcctacacaattctccgatccgtccctaacaaactaggaggcgtccttgccctattactatccatcctcatcctagcaataatccccatcctccatatatccaaacaacaaagcataatatttcgcccactaagccaatcactttattgactcctagccgcagacctcctcattctaacctgaatcggaggacaaccagtaagctacccttttaccatcattggacaagtagcatccgtactatacttcacaacaatcctaatcctaataccaactatctccctaattgaaaacaaaatactcaaatgggcctgtccttgtagtataaactaatacaccagtcttgtaaaccggagatgaaaacctttttccaaggacaaatcagagaaaaagtctttaactccaccattagcacccaaagctaagattctaatttaaactattctctgttctttcatggggaagcagatttgggtaccacccaagtattgactcacccatcaacaaccgctatgtatttcgtacattactgccagccaccatgaatattgtacggtaccataaatacttgaccacctgtagtacataaaaacccaatccacatcaaccccccccccccatgcttacaagcaagtacagcaaccaaccctcaactatcacacatcaactgcaactccaaagccacccctcacccactaggataccaacaaacctacccacccttaacagtacatagtacataaagccatttaccgtacatagcacattacagtcaaatcccttctcgtccccatggatgacccccctcagataggggtcccttgaccaccatcctccgtgaaatcaatatcccgcacaagagtgctactctcctcgctccgggcccataacacttgggggtagctaaagtgaactgtatccgacatctggttcctacttcagggccataaagcctaaatagcccacacgttccccttaaataagacatcacgatg

SEQ ID NO: 181 - DNA, 16569 bp, Homo sapiens mitochondrial
  3107: "n" refers to a nucleotide at position 3107 of the Cambridge Reference Sequence (CRS, Anderson et al. 1981 Nature 290:457-465), later determined to be absent from the human mtDNA sequence according to the revised CRS (rCRS, Andrews et al. 1999 Nature Genetics 23:147); "n" therefore represents a single nucleotide deletion at a position corresponding to nucleotide 3107 of SEQ ID NO:1 as provided herein.
gatcacaggtctatcaccctattaaccactcacgggagctctccatgcatttggtattttcgtctggggggtgtgcacgcgatagcattgcgagacgctggagccggagcaccctatgtcgcagtatctgtctttgattcctgcctcattctattatttatcgcacctacgttcaatattacaggcgaacatacctactaaagtgtgttaattaattaatgcttgtaggacataataataacaattgaatgtctgcacagccgctttccacacagacatcataacaaaaaatttccaccaaaccccccctcccccccgcttctggccacagcacttaaacacatctctgccaaaccccaaaaacaaagaaccctaacaccagcctaaccagatttcaaattttatcttttggcggtatgcacttttaacagtcaccccccaactaacacattattttcccctcccactcccatactactaatctcatcaatacaacccccggccatcctacccagcacacacaccggtgctaaccccataccccgaaccaaccaaaccccaaagacaccccccacagtttatgtagcttacctcctcaaagcaatacactgaaaatgtttagacgggctcacatcaccccataaacaaataggtttggtcctagcctttctattagctcttagtaagattacacatgcaagcatccccgttccagtgagttcaccctctaaatcaccacgatcaaaaggaacaagcatcaagcacgcagcaatgcagctcaaaacgcttagcctagccacacccccacgggaaacagcagtgattaacctttagcaataaacgaaagtttaactaagctatactaaccccagggttggtcaatttcgtgccagccaccgcggtcacacgattaacccaagtcaatagaagccggcgtaaagagtgttttagatcaccccctccccaataaagctaaaactcacctgagttgtaaaaaactccagttgacacaaaatagactacgaaagtggctttaacatatctgaacacacaatagctaagacccaaactgggattagataccccactatgcttagccctaaacctcaacagttaaatcaacaaaactgctcgccagaacactacgagccacagcttaaaactcaaaggacctggcggtgcttcatatccctctagaggagcctgttctgtaatcgataaaccccgatcaacctcaccacctcttgctcagcctatataccgccatcttcagcaaaccctgatgaaggctacaaagtaagcgcaagtacccacgtaaagacgttaggtcaaggtgtagcccatgaggtggcaagaaatgggctacattttctaccccagaaaactacgatagcccttatgaaacttaagggtcgaaggtggatttagcagtaaactgagagtagagtgcttagttgaacagggccctgaagcgcgtacacaccgcccgtcaccctcctcaagtatacttcaaaggacatttaactaaaacccctacgcatttatatagaggagacaagtcgtaacatggtaagtgtactggaaagtgcacttggacgaaccagagtgtagcttaacacaaagcacccaacttacacttaggagatttcaacttaacttgaccgctctgagctaaacctagccccaaacccactccaccttactaccagacaaccttagccaaaccatttacccaaataaagtataggcgatagaaattgaaacctggcgcaatagatatagtaccgcaagggaaagatgaaaaattataaccaagcataatatagcaaggactaacccctataccttctgcataatgaattaactagaaataactttgcaaggagagccaaagctaagacccccgaaaccagacgagctacctaagaacagctaaaagagcacacccgtctatgtagcaaaatagtgggaagatttataggtagaggcgacaaacctatcgagcctggtgatagctggttgtccaagatagaatcttagttcaactttaaatttgcccacagaaccctctaaatccccttgtaaatttaactgttagtccaaagaggaacagctctttggacactaggaaaaaaccttgtagagagagtaaaaaatttaacacccatagtaggcctaaaagcagccaccaattaagaaagcgttcaagctcaacacccactacctaaaaaatcccaaacatataactgaactcctcacacccaattggaccaatctatcaccctatagaagaactaatgttagtataagtaacatgaaaacattctcctccgcataagcctgcgtcagatcaaaacactgaactgacaattaacagcccaatatctacaatcaaccaacaagtcattattaccctcactgtcaacccaacacaggcatgctcataaggaaaggttaaaaaaagtaaaaggaactcggcaaatcttaccccgcctgtttaccaaaaacatcacctctagcatcaccagtattagaggcaccgcctgcccagtgacacatgtttaacggccgcggtaccctaaccgtgcaaaggtagcataatcacttgttccttaaatagggacctgtatgaatggctccacgagggttcagctgtctcttacttttaaccagtgaaattgacctgcccgtgaagaggcgggcatgacacagcaagacgagaagaccctatggagctttaatttattaatgcaaacagtacctaacaaacccacaggtcctaaactaccaaacctgcattaaaaatttcggttggggcgacctcggagcagaacccaacctccgagcagtacatgctaagacttcaccagtcaaagcgaactactatactcaattgatccaataacttgaccaacggaacaagttaccctagggataacagcgcaatcctattctagagtccatatcaacaatagggtttacgacctcgatgttggatcaggacatcccgatggtgcagccgctattaaaggttcgtttgttcaacgattaaagtcctacgtgatctgagttcagaccggagtaatccaggtcggtttctatctacnttcaaattcctccctgtacgaaaggacaagagaaataaggcctacttcacaaagcgccttcccccgtaaatgatatcatctcaacttagtattatacccacacccacccaagaacagggtttgttaagatggcagagcccggtaatcgcataaaacttaaaactttacagtcagaggttcaattcctcttcttaacaacatacccatggccaacctcctactcctcattgtacccattctaatcgcaatggcattcctaatgcttaccgaacgaaaaattctaggctatatacaactacgcaaaggccccaacgttgtaggcccctacgggctactacaacccttcgctgacgccataaaactcttcaccaaagagcccctaaaacccgccacatctaccatcaccctctacatcaccgccccgaccttagctctcaccatcgctcttctactatgaacccccctccccatacccaaccccctggtcaacctcaacctaggcctcctatttattctagccacctctagcctagccgtttactcaatcctctgatcagggtgagcatcaaactcaaactacgccctgatcggcgcactgcgagcagtagcccaaacaatctcatatgaagtcaccctagccatcattctactatcaacattactaataagtggctcctttaacctctccacccttatcacaacacaagaacacctctgattactcctgccatcatgacccttggccataatatgatttatctccacactagcagagaccaaccgaacccccttcgaccttgccgaaggggagtccgaactagtctcaggcttcaacatcgaatacgccgcaggccccttcgccctattcttcatagccgaatacacaaacattattataataaacaccctcaccactacaatcttcctaggaacaacatatgacgcactctcccctgaactctacacaacatattttgtcaccaagaccctacttctaacctccctgttcttatgaattcgaacagcatacccccgattccgctacgaccaactcatacacctcctatgaaaaaacttcctaccactcaccctagcattacttatatgatatgtctccatacccattacaatctccagcattccccctcaaacctaagaaatatgtctgataaaagagttactttgatagagtaaataataggagcttaaacccccttatttctaggactatgagaatcgaacccatccctgagaatccaaaattctccgtgccacctatcacaccccatcctaaagtaaggtcagctaaataagctatcgggcccataccccgaaaatgttggttatacccttcccgtactaattaatcccctggcccaacccgtcatctactctaccatctttgcaggcacactcatcacagcgctaagctcgcactgattttttacctgagtaggcctagaaataaacatgctagcttttattccagttctaaccaaaaaaataaaccctcgttccacagaagctgccatcaagtatttcctcacgcaagcaaccgcatccataatccttctaatagctatcctcttcaacaatatactctccggacaatgaaccataaccaatactaccaatcaatactcatcattaataatcataatggctatagcaataaaactaggaatagccccctttcacttctgagtcccagaggttacccaaggcacccctctgacatccggcctgcttcttctcacatgacaaaaactagcccccatctcaatcatataccaaatctctccctcactaaacgtaagccttctcctcactctctcaatcttatccatcatagcaggcagttgaggtggattaaaccaaacccagctacgcaaaatcttagcatactcctcaattacccacataggatgaataatagcagttctaccgtacaaccctaacataaccattcttaatttaactatttatattatcctaactactaccgcattcctactactcaacttaaactccagcaccacgaccctactactatctcgcacctgaaacaagctaacatgactaacacccttaattccatccaccctcctctccctaggaggcctgcccccgctaaccggctttttgcccaaatgggccattatcgaagaattcacaaaaaacaatagcctcatcatccccaccatcatagccaccatcaccctccttaacctctacttctacctacgcctaatctactccacctcaatcacactactccccatatctaacaacgtaaaaataaaatgacagtttgaacatacaaaacccaccccattcctccccacactcatcgcccttaccacgctactcctacctatctccccttttatactaataatcttatagaaatttaggttaaatacagaccaagagccttcaaagccctcagtaagttgcaatacttaatttctgtaacagctaaggactgcaaaaccccactctgcatcaactgaacgcaaatcagccactttaattaagctaagcccttactagaccaatgggacttaaacccacaaacacttagttaacagctaagcaccctaatcaactggcttcaatctacttctcccgccgccgggaaaaaaggcgggagaagccccggcaggtttgaagctgcttcttcgaatttgcaattcaatatgaaaatcacctcggagctggtaaaaagaggcctaacccctgtctttagatttacagtccaatgcttcactcagccattttacctcacccccactgatgttcgccgaccgttgactattctctacaaaccacaaagacattggaacactatacctattattcggcgcatgagctggagtcctaggcacagctctaagcctccttattcgagccgagctgggccagccaggcaaccttctaggtaacgaccacatctacaacgttatcgtcacagcccatgcatttgtaataatcttcttcatagtaatacccatcataatcggaggctttggcaactgactagttcccctaataatcggtgcccccgatatggcgtttccccgcataaacaacataagcttctgactcttacctccctctctcctactcctgctcgcatctgctatagtggaggccggagcaggaacaggttgaacagtctaccctcccttagcagggaactactcccaccctggagcctccgtagacctaaccatcttctccttacacctagcaggtgtctcctctatcttaggggccatcaatttcatcacaacaattatcaatataaaaccccctgccataacccaataccaaacgcccctcttcgtctgatccgtcctaatcacagcagtcctacttctcctatctctcccagtcctagctgctggcatcaccatactactaacagaccgcaacctcaacaccaccttcttcgaccccgccggaggaggagaccccattctataccaacacctattctgatttttcggtcaccctgaagtttatattcttatcctaccaggcttcggaataatctcccatattgtaacttactactccggaaaaaaagaaccatttggatacataggtatggtctgagctatgatatcaattggcttcctagggtttatcgtgtgagcacaccatatatttacagtaggaatagacgtagacacacgagcatatttcacctccgctaccataatcatcgctatccccaccggcgtcaaagtatttagctgactcgccacactccacggaagcaatatgaaatgatctgctgcagtgctctgagccctaggattcatctttcttttcaccgtaggtggcctgactggcattgtattagcaaactcatcactagacatcgtactacacgacacgtactacgttgtagctcacttccactatgtcctatcaataggagctgtatttgccatcataggaggcttcattcactgatttcccctattctcaggctacaccctagaccaaacctacgccaaaatccatttcactatcatattcatcggcgtaaatctaactttcttcccacaacactttctcggcctatccggaatgccccgacgttactcggactaccccgatgcatacaccacatgaaacatcctatcatctgtaggctcattcatttctctaacagcagtaatattaataattttcatgatttgagaagccttcgcttcgaagcgaaaagtcctaatagtagaagaaccctccataaacctggagtgactatatggatgccccccaccctaccacacattcgaagaacccgtatacataaaatctagacaaaaaaggaaggaatcgaaccccccaaagctggtttcaagccaaccccatggcctccatgactttttcaaaaaggtattagaaaaaccatttcataactttgtcaaagttaaattataggctaaatcctatatatcttaatggcacatgcagcgcaagtaggtctacaagacgctacttcccctatcatagaagagcttatcacctttcatgatcacgccctcataatcattttccttatctgcttcctagtcctgtatgcccttttcctaacactcacaacaaaactaactaatactaacatctcagacgctcaggaaatagaaaccgtctgaactatcctgcccgccatcatcctagtcctcatcgccctcccatccctacgcatcctttacataacagacgaggtcaacgatccctcccttaccatcaaatcaattggccaccaatggtactgaacctacgagtacaccgactacggcggactaatcttcaactcctacatacttcccccattattcctagaaccaggcgacctgcgactccttgacgttgacaatcgagtagtactcccgattgaagcccccattcgtataataattacatcacaagacgtcttgcactcatgagctgtccccacattaggcttaaaaacagatgcaattcccggacgtctaaaccaaaccactttcaccgctacacgaccgggggtatactacggtcaatgctctgaaatctgtggagcaaaccacagtttcatgcccatcgtcctagaattaattcccctaaaaatctttgaaatagggcccgtatttaccctatagcaccccctctaccccctctagagcccactgtaaagctaacttagcattaaccttttaagttaaagattaagagaaccaacacctctttacagtgaaatgccccaactaaatactaccgtatggcccaccataattacccccatactccttacactattcctcatcacccaactaaaaatattaaacacaaactaccacctacctccctcaccaaagcccataaaaataaaaaattataacaaaccctgagaaccaaaatgaacgaaaatctgttcgcttcattcattgcccccacaatcctaggcctacccgccgcagtactgatcattctatttccccctctattgatccccacctccaaatatctcatcaacaaccgactaatcaccacccaacaatgactaatcaaactaacctcaaaacaaatgatagccatacacaacactaaaggacgaacctgatctcttatactagtatccttaatcatttttattgccacaactaacctcctcggactcctgcctcactcatttacaccaaccacccaactatctataaacctagccatggccatccccttatgagcgggcgcagtgattataggctttcgctctaagattaaaaatgccctagcccacttcttaccacaaggcacacctacaccccttatccccatactagttattatcgaaaccatcagcctactcattcaaccaatagccctggccgtacgcctaaccgctaacattactgcaggccacctactcatgcacctaattggaagcgccaccctagcaatatcaaccattaaccttccctctacacttatcatcttcacaattctaattctactgactatcctagaaatcgctgtcgccttaatccaagcctacgttttcacacttctagtaagcctctacctgcacgacaacacataatgacccaccaatcacatgcctatcatatagtaaaacccagcccatgacccctaacaggggccctctcagccctcctaatgacctccggcctagccatgtgatttcacttccactccataacgctcctcatactaggcctactaaccaacacactaaccatataccaatgatggcgcgatgtaacacgagaaagcacataccaaggccaccacacaccacctgtccaaaaaggccttcgatacgggataatcctatttattacctcagaagtttttttcttcgcaggatttttctgagccttttaccactccagcctagcccctaccccccaactaggagggcactgacccccaacaggcatcaccccgctaaatcccctagaagtcccactcctaaacacatccgtattactcgcatcaggagtatcaatcacctgagctcaccatagtctaatagaaaacaaccgaaaccaaataattcaagcactgcttattacaattttactgggtctctattttaccctcctacaagcctcagagtacttcgagtctcccttcaccatttccgacggcatctacggctcaacattttttgtagccacaggcttccacggacttcacgtcattattggctcaactttcctcactatctgcttcatccgccaactaatatttcactttacatccaaacatcactttggcttcgaagccgccgcctgatactggcattttgtagatgtggtttgactatttctgtatgtctccatctattgatgagggtcttactcttttagtataaatagtaccgttaacttccaattaactagttttgacaacattcaaaaaagagtaataaacttcgccttaattttaataatcaacaccctcctagccttactactaataattattacattttgactaccacaactcaacggctacatagaaaaatccaccccttacgagtgcggcttcgaccctatatcccccgcccgcgtccctttctccataaaattcttcttagtagctattaccttcttattatttgatctagaaattgccctccttttacccctaccgtgagccctacaaacaactaacctgccactaatagttatgtcatccctcttattaatcatcatcctagccctaagtctggcctatgagtgactacaaaaaggattagactgagccgaattggtatatagtttaaacaaaacgaatgatttcgactcattaaattatgataatcatatttaccaaatgcccctcatttacataaatattatactagcatttaccatctcacttctaggaatactagtatatcgctcacacctcatatcctccctactatgcctagaaggaataatactatcgctgttcattatagctactctcataaccctcaacacccactccctcttagccaatattgtgcctattgccatactagtcttcgccgcctgcgaagcagcggtgggcctagccctactagtctcaatctccaacacatatggcctagactacgtacataacctaaacctactccaatgctaaaactaatcgtcccaacaattatattactaccactgacatgactttccaagaagcacataatttgaatcaacacaaccacccacagcctaattattagcatcatccccctactattttttaaccaaatcaacaacaacctatttagctgttccccaaccttttcctccgaccccctaacaacccccctcctaatactaactacctgactcctacccctcacaatcatggcaagccaacgccacttatccagtgaaccactatcacgaaaaaaactctacctctctatactaatctccctacaaatctccttaattataacattcacagccacagaactaatcatattttatatcttcttcgaaaccacacttatccccaccttggctatcatcacccgatgaggcaaccagccagaacgcctgaacgcaggcacatacttcctattctacaccctagtaggctcccttcccctactcatcgcactaatttacactcacaacaccctaggctcactaaacattctactactcactctcactgcccaagaactatcaaactcctgagccaacaacttaatatgactagcttacacaatagcttttatagtaaagatacctctttacggactccacttatgactccctaaagcccatgtcgaagcccccatcgctgggtcaatagtacttgccgcagtactcttaaaactaggcggctatggtataatacgcctcacactcattctcaaccccctgacaaaacacatagcctaccccttccttgtactatccctatgaggcataattataacaagctccatctgcctacgacaaacagacctaaaatcgctcattgcatactcttcaatcagccacatagccctcgtagtaacagccattctcatccaaaccccctgaagcttcaccggcgcagtcattctcataatcgcccacggacttacatcctcattactattctgcctagcaaactcaaactacgaacgcactcacagtcgcatcataatcctctctcaaggacttcaaactctactcccactaatagctttttgatgacttctagcaagcctcgctaacctcgccttaccccccactattaacctactgggagaactctctgtgctagtaaccacgttctcctgatcaaatatcactctcctacttacaggactcaacatactagtcacagccctatactccctctacatatttaccacaacacaatggggctcactcacccaccacattaacaacataaaaccctcattcacacgagaaaacaccctcatgttcatacacctatcccccattctcctcctatccctcaaccccgacatcattaccgggttttcctcttgtaaatatagtttaaccaaaacatcagattgtgaatctgacaacagaggcttacgaccccttatttaccgagaaagctcacaagaactgctaactcatgcccccatgtctaacaacatggctttctcaacttttaaaggataacagctatccattggtcttaggccccaaaaattttggtgcaactccaaataaaagtaataaccatgcacactactataaccaccctaaccctgacttccctaattccccccatccttgccaccctcgttaaccctaacaaaaaaaactcatacccccattatgtaaaatccattgtcgcatccacctttattatcagtctcttccccacaacaatattcatgtgcctagaccaagaagttattatctcgaactgacactgagccacaacccaaacaacccagctctccctaagcttcaaactagactacttctccataatattcatccctgtagcattgttcgttacatggtccatcatagaattctcactgtgatatataaactcagacccaaacattaatcagttcttcaaatatctactcattttcctaattaccatactaatcttagttaccgctaacaacctattccaactgttcatcggctgagagggcgtaggaattatatccttcttgctcatcagttgatgatacgcccgagcagatgccaacacagcagccattcaagcaatcctatacaaccgtatcggcgatatcggtttcatcctcgccttagcatgatttatcctacactccaactcatgagacccacaacaaatagcccttctaaacgctaatccaagcctcaccccactactaggcctcctcctagcagcagcaggcaaatcagcccaattaggtctccacccctgactcccctcagccatagaaggccccaccccagtctcagccctactccactcaagcactatagttgtagccggaatcttcttactcatccgcttccaccccctagcagaaaatagcccactaatccaaactctaacactatgcttaggcgctatcaccactctgttcgcagcagtctgcgcccttacacaaaatgacatcaaaaaaatcgtagccttctccacttcaagtcaactaggactcataatagttacaatcggcatcaaccaaccacacctagcattcctgcacatctgtacccacgccttcttcaaagccatactatttatgtgctccgggtccatcatccacaaccttaacaatgaacaagatattcgaaaaataggaggactactcaaaaccatacctctcacttcaacctccctcaccattggcagcctagcattagcaggaatacctttcctcacaggtttctactccaaagaccacatcatcgaaaccgcaaacatatcatacacaaacgcctgagccctatctattactctcatcgctacctccctgacaagcgcctatagcactcgaataattcttctcaccctaacaggtcaacctcgcttccccacccttactaacattaacgaaaataaccccaccctactaaaccccattaaacgcctggcagccggaagcctattcgcaggatttctcattactaacaacatttcccccgcatcccccttccaaacaacaatccccctctacctaaaactcacagccctcgctgtcactttcctaggacttctaacagccctagacctcaactacctaaccaacaaacttaaaataaaatccccactatgcacattttatttctccaacatactcggattctaccctagcatcacacaccgcacaatcccctatctaggccttcttacgagccaaaacctgcccctactcctcctagacctaacctgactagaaaagctattacctaaaacaatttcacagcaccaaatctccacctccatcatcacctcaacccaaaaaggcataattaaactttacttcctctctttcttcttcccactcatcctaaccctactcctaatcacataacctattcccccgagcaatctcaattacaatatatacaccaacaaacaatgttcaaccagtaaccactactaatcaacgcccataatcatacaaagcccccgcaccaataggatcctcccgaatcaaccctgacccctctccttcataaattattcagcttcctacactattaaagtttaccacaaccaccaccccatcatactctttcacccacagcaccaatcctacctccatcgctaaccccactaaaacactcaccaagacctcaacccctgacccccatgcctcaggatactcctcaatagccatcgctgtagtatatccaaagacaaccatcattccccctaaataaattaaaaaaactattaaacccatataacctcccccaaaattcagaataataacacacccgaccacaccgctaacaatcaatactaaacccccataaataggagaaggcttagaagaaaaccccacaaaccccattactaaacccacactcaacagaaacaaagcatacatcattattctcgcacggactacaaccacgaccaatgatatgaaaaaccatcgttgtatttcaactacaagaacaccaatgaccccaatacgcaaaattaaccccctaataaaattaattaaccactcattcatcgacctccccaccccatccaacatctccgcatgatgaaacttcggctcactccttggcgcctgcctgatcctccaaatcaccacaggactattcctagccatgcactactcaccagacgcctcaaccgccttttcatcaatcgcccacatcactcgagacgtaaattatggctgaatcatccgctaccttcacgccaatggcgcctcaatattctttatctgcctcttcctacacatcgggcgaggcctatattacggatcatttctctactcagaaacctgaaacatcggcattatcctcctgcttgcaactatagcaacagccttcataggctatgtcctcccgtgaggccaaatatcattctgaggggccacagtaattacaaacttactatccgccatcccatacattgggacagacctagttcaatgaatctgaggaggctactcagtagacagtcccaccctcacacgattctttacctttcacttcatcttacccttcattattgcagccctagcagcactccacctcctattcttgcacgaaacgggatcaaacaaccccctaggaatcacctcccattccgataaaatcaccttccacccttactacacaatcaaagacgccctcggcttacttctcttccttctctccttaatgacattaacactattctcaccagacctcctaggcgacccagacaattataccctagccaaccccttaaacacccctccccacatcaagcccgaatgatatttcctattcgcctacacaattctccgatccgtccctaacaaactaggaggcgtccttgccctattactatccatcctcatcctagcaataatccccatcctccatatatccaaacaacaaagcataatatttcgcccactaagccaatcactttattgactcctagccgcagacctcctcattctaacctgaatcggaggacaaccagtaagctacccttttaccatcattggacaagtagcatccgtactatacttcacaacaatcctaatcctaataccaactatctccctaattgaaaacaaaatactcaaatgggcctgtccttgtagtataaactaatacaccagtcttgtaaaccggagatgaaaacctttttccaaggacaaatcagagaaaaagtctttaactccaccattagcacccaaagctaagattctaatttaaactattctctgttctttcatggggaagcagatttgggtaccacccaagtattgactcacccatcaacaaccgctatgtatttcgtacattactgccagccaccatgaatattgtacggtaccataaatacttgaccacctgtagtacataaaaacccaatccacatcaaaaccccctccccatgcttacaagcaagtacagcaatcaaccttcaactatcacacatcaactgcaactccaaagccacccctctcccactaggataccaacaaacctacccacccttaacagtacatagtacataaagccatttaccgtacatagcacattacagtcaaatcccttctcgtccccatggatgacccccctcagataggggtcccttgaccaccatcctccgtgaaatcaatatcccgcacaagagtgctactctcctcgctccgggcccataacacttgggggtagctaaagtgaactgtatccgacatctggttcctacttcagggccataaagcctaaatagcccacacgttccccttaaataagacatcacgatg

SEQ ID NO: 182 - DNA, 16568 bp, Homo sapiens mitochondrial
  3106: "n" refers to a nucleotide at position 3107 of the Cambridge Reference Sequence (CRS, Anderson et al. 1981 Nature 290:457-465), later determined to be absent from the human mtDNA sequence according to the revised CRS (rCRS, Andrews et al. 1999 Nature Genetics 23:147); "n" therefore represents a single nucleotide deletion at a position corresponding to nucleotide 3107 of SEQ ID NO:1 as provided herein.
gatcacaggtctatcaccctattaaccactcacgggagctctccatgcatttggtattttcgtctggggggtatgcacgcgatagcattgcgagacgctggagccggagcaccctatgtcgcagtatctgtctttgattcctgcctcatcctattatttatcgcacctacgttcaatattacaggcgaacatacttactaaagtgtgttaattaattaatgcttgtaggacataataataacaattgaatgtctgcacagccgctttccacacagacatcataacaaaaaatttccaccaaaccccccctcccccgccttctggccacagcacttaaacacatctctgccaaaccccaaaaacaaagaaccctaacaccagcctaaccagatttcaaattttatcttttggcggtatgcacttttaacagtcaccccccaactaacacattatttttccctcccactcccatactactaatctcatcaatacaacccccgcccatcctacccagcacacacaccgctgctaaccccataccccgaaccaaccaaaccccaaagacaccccccacagtttatgtagcttacctcctcaaagcaatacactgaaaatgtttagacgggctcacatcaccccataaacaaataggtttggtcctagcctttctattagctcttagtaagattacacatgcaagcatccccgttccagtgagttcaccctctaaatcaccacgatcaaaagggacaagcatcaagcacgcagcaatgcagctcaaaacgcttagcctagccacacccccacgggaaacagcagtgattaacctttagcaataaacgaaagtttaactaagctatactaaccccagggttggtcaatttcgtgccagccaccgcggtcacacgattaacccaagtcaatagaagccggcgtaaagagtgttttagatcaccccctccccaataaagctaaaactcacctgagttgtaaaaaactccagttgacacaaaatagactacgaaagtggctttaacatatctgaacacacaatagctaagacccaaactgggattagataccccactatgcttagccctaaacctcaacagttaaatcaacaaaactgctcgccagaacactacgagccacagcttaaaactcaaaggacctggcggtgcttcatatccctctagaggagcctgttctgtaatcgataaaccccgatcaacctcaccacctcttgctcagcctatataccgccatcttcagcaaaccctgatgaaggctacaaagtaagcgcaagtacccacgtaaagacgttaggtcaaggtgtagcccatgaggtggcaagaaatgggctacattttctaccccagaaaactacgatagcccttatgaaacttaagggtcgaaggtggatttagcagtaaactgagagtagagtgcttagttgaacagggccctgaagcgcgtacacaccgcccgtcaccctcctcaagtatacttcaaaggacatttaactaaaacccctacgcatttatatagaggagacaagtcgtaacatggtaagtgtactggaaagtgcacttggacgaaccagagtgtagcttaacacaaagcacccaacttacacttaggagatttcaacttaacttgaccgctctgagctaaacctagccccaaacccactccaccttactaccagacaaccttagccaaaccatttacccaaataaagtataggcgatagaaattgaaacctggcgcaatagatatagtaccgcaagggaaagatgaaaaattataaccaagcataatatagcaaggactaacccctataccttctgcataatgaattaactagaaataactttgcaaggagagccaaagctaagacccccgaaaccagacgagctacctaagaacagctaaaagagcacacccgtctatgtagcaaaatagtgggaagatttataggtagaggcgacaaacctaccgagcctggtgatagctggttgtccaagatagaatcttagttcaactttaaatttgcccacagaaccctctaaatccccttgtaaatttaactgttagtccaaagaggaacagctctttggacactaggaaaaaaccttgtagagagagtaaaaaatttaacacccatagtaggcctaaaagcagccaccaattaagaaagcgttcaagctcaacacccactacctaaaaaatcccaaacatataactgaactcctcacacccaattggaccaatctatcaccctatagaagaactaatgttagtataagtaacatgaaaacattctcctccgcataagcctgcgtcagattaaaacactgaactgacaattaacagcccaatatctacaatcaaccaacaagtcattattaccctcactgtcaacccaacacaggcatgctcataaggaaaggttaaaaaaagtaaaaggaactcggcaaatcttaccccgcctgtttaccaaaaacatcacctctagcatcaccagtattagaggcaccgcctgcccagtgacacatgtttaacggccgcggtaccctaaccgtgcaaaggtagcataatcacttgttccttaaatagggacctgtatgaatggctccacgagggttcagctgtctcttacttttaaccagtgaaattgacctgcccgtgaagaggcgggcataacacagcaagacgagaagaccctatggagctttaatttattaatgcaaacagtacctaacaaacccacaggtcctaaactaccaaacctgcattaaaaatttcggttggggcgacctcggagcagaacccaacctccgagcagtacatgctaagacttcaccagtcaaagcgaactactatactcaattgatccaataacttgaccaacggaacaagttaccctagggataacagcgcaatcctattctagagtccatatcaacaatagggtttacgacctcgatgttggatcaggacatcccgatggtgcagccgctattaaaggttcgtttgttcaacgattaaagtcctacgtgatctgagttcagaccggagtaatccaggtcggtttctatctacnttcaaattcctccctgtacgaaaggacaagagaaataaggcctacttcacaaagcgccttcccccgtaaatgatatcatctcaacttagtattatacccacacccacccaagaacagggtttgttaagatggcagagcccggtaatcgcataaaacttaaaactttacagtcagaggttcaattcctcttcttaacaacatacccatggccaacctcctactcctcattgtacccattctaatcgcaatggcattcctaatgcttaccgaacgaaaaattctaggctatatacaactacgcaaaggccccaacgttgtaggcccctacgggctactacaacccttcgctgacgccataaaactcttcaccaaagagcccctaaaacccgccacatctaccatcaccctctacatcaccgccccgaccttagctctcaccatcgctcttctactatgaacccccctccccatacccaaccccctggtcaacctcaacctaggcctcctatttattctagccacctctagcctagccgtttactcaatcctctgatcagggtgagcatcaaactcaaactacgccctgatcggcgcactgcgagcagtagcccaaacaatctcatatgaagtcaccctagccatcattctactatcaacattactaataagtggctcctttaacctctccacccttatcacaacacaagaacacctctgattactcctgccatcatgacccttggccataatatgatttatctccacactagcagagaccaaccgaacccccttcgaccttgccgaaggggagtccgaactagtctcaggcttcaacatcgaatacgccgcaggccccttcgccctattcttcatagccgaatacacaaacattattataataaacaccctcaccactacaatcttcctaggaacaacatatgacgcactctcccctgaactctacacaacatattttgtcaccaagaccctacttctaacctccctgttcttatgaattcgaacagcatacccccgattccgctacgaccaactcatacacctcctatgaaaaaacttcctaccactcaccctagcattacttatatgatatgtctccatacccattacaatctccagcattccccctcaaacctaagaaatatgtctgataaaagagttactttgatagagtaaataataggagcttaaacccccttatttctaggaccatgagaatcgaacccatccctgagaatccaaaattctccgtgccacctatcacaccccatcctaaagtaaggtcagctaaataagctatcgggcccataccccgaaaatgttggttatacccttcccgtactaattaatcccctggcccaacccgtcatctactctaccatctttgcaggcacactcatcacagcgctaagctcgcactgattttttacctgagtaggcctagaaataaacatgctagcttttattccagttctaaccaaaaaaataaaccctcgttccacagaagctgccatcaagtatttcctcacgcaagcaaccgcatccataatccttctaatagctatcctcttcaacaatatactctccggacaatgaaccataaccaatactaccaatcaatactcatcattaataatcataatggctatagcaataaaactaggaatagccccctttcacttctgagtcccagaggttacccaaggcacccctctgacatccggcctgcttcttctcacatgacaaaaactagcccccatctcaatcatataccaaatctctccctcactaaacgtaagccttctcctcactctctcaatcttatccatcatagcaggcagttgaggtggattaaaccaaacccagctacgcaaaatcttagcatactcctcaattacccacataggatgaataatagcagttctaccgtacaaccctaacataaccattcttaatttaactatttatattatcctaactactaccgcattcctactactcaacttaaactccagcaccacgaccctactactatctcgcacctgaaacaagctaacatgactaacacccttaattccatccaccctcctctccctaggaggcctgcccccgctaaccggctttttgcccaaatgggccattatcgaagaattcacaaaaaacaatagcctcatcatccccaccatcatagccaccatcaccctccttaacctctacttctacctacgcctaatctactccacctcaatcacactactccccatatctaacaacgtaaaaataaaatgacagtttgaacatacaaaacccaccccattcctccccacactcatcgcccttaccacgctactcctacctatctccccttttatactaataatcttatagaaatttaggttaaatacagaccaagagccttcaaagccctcagtaagttgcaatacttaatttctgtaacagctaaggactgcaaaaccccactctgcatcaactgaacgcaaatcagccactttaattaagctaagcccttactagaccaatgggacttaaacccacaaacacttagttaacagctaagcaccctaatcaactggcttcaatctacttctcccgccgccgggaaaaaaggcgggagaagccccggcaggtttgaagctgcttcttcgaatttgcaattcaatatgaaaatcacctcggagctggtaaaaagaggcctaacccctgtctttagatttacagtccaatgcttcactcagccattttacctcacccccactgatgttcgccgaccgttgactattctctacaaaccacaaagacattggaacactatacctattattcggcgcatgagctggagtcctaggcacagctctaagcctccttattcgagccgagctgggccagccaggcaaccttctaggtaacgaccacatctacaacgttatcgtcacagcccatgcatttgtaataatcttcttcatagtaatacccatcataatcggaggctttggcaactgactagttcccctaataatcggtgcccccgatatggcgtttccccgcataaacaacataagcttctgactcttacctccctctctcctactcctgctcgcatctgctatagtggaggccggagcaggaacaggttgaacagtctaccctcccttagcagggaactactcccaccctggagcctccgtagacctaaccatcttctccttacacctagcaggtgtctcctctatcttaggggccatcaatttcatcacaacaattatcaatataaaaccccctgccataacccaataccaaacgcccctcttcgtctgatccgtcctaatcacagcagtcctacttctcctatctctcccagtcctagctgctggcatcactatactactaacagaccgcaacctcaacaccaccttcttcgaccccgccggaggaggagaccccattctataccaacacctattctgatttttcggtcaccctgaagtttatattcttatcctaccaggcttcggaataatctcccatattgtaacttactactccggaaaaaaagaaccatttggatacataggtatggtctgagctatgatatcaattggcttcctagggtttatcgtgtgagcacaccatatatttacagtaggaatagacgtagacacacgagcatatttcacctccgctaccataatcatcgctatccccaccggcgtcaaagtatttagctgactcgccacactccacggaagcaatatgaaatgatctgctgcagtgctctgagccctaggattcatctttcttttcaccgtaggtggcctgactggcattgtattagcaaactcatcactagacatcgtactacacgacacgtactacgttgtagcccacttccactatgtcctatcaataggagctgtatttgccatcataggaggcttcattcactgatttcccctattctcaggctacaccctagaccaaacctacgccaaaatccatttcactatcatattcatcggcgtaaatctaactttcttcccacaacactttctcggcctatccggaatgccccgacgttactcggactaccccgatgcatacaccacatgaaacatcctatcatctgtaggctcattcatttctctaacagcagtaatattaataattttcatgatttgagaagccttcgcttcgaagcgaaaagtcctaatagtagaagaaccctccataaacctggagtgactatatggatgccccccaccctaccacacattcgaagaacccgtatacataaaatctagacaaaaaaggaaggaatcgaaccccccaaagctggtttcaagccaaccccatggcctccatgactttttcaaaaaggtattagaaaaaccatttcataactttgtcaaagttaaattataggctaaatcctatatatcttaatggcacatgcagcgcaagtaggtctacaagacgctacttcccctatcatagaagagcttatcacctttcatgatcacgccctcataatcattttccttatctgcttcctagtcctgtatgcccttttcctaacactcacaacaaaactaactaatactaacatctcagacgctcaggaaatagaaaccgtctgaactatcctgcccgccatcatcctagtcctcatcgccctcccatccctacgcatcctttacataacagacgaggtcaacgatccctcccttaccatcaaatcaattggccaccaatggtactgaacctacgagtacaccgactacggcggactaatcttcaactcctacatacttcccccattattcctagaaccaggcgacctgcgactccttgacgttgacaatcgagtagtactcccgattgaagcccccattcgtataataattacatcacaagacgtcttgcactcatgagctgtccccacattaggcttaaaaacagatgcaattcccggacgtctaaaccaaaccactttcaccgctacacgaccgggggtatactacggtcaatgctctgaaatctgtggagcaaaccacagtttcatgcccatcgtcctagaattaattcccctaaaaatctttgaaatagggcccgtatttaccctatagcaccccctctaccccctctagagcccactgtaaagctaacttagcattaaccttttaagttaaagattaagagaaccaacacctctttacagtgaaatgccccaactaaatactaccgtatggcccaccataattacccccatactccttacactattcctcatcacccaactaaaaatattaaacacaaactaccacctacctccctcaccaaagcccataaaaataaaaaattataacaaaccctgagaaccaaaatgaacgaaaatctgttcgcttcattcattgcccccacaatcctaggcctacccgccgcagtactgatcattctatttccccctctattgatccccacctccaaatatctcatcaacaaccgactaatcaccacccaacaatgactaatcaaactaacctcaaaacaaatgataaccatacacaacactaaaggacgaacctgatctcttatactagtatccttaatcatttttattgccacaactaacctcctcggactcctgcctcactcattttcaccaaccacccaactatctataaacctagccatggccatccccttatgagcgggcgcagtgattataggctttcgctctaagattaaaaatgccctagcccacttcttaccacaaggcacacctacaccccttatccccatactagttattatcgaaaccatcagcctactcattcaaccaatagccctggccgtacgcctaaccgctaacattactgcaggccacctactcatgcacctaattggaagcgccaccctagcaatatcaaccattaaccttccctctacacttatcatcttcacaattctaattctactgactatcctagaaatcgctgtcgccttaatccaagcctacgttttcacacttctagtaagcctctacctgcacgacaacacataatgacccaccaatcacatgcctatcatatagtaaaacccagcccatgacccctaacaggggccctctcagccctcctaatgacctccggcctagccatgtgatttcacttccactccataacgctcctcatactaggcctactaaccaacacactaaccatataccaatgatggcgcgatgtaacacgagaaagcacataccaaggccaccacacaccacctgtccaaaaaggccttcgatacgggataatcctatttattacctcagaagtttttttcttcgcaggatttttctgagccttttaccactccagcctagcccctaccccccaattaggagggcactggcccccaacaggcatcaccccgctaaatcccctagaagtcccactcctaaacacatccgtattactcgcatcaggagtatcaatcacctgagctcaccatagtctaatagaaaacaaccgaaaccaaataattcaagcactgcttattacaattttactgggtctctattttaccctcctacaagcctcagagtacttcgagtctcccttcaccatttccgacggcatctacggctcaacattttttgtagccacaggcttccacggacttcacgtcattattggctcaactttcctcactatctgcttcatccgccaactaatatttcactttacatccaaacatcactttggcttcgaagccgccgcctgatactggcattttgtagatgtggtttgactatttctgtatgtctccatctattgatgagggtcttactcttttagtataaatagtaccgttaacttccaattaactagttttgacaacattcaaaaaagagtaataaacttcgccttaattttaataatcaacaccctcctagccttactactaataattattacattttgactaccacaactcaacggctacatagaaaaatccaccccttacgagtgcggcttcgaccctatatcccccgcccgcgtccctttctccataaaattcttcttagtagctattaccttcttattatttgatctagaaattgccctccttttacccctaccatgagccctacaaacaactaacctgccactaatagttatgtcatccctcttattaatcatcatcctagccctaagtctggcctatgagtgactacaaaaaggattagactgaaccgaattggtatatagtttaaacaaaacgaatgatttcgactcattaaattatgataatcatatttaccaaatgcccctcatttacataaatattatactagcatttaccatctcacttctaggaatactagtatatcgctcacacctcatatcctccctactatgcctagaaggaataatactatcgctgttcattatagctactctcataaccctcaacacccactccctcttagccaatattgtgcctattgccatactagtctttgccgcctgcgaagcagcggtgggcctagccctactagtctcaatctccaacacatatggcctagactacgtacataacctaaacctactccaatgctaaaactaatcgtcccaacaattatattactaccactgacatgactttccaaaaaacacataatttgaatcaacacaaccacccacagcctaattattagcatcatccctctactattttttaaccaaatcaacaacaacctatttagctgttccccaaccttttcctccgaccccctaacaacccccctcctaatactaactacctgactcctacccctcacaatcatggcaagccaacgccacttatccagtgaaccactatcacgaaaaaaactctacctctctatactaatctccctacaaatctccttaattataacattcacagccacagaactaatcatattttatatcttcttcgaaaccacacttatccccaccttggctatcatcacccgatgaggcaaccagccagaacgcctgaacgcaggcacatacttcctattctacaccctagtaggctcccttcccctactcatcgcactaatttacactcacaacaccctaggctcactaaacattctactactcactctcactgcccaagaactatcaaactcctgagccaacaacttaatatgactagcttacacaatagcttttatagtaaagatacctctttacggactccacttatgactccctaaagcccatgtcgaagcccccatcgctgggtcaatagtacttgccgcagtactcttaaaactaggcggctatggtataatacgcctcacactcattctcaaccccctgacaaaacacatagcctaccccttccttgtactatccctatgaggcataattataacaagctccatctgcctacgacaaacagacctaaaatcgctcattgcatactcttcaatcagccacatagccctcgtagtaacagccattctcatccaaaccccctgaagcttcaccggcgcagtcattctcataatcgcccacgggcttacatcctcattactattctgcctagcaaactcaaactacgaacgcactcacagtcgcatcataatcctctctcaaggacttcaaactctactcccactaatagctttttgatgacttctagcaagcctcgctaacctcgccttaccccccactattaacctactgggagaactctctgtgctagtaaccacgttctcctgatcaaatatcactctcctacttacaggactcaacatactagtcacagccctatactccctctacatatttaccacaacacaatggggctcactcacccaccacattaacaacataaaaccctcattcacacgagaaaacaccctcatgttcatacacctatcccccattctcctcctatccctcaaccccgacatcattaccgggttttcctcttgtaaatatagtttaaccaaaacatcagattgtgaatctgacaacagaggcttacgaccccttatttaccgagaaagctcacaagaactgctaactcatgcccccatgtctaacaacatggctttctcaacttttaaaggataacagctatccattggtcttaggccccaaaaattttggtgcaactccaaataaaagtaataaccatgcacactactataaccaccctaaccctgacttccctaattccccccatccttaccaccctcgttaaccctaacaaaaaaaactcatacccccattatgtaaaatccattgtcgcatccacctttattatcagtctcttccccacaacaatattcatgtgcctagaccaagaagttattatctcgaactgacactgagccacaacccaaacaacccagctctccctaagcttcaaactagactacttctccataatattcatccctgtagcattgttcgttacatggtccatcatagaattctcactgtgatatataaactcagacccaaacattaatcagttcttcaaatatctactcatcttcctaattaccatactaatcttagttaccgctaacaacctattccaactgttcatcggctgagagggcgtaggaattatatccttcttgctcatcagttgatgatacgcccgagcagatgccaacacagcagccattcaagcaatcctatacaaccgtatcggcgatatcggtttcatcctcgccttagcatgatttatcctacactccaactcatgagacccacaacaaatagcccttctaaacgctaatccaagcctcaccccactactaggcctcctcctagcagcagcaggcaaatcagcccaattaggtctccacccctgactcccctcagccatagaaggccccaccccagtctcagccctactccactcaagcactatagttgtagcaggaatcttcttactcatccgcttccaccccctagcagaaaatagcccactaatccaaactctaacactatgcttaggcgctatcaccactctgttcgcagcagtctgcgcccttacacaaaatgacatcaaaaaaatcgtagccttctccacttcaagtcaactaggactcataatagttacaatcggcatcaaccaaccacacctagcattcctgcacatctgtacccacgccttcttcaaagccatactatttatgtgctccgggtccatcatccacaaccttaacaatgaacaagatattcgaaaaataggaggactactcaaaaccatacctctcacttcaacctccctcaccattggcagcctagcattagcaggaatacctttcctcacaggtttctactccaaagaccacatcatcgaaaccgcaaacatatcatacacaaacgcctgagccctatctattactctcatcgctacctccctgacaagcgcctatagcactcgaataattcttctcaccctaacaggtcaacctcgcttccccacccttactaacattaacgaaaataaccccaccctactaaaccccattaaacgcctggcagccggaagcctattcgcaggatttctcattactaacaacatttcccccgcatcccccttccaaacaacaatccccctctacctaaaactcacagccctcgctgtcactttcctaggacttctaacagccctagacctcaactacctaaccaacaaacttaaaataaaatccccactatgcacattttatttctccaacatactcggattctaccctagcatcacacaccgcacaatcccctatctaggccttcttacgagccaaaacctgcccctactcctcctagacctaacctgactagaaaagctattacctaaaacaatttcacagcaccaaatctccacctccatcatcacctcaacccaaaaaggcataattaaactttacttcctctctttcttcttcccactcatcctaaccctactcctaatcacataacctattcccccgagcaatctcaattacaatatatacaccaacaaacaatgttcaaccagtaactactactaatcaacgcccataatcatacaaagcccccgcaccaataggatcctcccgaatcaaccctgacccctctccttcataaattattcagcttcctacactattaaagtttaccacaaccaccaccccatcatactctttcacccacagcaccaatcctacctccatcgctaaccccactaaaacactcaccaagacctcaacccctgacccccatgcctcaggatactcctcaatagccatcgctgtagtatatccaaagacaaccatcattccccctaaataaattaaaaaaactattaaacccatataacctcccccaaaattcagaataataacacacccgaccacaccgctaacaatcaatactaaacccccataaataggagaaggcttagaagaaaaccccacaaaccccattactaaacccacactcaacagaaacaaagcatacatcattattctcgcacggactacaaccacgaccaatgatatgaaaaaccatcgttgtatttcaactacaagaacaccaatgaccccaatacgcaaaactaaccccctaataaaattaattaaccactcattcatcgacctccccaccccatccaacatctccgcatgatgaaacttcggctcactccttggcgcctgcctgatcctccaaatcaccacaggactattcctagccatgcactactcaccagacgcctcaaccgccttttcatcaatcgcccacatcactcgagacgtaaattatggctgaatcatccgctaccttcacgccaatggcgcctcaatattctttatctgcctcttcctacacatcgggcgaggcctatattacggatcatttctctactcagaaacctgaaacatcggcattatcctcctgcttgcaactatagcaacagccttcataggctatgtcctcccgtgaggccaaatatcattctgaggggccacagtaattacaaacttactatccgccatcccatacattgggacagacctagttcaatgaatctgaggaggctactcagtagacagtcccaccctcacacgattctttacctttcacttcatcttgcccttcattattgcagccctagcagcactccacctcctattcttgcacgaaacgggatcaaacaaccccctaggaatcacctcccattccgataaaatcaccttccacccttactacacaatcaaagacgccctcggcttacttctcttccttctctccttaatgacattaacactattctcaccagacctcctaggcgacccagacaattataccctagccaaccccttaaacacccctccccacatcaagcccgaatgatatttcctattcgcctacacaattctccgatccgtccctaacaaactaggaggcgtccttgccctattactatccatcctcatcctagcaataatccccatcctccatatatccaaacaacaaagcataatatttcgcccactaagccaatcactttattgactcctagccgcagacctcctcattctaacctgaatcggaggacaaccagtaagctacccttttaccatcattggacaagtagcatccgtactatacttcacaacaatcttaatcctaataccaactatctccctaattgaaaacaaaatactcaaatgggcctgtccttgtagtataaactaatacaccagtcttgtaaaccggagatgaaaacctttttccaaggacaaatcagagaaaaagtctttaactccaccattagcacccaaagctaagattctaatttaaactattctctgttctttcatggggaagcagatttgggtaccacccaagtattgactcacccatcaacaaccgctatgtatttcgtacattactgccagccaccatgaatattgtacggtaccataaatacttgaccacctgtagtacataaaaacccaatccacatcaaaaccccctccccatgcttacaagcaagtacagcaatcaaccctcaactatcacacatcaactgcaactccaaagccacccctcacccactaggataccaacaaacctacccacccttaacagcacatagtacataaagccatttaccgtacatagcacattacagtcaaatcccttctcgtccccatggatgacccccctcagataggggtcccttgaccaccatcctccgtgaaatcaatatcccgcacaagagtgctactctcctcgctccgggcccataacacttgggggtagctaaagtgaactgtatccgacatctggttcctacttcagggtcataaagcctaaatagcccacacgttccccttaaataagacatcacgatg

SEQ ID NO: 183 - DNA, 16568 bp, Homo sapiens mitochondrial
  3106: "n" refers to a nucleotide at position 3107 of the Cambridge Reference Sequence (CRS, Anderson et al. 1981 Nature 290:457-465), later determined to be absent from the human mtDNA sequence according to the revised CRS (rCRS, Andrews et al. 1999 Nature Genetics 23:147); "n" therefore represents a single nucleotide deletion at a position corresponding to nucleotide 3107 of SEQ ID NO:1 as provided herein.
gatcacaggtctatcaccctattaaccactcacgggagctctccatgcatttggtattttcgtctggggggtatgcacgcgatagcattgcgagacgctggagccggagcaccctatgtcgcagtatctgtctttgattcctgcctcatcctattatttatcgcacctacgttcaatattacaggcgaacatacttactaaagtgtgttaattaattaatgcttgtaggacataataataacaattgaatgtctgcacagccgctttccacacagacatcataacaaaaaatttccaccaaaccccccctcccccgccttctggccacagcacttaaacacatctctgccaaaccccaaaaacaaagaaccctaacaccagcctaaccagatttcaaattttatcttttggcggtatgcacttttaacagtcaccccccaactaacacattatttttccctcccactcccatactactaatctcatcaatacaacccccgcccatcctacccagcacacacaccgctgctaaccccataccccgaaccaaccaaaccccaaagacaccccccacagtttatgtagcttacctcctcaaagcaatacactgaaaatgtttagacgggctcacatcaccccataaacaaataggtttggtcctagcctttctattagctcttagtaagattacacatgcaagcatccccgttccagtgagttcaccctctaaatcaccacgatcaaaagggacaagcatcaagcacgcagcaatgcagctcaaaacgcttagcctagccacacccccacgggaaacagcagtgattaacctttagcaataaacgaaagtttaactaagctatactaaccccagggttggtcaatttcgtgccagccaccgcggtcacacgattaacccaagtcaatagaagccggcgtaaagagtgttttagatcaccccctccccaataaagctaaaactcacctgagttgtaaaaaactccagttgacacaaaatagactacgaaagtggctttaacatatctgaacacacaatagctaagacccaaactgggattagataccccactatgcttagccctaaacctcaacagttaaatcaacaaaactgctcgccagaacactacgagccacagcttaaaactcaaaggacctggcggtgcttcatatccctctagaggagcctgttctgtaatcgataaaccccgatcaacctcaccacctcttgctcagcctatataccgccatcttcagcaaaccctgatgaaggctacaaagtaagcgcaagtacccacgtaaagacgttaggtcaaggtgtagcccatgaggtggcaagaaatgggctacattttctaccccagaaaactacgatagcccttatgaaacttaagggtcgaaggtggatttagcagtaaactgagagtagagtgcttagttgaacagggccctgaagcgcgtacacaccgcccgtcaccctcctcaagtatacttcaaaggacatttaactaaaacccctacgcatttatatagaggagacaagtcgtaacatggtaagtgtactggaaagtgcacttggacgaaccagagtgtagcttaacacaaagcacccaacttacacttaggagatttcaacttaacttgaccgctctgagctaaacctagccccaaacccactccaccttactaccagacaaccttagccaaaccatttacccaaataaagtataggcgatagaaattgaaacctggcgcaatagatatagtaccgcaagggaaagatgaaaaattataaccaagcataatatagcaaggactaacccctataccttctgcataatgaattaactagaaataactttgcaaggagagccaaagctaagacccccgaaaccagacgagctacctaagaacagctaaaagagcacacccgtctatgtagcaaaatagtgggaagatttataggtagaggcgacaaacctaccgagcctggtgatagctggttgtccaagatagaatcttagttcaactttaaatttgcccacagaaccctctaaatccccttgtaaatttaactgttagtccaaagaggaacagctctttggacactaggaaaaaaccttgtagagagagtaaaaaatttaacacccatagtaggcctaaaagcagccaccaattaagaaagcgttcaagctcaacacccactacctaaaaaatcccaaacatataactgaactcctcacacccaattggaccaatctatcaccctatagaagaactaatgttagtataagtaacatgaaaacattctcctccgcataagcctgcgtcagattaaaacactgaactgacaattaacagcccaatatctacaatcaaccaacaagtcattattaccctcactgtcaacccaacacaggcatgctcataaggaaaggttaaaaaaagtaaaaggaactcggcaaatcttaccccgcctgtttaccaaaaacatcacctctagcatcaccagtattagaggcaccgcctgcccagtgacacatgtttaacggccgcggtaccctaaccgtgcaaaggtagcataatcacttgttccttaaatagggacctgtatgaatggctccacgagggttcagctgtctcttacttttaaccagtgaaattgacctgcccgtgaagaggcgggcataacacagcaagacgagaagaccctatggagctttaatttattaatgcaaacagtacctaacaaacccacaggtcctaaactaccaaacctgcattaaaaatttcggttggggcgacctcggagcagaacccaacctccgagcagtacatgctaagacttcaccagtcaaagcgaactactatactcaattgatccaataacttgaccaacggaacaagttaccctagggataacagcgcaatcctattctagagtccatatcaacaatagggtttacgacctcgatgttggatcaggacatcccgatggtgcagccgctattaaaggttcgtttgttcaacgattaaagtcctacgtgatctgagttcagaccggagtaatccaggtcggtttctatctacnttcaaattcctccctgtacgaaaggacaagagaaataaggcctacttcacaaagcgccttcccccgtaaatgatatcatctcaacttagtattatacccacacccacccaagaacagggtttgttaagatggcagagcccggtaatcgcataaaacttaaaactttacagtcagaggttcaattcctcttcttaacaacatacccatggccaacctcctactcctcattgtacccattctaatcgcaatggcattcctaatgcttaccgaacgaaaaattctaggctatatacaactacgcaaaggccccaacgttgtaggcccctacgggctactacaacccttcgctgacaccataaaactcttcaccaaagagcccctaaaacccgccacatctaccatcaccctctacatcaccgccccgaccttagctctcaccatcgctcttctactatgaacccccctccccatacccaaccccctggtcaacctcaacctaggcctcctatttattctagccacctctagcctagccgtttactcaatcctctgatcagggtgagcatcaaactcaaactacgccctgatcggcgcactgcgagcagtagcccaaacaatctcatatgaagtcaccctagccatcattctactatcaacattactaataagtggctcctttaacctctccacccttatcacaacacaagaacacctctgattactcctgccatcatgacccttggccataatatgatttatctccacactagcagagaccaaccgaacccccttcgaccttgccgaaggggagtccgaactagtctcaggcttcaacatcgaatacgccgcaggccccttcgccctattcttcatagccgaatacacaaacattattataataaacaccctcaccactacaatcttcctaggaacaacatatgacgcactctcccctgaactctacacaacatattttgtcaccaagaccctacttctaacctccctgttcttatgaattcgaacagcatacccccgattccgctacgaccaactcatacacctcctatgaaaaaacttcctaccactcaccctagcattacttatatgatatgtctccatacccattacaatctccagcattccccctcaaacctaagaaatatgtctgataaaagagttactttgatagagtaaataataggagcttaaacccccttatttctaggaccatgagaatcgaacccatccctgagaatccaaaattctccgtgccacctatcacaccccatcctaaagtaaggtcagctaaataagctatcgggcccataccccgaaaatgttggttatacccttcccgtactaattaatcccctggcccaacccgtcatctactctaccatctttgcaggcacactcatcacagcgctaagctcgcactgattttttacctgagtaggcctagaaataaacatgctagcttttattccagttctaaccaaaaaaataaaccctcgttccacagaagctgccatcaagtatttcctcacgcaagcaaccgcatccataatccttctaatagctatcctcttcaacaatatactctccggacaatgaaccataaccaatactaccaatcaatactcatcattaataatcataatggctatagcaataaaactaggaatagccccctttcacttctgagtcccagaggttacccaaggcacccctctgacatccggcctgcttcttctcacatgacaaaaactagcccccatctcaatcatataccaaatctctccctcactaaacgtaagccttctcctcactctctcaatcttatccatcatagcaggcagttgaggtggattaaaccaaacccagctacgcaaaatcttagcatactcctcaattacccacataggatgaataatagcagttctaccgtacaaccctaacataaccattcttaatttaactatttatattatcctaactactaccgcattcctactactcaacttaaactccagcaccacgaccctactactatctcgcacctgaaacaagctaacatgactaacacccttaattccatccaccctcctctccctaggaggcctgcccccgctaaccggctttttgcccaaatgggccattatcgaagaattcacaaaaaacaatagcctcatcatccccaccatcatagccaccatcaccctccttaacctctacttctacctacgcctaatctactccacctcaatcacactactccccatatctaacaacgtaaaaataaaatgacagtttgaacatacaaaacccaccccattcctccccacactcatcgcccttaccacgctactcctacctatctccccttttatactaataatcttatagaaatttaggttaaatacagaccaagagccttcaaagccctcagtaagttgcaatacttaatttctgtaacagctaaggactgcaaaaccccactctgcatcaactgaacgcaaatcagccactttaattaagctaagcccttactagaccaatgggacttaaacccacaaacacttagttaacagctaagcaccctaatcaactggcttcaatctacttctcccgccgccgggaaaaaaggcgggagaagccccggcaggtttgaagctgcttcttcgaatttgcaattcaatatgaaaatcacctcggagctggtaaaaagaggcctaacccctgtctttagatttacagtccaatgcttcactcagccattttacctcacccccactgatgttcgccgaccgttgactattctctacaaaccacaaagacattggaacactatacctattattcggcgcatgagctggagtcctaggcacagctctaagcctccttattcgagccgagctgggccagccaggcaaccttctaggtaacgaccacatctacaacgttatcgtcacagcccatgcatttgtaataatcttcttcatagtaatacccatcataatcggaggctttggcaactgactagttcccctaataatcggtgcccccgatatggcgtttccccgcataaacaacataagcttctgactcttacctccctctctcctactcctgctcgcatctgctatagtggaggccggagcaggaacaggttgaacagtctaccctcccttagcagggaactactcccaccctggagcctccgtagacctaaccatcttctccttacacctagcaggtgtctcctctatcttaggggccatcaatttcatcacaacaattatcaatataaaaccccctgccataacccaataccaaacgcccctcttcgtctgatccgtcctaatcacagcagtcctacttctcctatctctcccagtcctagctgctggcatcactatactactaacagaccgcaacctcaacaccaccttcttcgaccccgccggaggaggagaccccattctataccaacacctattctgatttttcggtcaccctgaagtttatattcttatcctaccaggcttcggaataatctcccatattgtaacttactactccggaaaaaaagaaccatttggatacataggtatggtctgagctatgatatcaattggcttcctagggtttatcgtgtgagcacaccatatatttacagtaggaatagacgtagacacacgagcatatttcacctccgctaccataatcatcgctatccccaccggcgtcaaagtatttagctgactcgccacactccacggaagcaatatgaaatgatctgctgcagtgctctgagccctaggattcatctttcttttcaccgtaggtggcctgactggcattgtattagcaaactcatcactagacatcgtactacacgacacgtactacgttgtagcccacttccactatgtcctatcaataggagctgtatttgccatcataggaggcttcattcactgatttcccctattctcaggctacaccctagaccaaacctacgccaaaatccatttcactatcatattcatcggcgtaaatctaactttcttcccacaacactttctcggcctatccggaatgccccgacgttactcggactaccccgatgcatacaccacatgaaacatcctatcatctgtaggctcattcatttctctaacagcagtaatattaataattttcatgatttgagaagccttcgcttcgaagcgaaaagtcctaatagtagaagaaccctccataaacctggagtgactatatggatgccccccaccctaccacacattcgaagaacccgtatacataaaatctagacaaaaaaggaaggaatcgaaccccccaaagctggtttcaagccaaccccatggcctccatgactttttcaaaaaggtattagaaaaaccatttcataactttgtcaaagttaaattataggctaaatcctatatatcttaatggcacatgcagcgcaagtaggtctacaagacgctacttcccctatcatagaagagcttatcacctttcatgatcacgccctcataatcattttccttatctgcttcctagtcctgtatgcccttttcctaacactcacaacaaaactaactaatactaacatctcagacgctcaggaaatagaaaccgtctgaactatcctgcccgccatcatcctagtcctcatcgccctcccatccctacgcatcctttacataacagacgaggtcaacgatccctcccttaccatcaaatcaattggccaccaatggtactgaacctacgagtacaccgactacggcggactaatcttcaactcctacatacttcccccattattcctagaaccaggcgacctgcgactccttgacgttgacaatcgagtagtactcccgattgaagcccccattcgtataataattacatcacaagacgtcttgcactcatgagctgtccccacattaggcttaaaaacagatgcaattcccggacgtctaaaccaaaccactttcaccgctacacgaccgggggtatactacggtcaatgctctgaaatctgtggagcaaaccacagtttcatgcccatcgtcctagaattaattcccctaaaaatctttgaaatagggcccgtatttaccctatagcaccccctctaccccctctagagcccactgtaaagctaacttagcattaaccttttaagttaaagattaagagaaccaacacctctttacagtgaaatgccccaactaaatactaccgtatggcccaccataattacccccatactccttacactattcctcatcacccaactaaaaatattaaacacaaactaccacctacctccctcaccaaagcccataaaaataaaaaattataacaaaccctgagaaccaaaatgaacgaaaatctgttcgcttcattcattgcccccacaatcctaggcctacccgccgcagtactgatcattctatttccccctctattgatccccacctccaaatatctcatcaacaaccgactaatcaccacccaacaatgactaatcaaactaacctcaaaacaaatgataaccatacacaacactaaaggacgaacctgatctcttatactagtatccttaatcatttttattgccacaactaacctcctcggactcctgcctcactcattttcaccaaccacccaactatctataaacctagccatggccatccccttatgagcgggcgcagtgattataggctttcgctctaagattaaaaatgccctagcccacttcttaccacaaggcacacctacaccccttatccccatactagttattatcgaaaccatcagcctactcattcaaccaatagccctggccgtacgcctaaccgctaacattactgcaggccacctactcatgcacctaattggaagcgccaccctagcaatatcaaccattaaccttccctctacacttatcatcttcacaattctaattctactgactatcctagaaatcgctgtcgccttaatccaagcctacgttttcacacttctagtaagcctctacctgcacgacaacacataatgacccaccaatcacatgcctatcatatagtaaaacccagcccatgacccctaacaggggccctctcagccctcctaatgacctccggcctagccatgtgatttcacttccactccataacgctcctcatactaggcctactaaccaacacactaaccatataccaatgatggcgcgatgtaacacgagaaagcacataccaaggccaccacacaccacctgtccaaaaaggccttcgatacgggataatcctatttattacctcagaagtttttttcttcgcaggatttttctgagccttttaccactccagcctagcccctaccccccaattaggagggcactggcccccaacaggcatcaccccgctaaatcccctagaagtcccactcctaaacacatccgtattactcgcatcaggagtatcaatcacctgagctcaccatagtctaatagaaaacaaccgaaaccaaataattcaagcactgcttattacaattttactgggtctctattttaccctcctacaagcctcagagtacttcgagtctcccttcaccatttccgacggcatctacggctcaacattttttgtagccacaggcttccacggacttcacgtcattattggctcaactttcctcactatctgcttcatccgccaactaatatttcactttacatccaaacatcactttggcttcgaagccgccgcctgatactggcattttgtagatgtggtttgactatttctgtatgtctccatctattgatgagggtcttactcttttagtataaatagtaccgttaacttccaattaactagttttgacaacattcaaaaaagagtaataaacttcgccttaattttaataatcaacaccctcctagccttactactaataattattacattttgactaccacaactcaacggctacatagaaaaatccaccccttacgagtgcggcttcgaccctatatcccccgcccgcgtccctttctccataaaattcttcttagtagctattaccttcttattatttgatctagaaattgccctccttttacccctaccatgagccctacaaacaactaacctgccactaatagttatgtcatccctcttattaatcatcatcctagccctaagtctggcctatgagtgactacaaaaaggattagactgaaccgaattggtatatagtttaaacaaaacgaatgatttcgactcattaaattatgataatcatatttaccaaatgcccctcatttacataaatattatactagcatttaccatctcacttctaggaatactagtatatcgctcacacctcatatcctccctactatgcctagaaggaataatactatcgctgttcattatagctactctcataaccctcaacacccactccctcttagccaatattgtgcctattgccatactagtctttgccgcctgcgaagcagcggtgggcctagccctactagtctcaatctccaacacatatggcctagactacgtacataacctaaacctactccaatgctaaaactaatcgtcccaacaattatattactaccactgacatgactttccaaaaaacacataatttgaatcaacacaaccacccacagcctaattattagcatcatccctctactattttttaaccaaatcaacaacaacctatttagctgttccccaaccttttcctccgaccccctaacaacccccctcctaatactaactacctgactcctacccctcacaatcatggcaagccaacgccacttatccagtgaaccactatcacgaaaaaaactctacctctctatactaatctccctacaaatctccttaattataacattcacagccacagaactaatcatattttatatcttcttcgaaaccacacttatccccaccttggctatcatcacccgatgaggcaaccagccagaacgcctgaacgcaggcacatacttcctattctacaccctagtaggctcccttcccctactcatcgcactaatttacactcacaacaccctaggctcactaaacattctactactcactctcactgcccaagaactatcaaactcctgagccaacaacttaatatgactagcttacacaatagcttttatagtaaagatacctctttacggactccacttatgactccctaaagcccatgtcgaagcccccatcgctgggtcaatagtacttgccgcagtactcttaaaactaggcggctatggtataatacgcctcacactcattctcaaccccctgacaaaacacatagcctaccccttccttgtactatccctatgaggcataattataacaagctccatctgcctacgacaaacagacctaaaatcgctcattgcatactcttcaatcagccacatagccctcgtagtaacagccattctcatccaaaccccctgaagcttcaccggcgcagtcattctcataatcgcccacgggcttacatcctcattactattctgcctagcaaactcaaactacgaacgcactcacagtcgcatcataatcctctctcaaggacttcaaactctactcccactaatagctttttgatgacttctagcaagcctcgctaacctcgccttaccccccactattaacctactgggagaactctctgtgctagtaaccacgttctcctgatcaaatatcactctcctacttacaggactcaacatactagtcacagccctatactccctctacatatttaccacaacacaatggggctcactcacccaccacattaacaacataaaaccctcattcacacgagaaaacaccctcatgttcatacacctatcccccattctcctcctatccctcaaccccgacatcattaccgggttttcctcttgtaaatatagtttaaccaaaacatcagattgtgaatctgacaacagaggcttacgaccccttatttaccgagaaagctcacaagaactgctaactcatgcccccatgtctaacaacatggctttctcaacttttaaaggataacagctatccattggtcttaggccccaaaaattttggtgcaactccaaataaaagtaataaccatgcacactactataaccaccctaaccctgacttccctaattccccccatccttaccaccctcgttaaccctaacaaaaaaaactcatacccccattatgtaaaatccattgtcgcatccacctttattatcagtctcttccccacaacaatattcatgtgcctagaccaagaagttattatctcgaactgacactgagccacaacccaaacaacccagctctccctaagcttcaaactagactacttctccataatattcatccctgtagcattgttcgttacatggtccatcatagaattctcactgtgatatataaactcagacccaaacattaatcagttcttcaaatatctactcatcttcctaattaccatactaatcttagttaccgctaacaacctattccaactgttcatcggctgagagggcgtaggaattatatccttcttgctcatcagttgatgatacgcccgagcagatgccaacacagcagccattcaagcaatcctatacaaccgtatcggcgatatcggtttcatcctcgccttagcatgatttatcctacactccaactcatgagacccacaacaaatagcccttctaaacgctaatccaagcctcaccccactactaggcctcctcctagcagcagcaggcaaatcagcccaattaggtctccacccctgactcccctcagccatagaaggccccaccccagtctcagccctactccactcaagcactatagttgtagcaggaatcttcttactcatccgcttccaccccctagcagaaaatagcccactaatccaaactctaacactatgcttaggcgctatcaccactctgttcgcagcagtctgcgcccttacacaaaatgacatcaaaaaaatcgtagccttctccacttcaagtcaactaggactcataatagttacaatcggcatcaaccaaccacacctagcattcctgcacatctgtacccacgccttcttcaaagccatactatttatgtgctccgggtccatcatccacaaccttaacaatgaacaagatattcgaaaaataggaggactactcaaaaccatacctctcacttcaacctccctcaccattggcagcctagcattagcaggaatacctttcctcacaggtttctactccaaagaccacatcatcgaaaccgcaaacatatcatacacaaacgcctgagccctatctattactctcatcgctacctccctgacaagcgcctatagcactcgaataattcttctcaccctaacaggtcaacctcgcttccccacccttactaacattaacgaaaataaccccaccctactaaaccccattaaacgcctggcagccggaagcctattcgcaggatttctcattactaacaacatttcccccgcatcccccttccaaacaacaatccccctctacctaaaactcacagccctcgctgtcactttcctaggacttctaacagccctagacctcaactacctaaccaacaaacttaaaataaaatccccactatgcacattttatttctccaacatactcggattctaccctagcatcacacaccgcacaatcccctatctaggccttcttacgagccaaaacctgcccctactcctcctagacctaacctgactagaaaagctattacctaaaacaatttcacagcaccaaatctccacctccatcatcacctcaacccaaaaaggcataattaaactttacttcctctctttcttcttcccactcatcctaaccctactcctaatcacataacctattcccccgagcaatctcaattacaatatatacaccaacaaacaatgttcaaccagtaactactactaatcaacgcccataatcatacaaagcccccgcaccaataggatcctcccgaatcaaccctgacccctctccttcataaattattcagcttcctacactattaaagtttaccacaaccaccaccccatcatactctttcacccacagcaccaatcctacctccatcgctaaccccactaaaacactcaccaagacctcaacccctgacccccatgcctcaggatactcctcaatagccatcgctgtagtatatccaaagacaaccatcattccccctaaataaattaaaaaaactattaaacccatataacctcccccaaaattcagaataataacacacccgaccacaccgctaacaatcaatactaaacccccataaataggagaaggcttagaagaaaaccccacaaaccccattactaaacccacactcaacagaaacaaagcatacatcattattctcgcacggactacaaccacgaccaatgatatgaaaaaccatcgttgtatttcaactacaagaacaccaatgaccccaatacgcaaaactaaccccctaataaaattaattaaccactcattcatcgacctccccaccccatccaacatctccgcatgatgaaacttcggctcactccttggcgcctgcctgatcctccaaatcaccacaggactattcctagccatgcactactcaccagacgcctcaaccgccttttcatcaatcgcccacatcactcgagacgtaaattatggctgaatcatccgctaccttcacgccaatggcgcctcaatattctttatctgcctcttcctacacatcgggcgaggcctatattacggatcatttctctactcagaaacctgaaacatcggcattatcctcctgcttgcaactatagcaacagccttcataggctatgtcctcccgtgaggccaaatatcattctgaggggccacagtaattacaaacttactatccgccatcccatacattgggacagacctagttcaatgaatctgaggaggctactcagtagacagtcccaccctcacacgattctttacctttcacttcatcttgcccttcattattgcagccctagcagcactccacctcctattcttgcacgaaacgggatcaaacaaccccctaggaatcacctcccattccgataaaatcaccttccacccttactacacaatcaaagacgccctcggcttacttctcttccttctctccttaatgacattaacactattctcaccagacctcctaggcgacccagacaattataccctagccaaccccttaaacacccctccccacatcaagcccgaatgatatttcctattcgcctacacaattctccgatccgtccctaacaaactaggaggcgtccttgccctattactatccatcctcatcctagcaataatccccatcctccatatatccaaacaacaaagcataatatttcgcccactaagccaatcactttattgactcctagccgcagacctcctcattctaacctgaatcggaggacaaccagtaagctacccttttaccatcattggacaagtagcatccgtactatacttcacaacaatcttaatcctaataccaactatctccctaattgaaaacaaaatactcaaatgggcctgtccttgtagtataaactaatacaccagtcttgtaaaccggagatgaaaacctttttccaaggacaaatcagagaaaaagtctttaactccaccattagcacccaaagctaagattctaatttaaactattctctgttctttcatggggaagcagatttgggtaccacccaagtattgactcacccatcaacaaccgctatgtatttcgtacattactgccagccaccatgaatattgtacggtaccataaatacttgaccacctgtagtacataaaaacccaatccacatcaaaaccccctccccatgcttacaagcaagtacagcaatcaaccctcaactatcacacatcaactgcaactccaaagccacccctcacccactaggataccaacaaacctacccacccttaacagcacatagtacataaagccatttaccgtacatagcacattacagtcaaatcccttctcgtccccatggatgacccccctcagataggggtcccttgaccaccatcctccgtgaaatcaatatcccgcacaagagtgctactctcctcgctccgggcccataacacttgggggtagctaaagtgaactgtatccgacatctggttcctacttcagggtcataaagcctaaatagcccacacgttccccttaaataagacatcacgatg

SEQ ID NO: 184 - DNA, 16568 bp, Homo sapiens mitochondrial
  3106: "n" refers to a nucleotide at position 3107 of the Cambridge Reference Sequence (CRS, Anderson et al. 1981 Nature 290:457-465), later determined to be absent from the human mtDNA sequence according to the revised CRS (rCRS, Andrews et al. 1999 Nature Genetics 23:147); "n" therefore represents a single nucleotide deletion at a position corresponding to nucleotide 3107 of SEQ ID NO:1 as provided herein.
gatcacaggtctatcaccctattaaccactcacgggagctctccatgcatttggtattttcgtctggggggtgtgcacgcgatagcattgcgagacgctggagccggagcaccctatgtcgcagtatctgtctttgattcctgcctcatcctattatttatcgcacctacgttcaatattacaggcgaacatacttactaaagtgtgttaattagttaatgcttgtaggacataataataacaattgatgtctgcacagccgctttccacacagacatcataacaaaatttccaccaaaccccccctcccccccgcttctggccacagcacttaaacacatctctgccaaaccccaaaaacaaagaaccctaacaccagcctaaccagatttcaaattttatcttttggcggtatgcacttttaacagtcaccccccaactaacacattattttcccctcccactcccatactactaatctcatcaacacaacccccgcccatcctacccagcacacacacaccgctgctaaccccataccccgaaccaaccaaaccccaaagacaccccccacagtttatgtagcttacctcctcaaagcaatacactgaaaatgtttagacgggctcacatcaccccataaacaaataggtttggtcctagcctttctattagctcttagtaagattacacatgcaagcatccccgttccagtgagttcaccctctaaatcaccacgatcaaaagggacaagcatcaagcacgcagcaatgcagctcaaaacgcttagcctagccacacccccacgggaaacagcagtgattaacctttagcaataaacgaaagtttaactaagctatactaaccccagggttggtcaatttcgtgccagccaccgcggtcacacgattaacccaagtcaatagaagccggcgtaaagagtgttttagatcaccccctccccaataaagctaaaactcacctgagttgtaaaaaactccagttgacacaaaatagactacgaaagtggctttaacatatctgaacacacaatagctaagacccaaactgggattagataccccactatgcttagccctaaacctcaacagttaaatcaacaaaactgctcgccagaacactacgagccacagcttaaaactcaaaggacctggcggtgcttcatatccctctagaggagcctgttctgtaatcgataaaccccgatcaacctcaccacctcttgctcagcctatataccgccatcttcagcaaaccctgatgaaggctacaaagtaagcgcaagtacccacgtaaagacgttaggtcaaggtgtagcccatgaggtggcaagaaatgggctacattttctaccccagaaaactacgatagcccttatgaaacttaagggtcgaaggtggatttagcagtaaactgagagtagagtgcttagttgaacagggccctgaagcgcgtacacaccgcccgtcaccctcctcaagtatacttcaaaggacatttaactaaaacccctacgcatttatatagaggagacaagtcgtaacatggtaagtgtactggaaagtgcacttggacgaaccagagtgtagcttaacacaaagcacccaacttacacttaggagatttcaacttaacttgaccgctctgagctaaacctagccccaaacccactccaccttactaccagacaaccttagccaaaccatttacccaaataaagtataggcgatagaaattgaaacctggcgcaatagatatagtaccgcaagggaaagatgaaaaattataaccaagcataatatagcaaggactaacccctataccttctgcataatgaattaactagaaataactttgcaaggagaaccaaagctaagacccccgaaaccagacgagctacctaagaacagctaaaagagcacacccgtctatgtagcaaaatagtgggaagatttataggtagaggcgacaaacctaccgagcctggtgatagctggttgtccaagatagaatcttagttcaactttaaatttgcccacagaaccctctaaatccccttgtaaatttaactgttagtccaaagaggaacagctctttggacactaggaaaaaaccttgtagagagagtaaaaaatttaacacccatagtaggcctaaaagcagccaccaattaagaaagcgttcaagctcaacacccactacctaaaaaatcccaaacatataactgaactcctcacacccaattggaccaatctatcaccctatagaagaactaatgttagtataagtaacatgaaaacattctcctccgcataagcctgcgtcagattaaaacactgaactgacaattaacagcccaatatctacaatcaaccaacaagtcattattaccctcactgtcaacccaacacaggcatgctcataaggaaaggttaaaaaaagtaaaaggaactcggcaaatcttaccccgcctgtttaccaaaaacatcacctctagcatcaccagtattagaggcaccgcctgcccagtgacacatgtttaacggccgcggtaccctaaccgtgcaaaggtagcataatcacttgttccttaaatagggacctgtatgaatggctccacgagggttcagctgtctcttacttttaaccagtgaaattgacctgcccgtgaagaggcgggcatgacacagcaagacgagaagaccctatggagctttaatttattaatgcaaacagtacctaacaaacccacaggtcctaaactaccaaacctgcattaaaaatttcggttggggcgacctcggagcagaacccaacctccgagcagtacatgctaagacttcaccagtcaaagcgaactactatactcaattgatccaataacttgaccaacggaacaagttaccctagggataacagcgcaatcctattctagagtccatatcaacaatagggtttacgacctcgatgttggatcaggacatcccgatggtgcagccgctattaaaggttcgtttgttcaacgattaaagtcctacgtgatctgagttcagaccggagtaatccaggtcggtttctatctacnttcaaattcctccctgtacgaaaggacaagagaaataaggcctacttcacaaagcgccttcccccgtaaatgatatcatctcaacttagtattatacccacacccacccaagaacagggtttgttaagatggcagagcccggtaatcgcataaaacttaaaactttacagtcagaggttcaattcctcttcttaacaacatacccatggccaacctcctactcctcattgtacccattctaatcgcaatggcattcctaatgcttaccgaacgaaaaattctaggctatatacaactacgcaaaggccccaacgttgtaggcccctacgggctactacaacccttcgctgacgccataaaactcttcaccaaagagcccctaaaacccgccacatctaccatcaccctctacatcaccgccccgaccttagctctcaccatcgcacttctactatgaacccccctccccatacccaaccccctggtcaacctcaacctaggcctcctatttattctagccacctctagcctagccgtttactcaatcctctgatcagggtgagcatcaaactcaaactacgccctgatcggcgcactgcgagcagtagcccaaacaatctcatatgaagtcaccctagccatcattctactatcaacattactaataagtggctcctttaacctctccacccttatcacaacacaagaacacctctgattactcctgccatcatgacccttggccataatatgatttatctccacactagcagagaccaaccgaacccccttcgaccttgccgaaggggagtccgaactagtctcaggcttcaacatcgaatacgccgcaggccccttcgccctattcttcatagccgaatacacaaacattattataataaacaccctcaccactacaatcttcctaggaacaacatatgacgcactctcccctgaactctacacaacatattttgtcaccaagaccctacttctaacctccctgttcttatgaattcgaacagcatacccccgattccgctacgaccaactcatacacctcctatgaaaaaacttcctaccactcaccctagcattacttatatgatatgtctccatacccattacaatctccagcattccccctcaaacctaagaaatatgtctgataaaagagttactttgatagagtaaataataggagcttaaacccccttatttctaggactatgagaatcgaacccatccctgagaatccaaaattctccgtgccacctatcacaccccatcctaaagtaaggtcagctaaataagctatcgggcccataccccgaaaatgttggttatacccttcccgtactaattaatcccctggcccaacccgtcatctactctaccatctttgcaggcacactcatcacagcgctaagctcgcactgattttttacctgagtaggcctagaaataaacatgctagcttttattccagttctaaccaaaaaaataaaccctcgttccacagaagctgccatcaagtatttcctcacgcaagcaaccgcatccataatccttctaatagctatcctcttcaacaatatactctccgggcaatgaaccataaccaatactaccaatcaatactcatcattaataatcataatggctatagcaataaaactaggaatagccccctttcacttctgagtcccagaggttacccaaggcacccctctgacatccggcctgcttcttctcacatgacaaaaactagcccccatctcaatcatataccaaatctctccctcactaaacgtaagccttctcctcactctctcaatcttatccatcatagcaggcagttgaggtggattaaaccaaacccagctacgcaaaatcttagcatactcctcaattacccacataggatgaataatagcagttctaccgtacaaccctaacataaccattcttaatttaactatttatattatcctaactactaccgcattcctactactcaacttaaactccagcaccacgaccctactactatctcgcacctgaaacaagctaacatgactaacacccttaattccatccaccctcctctccctaggaggcctgcccccgctaaccggctttttgcccaaatgggccattatcgaagaattcacaaaaaacaatagcctcatcatccccaccatcatagccaccatcaccctccttaacctctacttctacctacgcctaatctactccacctcaatcacactactccccatatctaacaacgtaaaaataaaatgacagtttgaacatacaaaacccaccccattcctccccacactcatcgcccttaccacgctactcctacctatctccccttttatactaataatcttatagaaatttaggttaaatacagaccaagagccttcaaagccctcagtaagttgcaatacttaatttctgtaacagctaaggactgcaaaaccccactctgcatcaactgaacgcaaatcagccactttaattaagctaagcccttactagaccaatgggacttaaacccacaaacacttagttaacagctaagcaccctaatcaactggcttcaatctacttctcccgccgccgggaaaaaaggcgggagaagccccggcaggtttgaagctgcttcttcgaatttgcaattcaatatgaaaatcacctcggagctggtaaaaagaggcctaacccctgtctttagatttacagtccaatgcttcactcagccattttacctcacccccactgatgttcgccgaccgttgactattctctacaaaccacaaagacattggaacactatacctattattcggcgcatgagctggagtcctaggcacagctctaagcctccttattcgagccgagctgggccagccaggcaaccttctaggtaacgaccacatctacaacgttatcgtcacagcccatgcatttgtaataatcttcttcatagtaatacccatcataatcggaggctttggcaactgactagttcccctaataatcggtgcccccgatatggcgtttccccgcataaacaacataagcttctgactcttacctccctctctcctactcctgctcgcatctgctatagtggaggccggagcaggaacaggttgaacagtctaccctcccttagcagggaactactcccaccctggagcctccgtagacctaaccatcttctccttacacctagcaggtgtctcctctatcttaggggccatcaatttcatcacaacaattatcaatataaaaccccctgccataacccaataccaaacgcccctcttcgtctgatccgtcctaatcacagcagtcctacttctcctatctctcccagtcctagctgctggcatcactatactactaacagaccgcaacctcaacaccaccttcttcgaccccgccggaggaggagaccccattctataccaacacctattctgatttttcggtcaccctgaagtttatattcttatcctaccaggcttcggaataatctcccatattgtaacttactactccggaaaaaaagaaccatttggatacataggtatggtctgagctatgatatcaattggcttcctagggtttatcgtgtgagcacaccatatatttacagtaggaatagacgtagacacacgagcatatttcacctccgctaccataatcatcgctatccccaccggcgtcaaagtatttagctgactcgccacactccacggaagcaatatgaaatgatctgctgcagtgctctgagccctaggattcatctttcttttcaccgtaggtggcctgactggcattgtattagcaaactcatcactagacatcgtactacacgacacgtactacgttgtagctcacttccactatgtcctatcaataggagctgtatttgccatcataggaggcttcattcactgatttcccctattctcaggctacaccctagaccaaacctacgccaaaatccatttcactatcatattcatcggcgtaaatctaactttcttcccacaacactttctaggcctatccggaatgccccgacgttactcggactaccccgatgcatacaccacatgaaacatcctatcatctgtaggctcattcatttctctaacagcagtaatattaataattttcatgatttgagaagccttcgcttcgaagcgaaaagtcctaatagtagaagaaccctccataaacctggagtgactatatggatgccccccaccctaccacacattcgaagaacccgtatacataaaatctagacaaaaaaggaaggaatcgaaccccccaaagctggtttcaagccaaccccatggcctccatgactttttcaaaaaggtattagaaaaaccatttcataactttgtcaaagttaaattataggctaaatcctatatatcttaatggcacatgcagcgcaagtaggtctacaagacgctacttcccctatcatagaagagcttatcacctttcatgatcacgccctcataatcattttccttatctgcttcctagtcctgtatgcccttttcctaacactcacaacaaaactaactaatactaacatctcagacgctcaggaaatagaaaccgtctgaactatcctgcccgccatcatcctagtcctcatcgccctcccatccctacgcatcctttacataacagacgaggtcaacgatccctcccttaccatcaaatcaattggccaccaatggtactgaacctacgagtacaccgactacggcggactaatcttcaactcctacatacttcccccattattcctagaaccaggcgacctgcgactccttgacgttgacaatcgagtagtactcccgattgaagcccccattcgtataataattacatcacaagacgtcttgcactcatgagctgtccccacattaggcttaaaaacagatgcaattcccggacgtctaaaccaaaccactttcaccgctacacgaccgggggtatactacggtcaatgctctgaaatctgtggagcaaaccacagtttcatgcccatcgtcctagaattaattcccctaaaaatctttgaaatagggcccgtatttaccctatagcaccccctctaccccctctagagcccactgtaaagctaacttagcattaaccttttaagttaaagattaagagaaccaacacctctttacagtgaaatgccccaactaaatactaccgtatggcccaccataattacccccatactccttacactattcctcatcacccaactaaaaatattaaacacaaactaccacctacctccctcaccaaagcccataaaaataaaaaattataacaaaccctgagaaccaaaatgaacgaaaatctgttcgcttcattcattgcccccacaatcctaggcctacccgccacagtactgatcattctatttccccctctattgatccccacctccaaatatctcatcaacaaccgactaatcaccacccaacaatgactaatcaaactaacctcaaaacaaatgatagccatacacaacactaaaggacgaacctgatctcttatactagtatccttaatcatttttattgccacaactaacctcctcggactcctgcctcactcatttacaccaaccacccaactatctataaacctagccatggccatccccttatgagcgggcgcagtgattataggctttcgctctaagattaaaaatgccctagcccacttcttaccacaaggcacacctacaccccttatccccatactagttattatcgaaaccatcagcctactcattcaaccaatagccctggccgtacgcctaaccgctaacattactgcaggccacctactcatgcacctaattggaagcgccaccctagcaatatcaaccattaaccttccctctacacttatcatcttcacaattctaattctactgactatcctagaaatcgctgtcgccttaatccaagcctacgttttcacacttctagtaagcctctacctgcacgacaacacataatgacccaccaatcacatgcctatcatatagtaaaacccagcccatgacccctaacaggggccctctcagccctcctaatgacctccggcctagccatgtgatttcacttccactccataacgctcctcatactaggcctactaaccaacacactaaccatataccaatgatggcgcgatgtaacacgagaaagcacataccaaggccaccacacaccacctgtccaaaaaggccttcgatacgggataatcctatttattacctcagaagtttttttcttcgcaggatttttctgagccttttaccactccagcctagcccctaccccccaactaggggggcactggcccccaacaggcatcaccccgctaaatcccctagaagtcccactcctaaacacatccgtattactcgcatcaggagtatcaatcacctgagctcaccatagtctaatagaaaacaaccgaaaccaaataattcaagcactgcttattacaattttactgggtctctattttaccctcctacaagcctcagagtacttcgagtctcccttcaccatttccgacggcatctacggctcaacattttttgtagccacaggcttccacggacttcacgtcattattggctcaactttcctcactatctgcttcatccgccaactaatatttcactttacatccaaacatcactttggcttcgaagccgccgcctgatactggcattttgtagatgtggtttgactatttctgtatgtctccatctattgatgagggtcttactcttttagtataaatagtaccgttaacttccaattaactagttttgacaacattcaaaaaagagtaataaacttcgccttaattttaataatcaacaccctcctagccttactactaataattattacattttgactaccacaactcaacggctacatagaaaaatccaccccttacgagtgcggcttcgaccctatatcccccgcccgcgtccctttctccataaaattcttcttagtagctattaccttcttattatttgatctagaaattgccctccttttacccctaccatgagccctacaaacaactaacctgccactaatagttatgtcatccctcttattaatcatcatcctagccctaagtctggcctatgagtgactacaaaaaggattagactgagctgaattggtatatagtttaaacaaaacgaatgatttcgactcattaaattatgataatcatatttaccaaatgcccctcatttacataaatattatactagcatttaccatctcacttctaggaatactagtatatcgctcacacctcatatcctccctactatgcctagaaggaataatactatcgctgttcattatagctactctcataaccctcaacacccactccctcttagccaatattgtgcctattgccatactagtctttgccgcctgcgaagcagcggtgggcctagccctactagtctcaatctccaacacatatggcctagactacgtacataacctaaacctactccaatgctaaaactaatcgtcccaacaattatattactaccactgacatgactttccaaaaaacacataatttgaatcaacacaaccacccacagcctaattattagcatcatccccctactattttttaaccaaatcaacaacaacctatttagctgttccccaaccttttcctccgaccccctaacaacccccctcctaatactaactacctgactcctacccctcacaatcatggcaagccaacgccacttatccagtgaaccactatcacgaaaaaaactctacctctctatactaatctccctacaaatctccttaattataacattcacagccacagaactaatcatattttatatcttcttcgaaaccacacttatccccaccttggctatcatcacccgatgaggcaaccagccagaacgcctgaacgcaggcacatacttcctattctacaccctagtaggctcccttcccctactcatcgcactaatttacactcacaacaccctaggctcactaaacattctactactcactctcactgcccaagaactatcaaactcctgagccaacaacttaatatgactagcttacacaatagcttttatagtaaagatacctctttacggactccacttatgactccctaaagcccatgtcgaagcccccatcgctgggtcaatagtacttgccgcagtactcttaaaactaggcggctatggtataatacgcctcacactcattctcaaccccctgacaaaacacatagcctaccccttccttgtactatccctatgaggcataattataacaagctccatctgcctacgacaaacagacctaaaatcgctcattgcatactcttcaatcagccacatagccctcgtagtaacagccattctcatccaaaccccctgaagcttcaccggcgcagtcattctcataatcgcccacggacttacatcctcattactattctgcctagcaaactcaaactacgaacgcactcacagtcgcatcataatcctctctcaaggacttcaaactctactcccactaatagctttttgatgacttctagcaagcctcgctaacctcgccttaccccccactattaacctactgggagaactctctgtgctagtaaccacattctcctgatcaaatatcactctcctacttacaggactcaacatactagtcacagccctatactccctctacatatttaccacaacacaatggggctcactcacccaccacattaacaacataaaaccctcattcacacgagaaaacaccctcatgttcatacacctatcccccattctcctcctatccctcaaccccgacatcattaccgggttttcctcttgtaaatatagtttaaccaaaacatcagattgtgaatctgacaacagaggcttacgaccccttatttaccgagaaagctcacaagaactgctaactcatgcccccatgtctaacaacatggctttctcaacttttaaaggataacagctatccattggtcttaggccccaaaaattttggtgcaactccaaataaaagtaataaccatgcacactactataaccaccctaaccctgacttccctaattccccccatccttaccaccctcgttaaccctaacaaaaaaaactcatacccccattatgtaaaatccattgtcgcatccacctttattatcagtctcttccccacaacaatattcatgtgcctagaccaagaagttattatctcgaactgacactgagccacaacccaaacaacccagctctccctaagcttcaaactagactacttctccataatattcatccctgtagcattgttcgttacatggtccatcatagagttctcactgtgatatataaactcagacccaaacattaatcagttcttcaaatatctactcattttcctaattaccatactaatcttagttaccgctaacaacctattccaactgttcatcggctgagagggcgtaggaattatatccttcttgctcatcagttgatgatacgcccgagcagatgccaacacagcagccattcaagcaatcctatacaaccgtatcggcgatatcggtttcatcctcgccttagcatgatttatcctacactccaactcatgagacccacaacaaatagcccttctaaacgctaatccaagcctcaccccactactgggcctcctcctagcagcagcaggcaaatcagcccaattaggtctccacccctgactcccctcagccatagaaggccccaccccagtctcagccctactccactcaagcactatagttgtagcaggaatcttcttactcatccgcttccaccccctagcagaaaatagcccactaatccaaactctaacactatgcttaggcgctatcaccactctgttcgcagcagtctgcgcccttacacaaaatgacatcaaaaaaatcgtagccttctccacttcaagtcagctaggactcataatagttacaatcggcatcaaccaaccacacctagcattcctgcacatctgtacccacgccttcttcaaagccatactatttatgtgctccgggtccatcatccacaaccttaacaatgaacaagatattcgaaaaataggaggactactcaaaaccatacctctcacttcaacctccctcaccattggcagcctagcattagcaggaatacctttcctcacaggtttctactccaaagaccacatcatcgaaaccgcaaacatatcatacacaaacgcctgagccctatctattactctcatcgctacctccctgacaagcgcctatagcactcgaataattcttctcaccctaacaggtcaacctcgcttccccacccttactaacattaacgaaaataaccccaccctactaaaccccattaaacgcctggcagccggaagcctattcgcaggatttctcattactaacaacatttcccccgcatcccccttccaaacaacaatccccctctacctaaaactcacagccctcgctgtcactttcctaggacttctaacagccctagacctcaactacctaaccaacaaacttaaaataaaatccccactatgcacattttatttctccaacatactcggattctaccctagcatcacacaccgcacaatcccctatctaggccttcttacgagccaaaacctgcccctactcctcctagacctaacctgactagaaaagctattacctaaaacaatttcacagcaccaaatctccacctccatcatcacctcaacccaaaaaggcataattaaactttacttcctctctttcttcttcccactcatcctaaccctactcctaatcacataacctattcccccgagcaatctcaattacaatatatacaccaacaaacaatgttcaaccagtaactactactaatcaacgcccataatcatacaaagcccccgcaccaataggatcctcccgaatcaaccctgacccctctccttcataaattattcagcttcctacactactaaagtttaccacaaccaccaccccatcatactctttcacccacagcaccaatcctacctccatcgctaaccccactaaaacactcaccaagacctcaacccctgacccccatgcctcaggatactcctcaatagccatcgctgtagtatatccaaagacaaccatcattccccctaaataaattaaaaaaactattaaacccatataacctcccccaaaattcagaataataacacacccgaccacaccgctaacaatcaatactaaacccccataaataggagaaggcttagaagaaaaccccacaaaccccattactaaacccacactcaacagaaacaaagcatacatcattattctcgcacggactacaaccacgaccaatgatatgaaaaaccatcgttgtatttcaactacaagaacaccaatgaccccaatacgcaaaattaaccccctaataaaactaattaaccactcattcatcgacctccccaccccatccaacatctccgcatgatgaaacttcggctcactccttggcgcctgcctgatcctccaaatcaccacaggactattcctagccatgcactactcaccagacgcctcaaccgccttttcatcaatcgcccacatcactcgagacgtaaattatggctgaatcatccgctaccttcacgccaatggcgcctcaatattctttatctgcctcttcctacacatcggacgaggcctatattacggatcatttctctactcagaaacctgaaacatcggcattatcctcctgcttgcaactatagcaacagccttcataggctatgtcctcccgtgaggccaaatatcattctgaggggccacagtaattacaaacttactatccgccatcccatacattgggacagacctagttcaatgaatctgaggaggctactcagtagacagtcccaccctcacacgattctttacctttcacttcatcttacccttcattattgcagccctagcagcactccacctcctattcttgcacgaaacgggatcaaacaaccccctaggaatcacctcccattccgataaaatcaccttccacccttactacacaatcaaagacgccctcggcttacttctcttccttctctccttaatgacattaacactattctcacctgacctcctaggcgacccagacaattataccctagccaaccccttaaacacccctccccacatcaagcccgaatgatatttcctattcgcctacacaattctccgatccgtccctaacaaactaggaggcgtccttgccctattactatccatcctcatcctagcaataatccccatcctccatatatccaaacaacaaagcataatatttcgcccactaagccaatcactttattgactcctagccgcagacctcctcattctaacctgaatcggaggacaaccagtaagctacccttttaccatcattggacaagtagcatccgtactatacttcacaacaatcctaatcctaataccaactatctccctaattgaaaacaaaatactcaaatgggcctgtccttgtagtataaactaatacaccagtcttgtaaaccggaaatgaaaacctttttccaaggacaaatcagagaaaaagtctttaactccaccattagcacccaaagctaagattctaatttaaactattctctgttctttcatggggaagcagatttgggtaccacccaagtattgactcacccatcaacaaccgctatgtatttcgtacattactgcccgccaccatgaatattgtacggtaccataaatacttgaccacctgtagtacataaaaacccaatccacatcaaaaccccctccccatgcttacaagcaagtacagcaatcaaccttcaactatcacacatcaactgcaactccaaagccacccctcacccactaggataccaacaaacctacccaccctcaacagtacatagtacataaagccattcatcgtacatagcacattacagtcaaatcccttctcgtccccatggatgacccccctcagataggggtcccttgaccaccatcctccgtgaaatcaatatcccgcacaagagtgctactctcctcgctccgggcccataacacttgggggtagctaaagtgaactgtatccgacatctggttcctacttcagggtcataaagcctaaatagcccacacgttccccttaaataagacatcacgatg

SEQ ID NO: 185 - DNA, 16569 bp, Homo sapiens mitochondrial
  3107: "n" refers to a nucleotide at position 3107 of the Cambridge Reference Sequence (CRS, Anderson et al. 1981 Nature 290:457-465), later determined to be absent from the human mtDNA sequence according to the revised CRS (rCRS, Andrews et al. 1999 Nature Genetics 23:147); "n" therefore represents a single nucleotide deletion at a position corresponding to nucleotide 3107 of SEQ ID NO:1 as provided herein.
gatcacaggtctatcaccctattaaccactcacgggagctctccactgcatttggtattttcgtttggggggtgtgcacgcgatagcattgcgagacgctggagccggagcaccctatgtcgcagtatctgtctttgattcctgccccatcccgttatttatcgcacctacgttcaatattacaggcgaacatacttactaaagtgtgttaattaattaatgcttgtaggacatagtaataacaattgaatgtctgcacagccgctttccacacagacatcataacaaaaaatttccaccaaaccccccctcccccgccttctggccacagcacttaaacacatctctgccaaaccccaaaaacaaagaaccctaacaccagcctaaccagatttcaaattttatcttttggcggtatgcacttttaacagtcaccccccaactaacacattattttcccctcccactcccatactactaatctcatcaatacaacccccgcccatcctacccagcacacacaccgctgctaaccccataccccgaaccaaccaaaccccaaagacaccccccacagtttatgtagcttacctcctcaaagcaatacactgaaaatgtttagacgggctcacatcaccccataaacaaataggtttggtcctggcctttctattagctcttagtaagattacacatgcaagcatccccgttccagtgagttcaccctctaaatcaccacgatcaaaagggacaagcatcaagcacgcagcaatgcagctcaaaacgcttagcctagccacacccccacgggaaacagcagtgattaacctttagcaataaacgaaagtttaactaagctatactaaccccagggttggtcaatttcgtgccagccaccgcggtcacacgattaacccaagtcaatagaagccggcgtaaagagtgttttagatcaccccctccccaataaagctaaaacccacctgagttgtaaaaaactccagttgacacaaaatagactacgaaagtggctttaacatatctgaacacacaatagctaagacccaaactgggattagataccccactatgcttagccctaaacctcaacagttaaatcaacaaaactgctcgccagaacactacgagccacagcttaaaactcaaaggacctggcggtgcttcatatccctctagaggagcctgttctgtaatcgataaaccccgatcaacctcaccacctcttgctcagcctatataccgccatcttcagcaaaccctgatgaaggctacaaagtaagcgcaagtacccacgtaaagacgttaggtcaaggtgtagcccatgaggtggcaagaaatgggctacattttctaccccagaaaactacgatagcccttatgaaacttaagggtcgaaggtggatttagcagtaaactgagagtagagtgcttagttgaacagggccctgaagcgcgtacacaccgcccgtcaccctcctcaagtatacttcaaaggacatttaactaaaacccctacgcatttatatagaggagacaagtcgtaacatggtaagtgtactggaaagtgcacttggacgaaccagagtgtagcttaacacaaagcacccaacttacacttaggagatttcaacttaacttgaccgctctgagctaaacctagccccaaacccactccaccttactaccagacaaccttagccaaaccatttacccagataaagtataggcgatagaaattgaaacctggcgcaatagatatagtaccgcaagggaaagatgaaaaattataaccaagcataatatagcaaggactaacccctataccttctgcataatgaattaactagaaataactttgcaaggagagccaaagctaagacccccgaaaccagacgagctacctaagaacagctaaaagagcacacccgtctatgtagcaaaatagtgggaagatttataggtagaggcgacaaacctaccgagcctggtgatagctggttgtccaagatagaatcttagttcaactttaaatttgcccacagaaccctctaaatccccttgtaaatttaactgttagtccaaagaggaacagctctttggacactaggaaaaaaccttgtagagagagtaaaaaatttaacacccatagtaggcctaaaagcagccaccaattaagaaagcgttcaagctcaacacccactacctaaaaaatcccaaacatataactgaactcctcacacccaattggaccaatctatcaccctatagaagaactaatgttagtataagtaacatgaaaacattctcctccgcataagcctgcgtcagattaaaacactgaactgacaattaacagcccaatatctacaatcaaccaacaagtcattattaccctcactgtcaacccaacacaggcatgctcataaggaaaggttaaaaaaagtaaaaggaactcggcaaatcttaccccgcctgtttaccaaaaacatcacctctagcatcaccagtattagaggcaccgcctgcccagtgacacatgtttaacggccgcggtaccctaaccgtgcaaaggtagcataatcacttgttccttaaatagggacctgtatgaatggctccacgagggttcagctgtctcttacttttaaccagtgaaattgacctgcccgtgaagaggcgggcatgacacagcaagacgagaagaccctatggagctttaatttattaatgcaaacagtacctaacaaacccacaggtcctaaactaccaaacctgcattaaaaatttcggttggggcgacctcggagcagaacccaacctccgagcagtacatgctaagacttcaccagtcaaagcgaactactatactcaattgatccaataacttgaccaacggaacaagttaccctagggataacagcgcaatcctattctagagtccatatcaacaatagggtttacgacctcgatgttggatcaggacatcccgatggtgcagccgctattaaaggttcgtttgttcaacgattaaagtcctacgtgatctgagttcagaccggagtaatccaggtcggtttctatctacnttcaaattcctccctgtacgaaaggacaagagaaataaggcctacttcacaaagcgccttcccccgtaaatgatatcatctcaacttagtattatacccacacccacccaagaacagggtttgttaagatggcagagcccggtaatcgcataaaacttaaaactttacagtcagaggttcaattcctcttcttaacaacatacccatggccaacctcctactcctcattgtacccattctaatcgcaatggcattcctaatgcttaccgaacgaaaaattctaggctatatacaactacgcaaaggccccaacgttgtaggcccctacgggctactacaacccttcgctgacgccataaaactcttcaccaaagagcccctaaaacccgccacatctaccatcaccctctacatcaccgccccgaccttagctctcaccatcgctcttctactatgaacccccctccccatacccaaccccctggtcaacctcaacctaggcctcctatttattctagccacctctagcctagccgtttactcaatcctctgatcagggtgagcatcaaactcaaactacgccctgatcggcgcactgcgagcagtagcccaaacaatctcatatgaagtcaccctagccatcattctactatcaacattactaataagtggctcctttaacctctccacccttatcacaacacaagaacacctctgattactcctgccatcatgacccttggccataatatgatttatctccacactagcagagaccaaccgaacccccttcgaccttgccgaaggggagtccgaactagtctcaggcttcaacatcgaatacgccgcaggccccttcgccctattcttcatagccgaatacacaaacattattataataaacaccctcaccactacaatcttcctaggaacaacatatgacgcactctcccctgaactctacacaacatattttgtcaccaagaccctacttctaacctccctgttcttatgaattcgaacagcatacccccgattccgctacgaccaactcatacacctcctatgaaaaaacttcctaccactcaccctagcattacttatatgatatgtctccatacccattacaatctccagcatcccccctcaaacctaagaaatatgtctgataaaagagttactttgatagagtaaataataggagcttaaacccccttatttctaggactatgagaatcgaacccatccctgagaatccaaaattctccgtgccacctatcacaccccatcctaaagtaaggtcagctaaataagctatcgggcccataccccgaaaatgttggttatacccttcccgtactaattaatcccctggcccaacccgtcatctactctaccatctttgcaggcacactcatcacagcgctaagctcgcactgattttttacctgagtaggcctagaaataaacatgctagcttttattccagttctaaccaaaaaaataaaccctcgttccacagaagctgccatcaagtatttcctcacgcaagcaaccgcatccataatccttctaatagctatcctcttcaacaatatactctccggacaatgaaccataaccaatactaccaatcaatactcatcattaataatcataatggctatagcaataaaactaggaatagccccctttcacttctgagtcccagaggttgcccaaggcacccctctgacatccggcctgcttcttctcacatgacaaaaactagcccccatctcaatcatataccaaatctctccctcactaaacgtaagccttctcctcactctctcaatcttatccatcatagcaggcagttgaggtggattaaaccaaacccagctacgcaaaatcttagcatactcctcaattacccacataggatgaataatagcagttctaccgtacaaccctaacataaccattcttaatttaactatttatattatcctaactactaccgcattcctactactcaacttaaactccagcaccacgaccctactactatctcgcacctgaaacaagctaacatgactaacacccttaattccatccaccctcctctccctaggaggcctgcccccgctaaccggctttttgcccaaatgggccattatcgaagaattcacaaaaaacaatagcctcatcatccccaccatcatagccaccatcaccctccttaacctctacttctacctacgcctaatctactccacctcaatcacactactccccatatctaacaacgtaaaaataaaatgacagtttgaacatacaaaacccaccccattcctccccacactcatcgcccttaccacgctactcctacctatctccccttttatactaataatcttatagaaatttaggttaaatacagaccaagagccttcaaagccctcagtaagttgcaatacttaatttctgtaacagctaaggactgcaaaaccccactctgcatcaactgaacgcaaatcagccactttaattaagctaagcccttactagaccaatgggacttaaacccacaaacacttagttaacagctaagcaccctaatcaactggcttcaatctacttctcccgccgccgggaaaaaaggcgggagaagccccggcaggtttgaagctgcttcttcgaatttgcaattcaatatgaaaatcacctcggagctggtaaaaagaggcctaacccctgtctttagatttacagtccaatgcttcactcagccattttacctcacccccactgatgttcgccgaccgttgactattctctacaaaccacaaagacattggaacactatacctattattcggcgcatgagctggagtcctaggcacagctctaagcctccttattcgagccgagctgggccagccaggcaaccttctaggtaacgaccacatctacaacgttatcgtcacagcccatgcatttgtaataatcttcttcatagtaatacccatcataatcggaggctttggcaactgactagttcccctaataatcggtgcccccgatatggcgtttccccgcataaacaacataagcttctgactcttacctccctctctcctactcctgctcgcatctgctatagtggaggccggagcaggaacaggttgaacagtctaccctcccttagcagggaactactcccaccctggagcctccgtagacctaaccatcttctccttacacctagcaggtgtctcctctatcttaggggccatcaatttcatcacaacaattatcaatataaaaccccctgccataacccaataccaaacgcccctcttcgtctgatccgtcctaatcacagcagtcctacttctcctatctctcccagtcctagctgctggcatcactatactactaacagaccgcaacctcaacaccaccttcttcgaccccgccggaggaggagaccccattctataccaacacctattctgatttttcggtcaccctgaagtttatattcttatcctaccaggcttcggaataatctcccatattgtaacttactactccggaaaaaaagaaccatttggatacataggtatggtctgagctatgatatcaattggcttcctagggtttatcgtgtgagcacaccatatatttacagtaggaatagacgtagacacacgagcatatttcacctccgctaccataatcatcgctatccccaccggcgtcaaagtatttagctgactcgccacactccacggaagcaatatgaaatgatctgctgcagtgctctgagccctaggattcatctttcttttcaccgtaggtggcctgactggcattgtattagcaaactcatcactagacatcgtactacacgacacgtactacgttgtagctcacttccactatgtcctatcaataggagctgtatttgccatcataggaggcttcattcactgatttcccctattctcaggctacaccctagaccaaacctacgccaaaatccatttcactatcatattcatcggcgtaaatctaactttcttcccacaacactttctcggcctatccggaatgccccgacgttactcggactaccccgatgcatacaccacatgaaacatcctatcatctgtaggctcattcatttctctaacagcagtaatattaataattttcatgatttgagaagccttcgcttcgaagcgaaaagtcctaatagtagaagaaccctccataaacctggagtgactatatggatgccccccaccctaccacacattcgaagaacccgtatacataaaatctagacaaaaaaggaaggaatcgaaccccccaaagctggtttcaagccaaccccatggcctccatgactttttcaaaaaggtattagaaaaaccatttcataactttgtcaaagttaaattataggctaaatcctatatatcttaatggcacatgcagcgcaagtaggtctacaagacgctacttcccctatcatagaagagcttatcacctttcatgatcacgccctcataatcattttccttatctgcttcctagtcctgtatgcccttttcctaacactcacaacaaaactaactaatactaacatctcagacgctcaggaaatagaaaccgtctgaactatcctgcccgccatcatcctagtcctcatcgccctcccatccctacgcatcctttacataacagacgaggtcaacgatccctcccttaccatcaaatcaattggccaccaatggtactgaacctacgagtacaccgactacggcggactaatcttcaactcctacatacttcccccattattcctagaaccaggcgacctgcgactccttgacgttgacaatcgagtagtactcccgattgaaacccccattcgtataataattacatcacaagacgtcttgcactcatgagctgtccccacattaggcttaaaaacagatgcaattcccggacgtctaaaccaaaccactttcaccgctacacgaccgggggtatactacggtcaatgctctgaaatctgtggagcaaaccacagtttcatgcccatcgtcctagaattaattcccctaaaaatctttgaaatagggcccgtatttaccctatagcaccccctctaccccctctagagcccactgtaaagctaacttagcattaaccttttaagttaaagattaagagaaccaacacctctttacagtgaaatgccccaactaaatactaccgtatggcccaccataattacccccatactccttacactattcctcatcacccaactaaaaatattaaacacaaactaccacctacctccctcaccaaagcccataaaaataaaaaattataacaaaccctgagaaccaaaatgaacgaaaatctgttcgcttcattcattgcccccacaatcctaggcctacccgccgcagtactgatcattctatttccccctctattgatccccacctccaaatatctcatcaacaaccgactaatcaccacccaacaatgactaatcaaactaacctcaaaacaaatgataaccatacacaacactaaaggacgaacctgatctcttatactagtatccttaatcatttttattgccacaactaacctcctcggactcctgccttactcatttacaccaaccacccaactatctataaacctagccatggccatccccttatgagcgggcgcagtgattataggctttcgctctaagattaaaaatgccctagcccacttcttaccacaaggcacacctacaccccttatccccatactagttattatcgaaaccatcagcctactcattcaaccaatagccctggccgtacgcctaaccgctaacattactgcaggccacctactcatgcacctaattggaagcgccaccctagcaatatcaaccattaaccttccctctacacttatcatcttcacaattctaattctactgactatcctagaaatcgctgtcgccttaatccaagcctacgttttcacacttctagtaagcctctacctgcacgacaacacataatgacccaccaatcacatgcctatcatatagtaaaacccagcccatgacccctaacaggggccctctcagccctcctaatgacctccggcctagccatgtgatttcacttccactccataacgctcctcatactaggcctactaaccaacacactaaccatataccaatgatggcgcgatgtaacacgagaaagcacataccaaggccaccacacaccacctgtccaaaaaggccttcgatacgggataatcctatttattacctcagaagtttttttcttcgcaggatttttctgagccttttaccactccagcctagcccctaccccccaattaggagggcactggcccccaacaggcatcaccccgctaaatcccctagaagtcccactcctaaacacatccgtattactcgcatcaggagtatcaatcacctgagctcaccatagtctaatagaaaacaaccgaaaccaaataattcaagcactgcttattacaattttactgggtctctattttaccctcctacaagcctcagagtacttcgagtctcccttcaccatttccgacggcatctacggctcaacattttttgtagccacaggcttccacggacttcacgtcattattggctcaactttcctcactatctgcttcatccgccaactaatatttcactttacatccaaacatcactttggcttcgaagccgccgcctgatactggcattttgtagatgtggtttgactatttctgtatgtctccatctattgatgagggtcttactcttttagtataaatagtaccgttaacttccaattaactagttttgacaacattcaaaaaagagtaataaacttcgccttaattttaataatcaacaccctcctagccttactactaataattattacattttgactaccacaactcaacggctacatagaaaaatccaccccttacgagtgcggcttcgaccctatatcccccgcccgcgtccctttctccataaaattcttcttagtagctattaccttcttattatttgatctagaaattgccctccttttacccctaccatgagccctacaaacaactaacctgccactaatagttatgtcatccctcttattaatcatcatcctagccctaagtctggcctatgagtgactacaaaaaggattagactgaaccgaattggtatatagtttaaacaaaacgaatgatttcgactcattaaattatgataatcatatttaccaaatgcccctcatttacataaatattatactagcatttaccatctcacttctaggaatactagtatatcgctcacacctcatatcctccctactatgcctagaaggaataatactatcgctgttcattatagctactctcataaccctcaacacccactccctcttagccaatattgtgcctattgccatactagtctttgccgcctgcgaagcagcggtgggcctagccctactagtctcaatctccaacacatatggcctagactacgtacataacctaaacctactccaatgctaaaactaatcgtcccaacaattatattactaccactgacatgactttccaaaaaacacataatttgaatcaacacaaccacccacagcctaattattagcatcatccctctactattttttaaccaaatcaacaacaacctatttagctgttccccaaccttttcctccgaccccctaacaacccccctcctaatactaactacctgactcctacccctcacaatcatggcaagccaacgccacttatccagtgaaccactatcacgaaaaaaactctacctctctatactaatctccctacaaatctccttaattataacattcacagccacagaactaatcatattttatatcttcttcgaaaccacacttatccccaccttggctatcatcacccgatgaggcaaccagccagaacgcctgaacgcaggcacatacttcctattctacaccctagtaggctcccttcccctactcatcgcactaatttacactcacaacaccctaggctcactaaacattctactactcactctcactgcccaagaactatcaaactcctgagccaacaacttaatatggctagcttacacaatagcttttatagtaaagatacctctttacggactccacttatgactccctaaagcccatgtcgaagcccccatcgctgggtcaatagtacttgccgcagtactcttaaaactaggcggctatggtataatacgcctcacactcattctcaaccccctgacaaaacacatagcctaccccttccttgtactatccctatgaggcataattataacaagctccatctgcctacgacaaacagacctaaaatcgctcattgcatactcttcaatcagccacatagccctcgtagtaacagccattctcatccaaaccccctgaagcttcaccggcgcagtcattctcataatcgcccacggacttacatcctcattactattctgcctagcaaactcaaactacgaacgcactcacagtcgcatcataatcctctctcaaggacttcaaactctactcccactaatagctttttgatgacttctagcaagcctcgctaacctcgccttaccccccactattaacctactgggagaactctctgtgctagtaaccacgttctcctgatcaaatatcactctcctacttacaggactcaacatactagtcacagccctatactccctctacatatttaccacaacacaatgaggctcactcacccaccacattaacaacataaaaccctcattcacacgagaaaacaccctcatgttcatacacctatcccccattctcctcctatccctcaaccccgacatcattaccgggttttcctcttgtaaatatagtttaaccaaaacatcagattgtgaatctgacaacagaggcttacgaccccttatttaccgagaaagctcacaagaactgctaactcatgcccccatgtctaacaacatggctttctcaacttttaaaggataacagctatccattggtcttaggccccaaaaattttggtgcaactccaaataaaagtaataaccatgcacactactataaccaccctaaccctgacttccctaattccccccatccttaccaccctcgttaaccctaacaaaaaaaactcatacccccattatgtaaaatccattgtcgcatccacctttattatcagtctcttccccacaacaatattcatgtgcctagaccaagaagttattatctcgaactgacactgagccacaacccaaacaacccagctctccctaagcttcaaactagactacttctccataatattcatccctgtagcattgttcgttacatggtccatcatagaattctcactgtgatatataaactcagacccaaacattaatcagttcttcaaatatctactcattttcctaattaccatactaatcttagttaccgctaacaacctattccaactgttcatcggctgagagggcgtaggaattatatccttcttgctcatcagttgatgatacgcccgagcagatgccaacacagcagccattcaagcaatcctatacaaccgtatcggcgatatcggtttcatcctcgccttagcatgatttatcctacactccaactcatgagacccacaacaaatagcccttctaaacgctaatccaagcctcaccccactactaggcctcctcctagcagcagcaggcaaatcagcccaattaggtctccacccctgactcccctcagccatagaaggccccaccccagtctcagccctactccactcaagcactatagttgtagcaggaatcttcttactcatccgcttccaccccctagcagaaaatagcccactaatccaaactctaacactatgcttaggcgctatcaccactctgttcgcagcagtctgcgcccttacacaaaatgacatcaaaaaaatcgtagccttctccacttcaagtcaactaggactcataatagttacaatcggcatcaaccaaccacacctagcattcctgcacatctgtacccacgccttcttcaaagccatactatttatgtgctccgggtccatcatccacaaccttaacaatgaacaagatattcgaaaaataggaggactactcaaaaccatacctctcacttcaacctccctcaccattggcagcctagcattagcaggaatacctttcctcacaggtttctactccaaagaccacatcatcgaaaccgcaaacatatcatacacaaacgcctgagccctatctattactctcatcgctacctccctgacaagcgcctatagcactcgaataattcttctcaccctaacaggtcaacctcgcttccccacccttactaacattaacgaaaataaccccaccctactaaaccccattaaacgcctggcagccggaagcctattcgcaggatttctcattactaacaacatttcccccgcatcccccttccaaacaacaatccccctctacctaaaactcacagccctcgctgtcactttcctaggacttctaacagccctagacctcaactacctaaccaacaaacttaaaataaaatccccactatgcacattttatttctccaacatactcggattctaccctagcatcacacaccgcacaatcccctatctaggccttcttacgagccaaaacctgcccctactcctcctagacctaacctgactagaaaagctattacctaaaacaatttcacagcaccaaatctccacctccatcatcacctcaacccaaaaaggcataattaaactttacttcctctctttcttcttcccactcatcctaaccctactcctaatcacataacctattcccccgagcaatctcaattacaatatatacaccaacaaacaatgttcaaccagtaactactactaatcaacgcccataatcatacaaagcccccgcaccaataggatcctcccgaatcaaccctgacccctctccttcataaattattcagcttcctacactattaaagtttaccacaaccaccaccccatcatactctttcacccacagcaccaatcctacctccatcgctaaccccactaaaacactcaccaagacctcaacccctgacccccatgcctcaggatactcctcaatagccatcgctgtagtatatccaaagacaaccatcattccccctaaataaattaaaaaaactattaaacccatataacctcccccaaaattcagaataataacacacccgaccacaccgctaacaatcaatactaaacccccataaataggagaaggcttagaagaaaaccccacaaaccccattactaaacccacactcaacagaaacaaagcatacatcattattctcgcacggactacaaccacgaccaatgatatgaaaaaccatcgttgtatttcaactacaagaacaccaatgaccccaatacgcaaaattaaccccctaataaaattaattaaccactcattcatcgacctccccaccccatccaacatctccgcatgatgaaacttcggctcactccttggcgcctgcctgatcctccaaatcaccacaggactattcctagccatgcactactcaccagacgcctcaaccgccttttcatcaatcgcccacatcactcgagacgtaaattatggctgaatcatccgctaccttcacgccaatggcgcctcaatattctttatctgcctcttcctacacatcgggcgaggcctatattacggatcatttctctactcagaaacctgaaacatcggcattatcctcctgcttgcaactatagcaacagccttcataggctatgtcctcccgtgaggccaaatatcattctgaggggccacagtaattacaaacttactatccgccatcccatacattgggacagacctagttcaatgaatctgaggaggctactcagtagacagtcccaccctcacacgattctttacctttcacttcatcttgcccttcattattgcagccctagcagcactccacctcctattcttgcacgaaacgggatcaaacaaccccctaggaatcacctcccattccgataaaatcaccttccacccttactacacaatcaaagacgccctcggcttacttctcttccttctctccttaatgacattaacactattctcaccagacctcctaggcgacccagacaattataccctagccaaccccttaaacacccctccccacatcaagcccgaatgatatttcctattcgcctacacaattctccgatccgtccctaacaaactaggaggcgtccttgccctattactatccatcctcatcctagcaataatccccatcctccatatatccaaacaacaaagcataatatttcgcccactaagccaatcactttattgactcctagccgcagacctcctcattctaacctgaatcggaggacaaccagtaagctacccttttaccatcattggacaagtagcatccgtactatacttcacaacaatcctaatcctaataccaactatctccctaattgaaaacaaaatactcaaatgggcctgtccttgtagtataaactaatacaccagtcttgtaaaccggagatgaaaacctttttccaaggacaaatcagagaaaaagtctttaactccaccattagcacccaaagctaagattctaatttaaactattctctgttctttcatggggaagcagatttgggtaccacccaagtattgactcacccatcaacaaccgctatgtatttcgtacattactgccagtcaccatgaatattgtacggtaccataaatacttgaccacctgtagtacataaaaacccaatccacatcaaaaccccctccccatgcttacaagcaagtacagcaatcaaccttcaactatcacacattaactgcaactccaaagccacccctcacccactaggataccaacaaacctatccacccttaacagtacatagtacataaaaccatttaccgtacatagcacattacagtcaaatcccttctcgcccccatggatgacccccctcagataggggtcccttgaccaccatcctccgtgaaatcaatatcccgcacaagagtgctactctcctcgctccgggcccataacacttgggggtagctaaagtgaactgtatccggcatctggttcctacctcagggtcataaagcctaaatagcccacgcgttccccttaaataagacatcacgatg

SEQ ID NO: 186 - DNA, 16569 bp, Homo sapiens mitochondrial
  3112: "n" refers to a nucleotide at position 3107 of the Cambridge Reference Sequence (CRS, Anderson et al. 1981 Nature 290:457-465), later determined to be absent from the human mtDNA sequence according to the revised CRS (rCRS, Andrews et al. 1999 Nature Genetics 23:147); "n" therefore represents a single nucleotide deletion at a position corresponding to nucleotide 3107 of SEQ ID NO:1 as provided herein.
gatcacaggtctatcaccctattaaccactcacgggagctctccatgcatttggtattttcgtctggggggtgtgcacgcgatagcattgcgagacgctggagccggagcaccctatgtcgcagtatctgtctttgattcctgcctcatcctattattcatcgcacctacgttcaatattacaggcgaacatacctactaaagtgtgttaattaattaatgcttgtaggacataataataacaattgaatgtctgcacagccgctttccacacagacatcataacaaaaaatttccaccaaaccccccctccccccccgcttctggccacagcacttaaacacatctctgccaaaccccaaaaacaaagaaccctaacaccagcctaaccagatttcaaattttatcttttggcggtatgcacttttaacagtcaccccccaactaacacattattttcccctcccactcccatactactaatctcatcaatacaacccccacccatcctacccagcacacacacaccacgctgctaaccccataccccgaaccaaccaaaccccaaagacaccccccacagtttatgtagcttacctcctcaaagcaatacactgaaaatgtttagacgggctcacatcaccccataaacaaataggtttggtcctagcctttctattagctcttagtaagattacacatgcaagcatccccgttccagtgagttcaccctctaaatcaccacgatcaaaagggacaagcatcaagcacgcagcaatgcagctcaaaacgcttagcctagccacacccccacgggaaacagcagtgattagcctttagcaataaacgaaagtttaactaagctatactaaccccagggttggtcaatttcgtgccagccaccgcggtcacacgattaacccaagtcaatagaagccggcgtaaagagtgttttagatcaccccctccccaataaagctaaaactcacctgagttgtaaaaaactccagttgacacaaaatagactacgaaagtggctttaacatatctgaacacacaatagctaagacccaaactgggattagataccccactatgcttagccctaaacctcaacagttaaatcaacaaaactgctcgccagaacactacgagccacagcttaaaactcaaaggacctggcggtgcttcatatccctctagaggagcctgttctgtaatcgataaaccccgatcaacctcaccacctcttgctcagcctatataccgccatcttcagcaaaccctgatgaaggctacaaagtaagcgcaagtacccacgtaaagacgttaggtcaaggtgtagcccatgaggtggcaagaaatgggctacattttctaccccagaaaactacgatagcccttatgaaacttaagggtcgaaggtggatttagcagtaaactgagagtagagtgcttagttgaacagggccctgaagcgcgtacacaccgcccgtcaccctcctcaagtatacttcaaaggacatttaactaaaacccctacgcatttatatagaggagacaagtcgtaacatggtaagtgtactggaaagtgcacttggacgaaccagagtgtagcttaacacaaagcacccaacttacacttaggagatttcaacttaacttgaccgctctgagctaaacctagccccaaacccactccaccttactaccagacaaccttagccaaaccatttacccaaataaagtataggcgatagaaattgaaacctggcgcaatagatatagtaccgcaagggaaagatgaaaaattataaccaagcataatatagcaaggactaacccctataccttctgcataatgaattaactagaaataactttgcaaggagagccaaagctaagacccccgaaaccagacgagctacctaagaacagctaaaagagcacacccgtctatgtagcaaaatagtgggaagatttataggtagaggcgacaaacctaccgagcctggtgatagctggttgtccaagatagaatcttagttcaactttaaatttgcccacagaaccctctaaatccccttgtaaatttaactgttagtccaaagaggaacagctctttggacactaggaaaaaaccttgtagagagagtaaaaaatttaacacccatagtaggcctaaaagcagccaccaattaagaaagcgttcaagctcaacacccactacctaaaaaatcccaaacatataactgaactcctcacacccaattggaccaatctatcaccctatagaagaactaatgttagtataagtaacatgaaaacattctcctccgcataagcctgcgtcagattaaaacactgaactgacaattaacagcccaatatctacaatcaaccaacaagtcattattaccctcactgtcaacccaacacaggcatgctcataaggaaaggttaaaaaaagtaaaaggaactcggcaaatcttaccccgcctgtttaccaaaaacatcacctctagcatcaccagtattagaggcaccgcctgcccagtgacacatgtttaacggccgcggtaccctaaccgtgcaaaggtagcataatcacttgttccttaaatagggacctgtatgaatggctccacgagggttcagctgtctcttacttttaaccagtgaaattgacctgcccgtgaagaggcgggcatgacacagcaagacgagaagaccctatggagctttaatttattaatgcaaacagtacctaacaaacccacaggtcctaaactaccaaacctgcattaaaaatttcggttggggcgacctcggagcagaacccaacctccgagcagtacatgctaagacttcaccagtcaaagcgaactactatactcaattgatccaataacttgaccaacggaacaagttaccctagggataacagcgcaatcctattctagagtccatatcaacaatagggtttacgacctcgatgttggatcaggacatcccgatggtgcagccgctattaaaggttcgtttgttcaacgattaaagtcctacgtgatctgagttcagaccggagtaatccaggtcggtttctatctacnttcaaattcctccctgtacgaaaggacaagagaaataaggcctacttcacaaagcgccttcccccgtaaatgatatcatctcaacttagtattatacccacacccacccaagaacagggtttgttaagatggcagagcccggtaatcgcataaaacttaaaactttacagtcagaggttcaattcctcttcttaacaacatacccatggccaacctcctactcctcattgtacccattctaatcgcaatggcattcctaatgcttaccgaacgaaaaattctaggctatatacaactacgcaaaggccccaacgttgtaggcccctacgggctactacaacccttcgctgacgccataaaactcttcaccaaagagcccctaaaacccgccacatctaccatcaccctctacatcaccgccccgaccttagctctcaccgtcgctcttctactatgaacccccctccccatacccaaccccctggtcaacctcaacctaggcctcctatttattctagccacctctagcctagccgtttactcaatcctctgatcagggtgagcatcaaactcaaactacgccctgatcggcgcactgcgagcagtagcccaaacaatctcatatgaagtcaccctagccatcattctactatcaacattactaataagtggctcctttaacctctccacccttatcacaacacaagaacacctctgattactcctgccatcatgacccttggccataatatgatttatctccacactagcagagaccaaccgaacccccttcgaccttgccgaaggggagtccgaactagtctcaggcttcaacatcgaatacgccgcaggccccttcgccctattcttcatagccgaatacacaaacattattataataaacaccctcaccactacaatcttcctaggaacaacatatgacgcactctcccctgaactctacacaacatattttgtcaccaagaccctacttctaacctccctgttcttatgaattcgaacagcatacccccgattccgctacgaccaactcatacacctcctatgaaaaaacttcctaccactcaccctagcattacttatatgatatgtctccatacccattacaatctccagcattccccctcaaacctaagaaatatgtctgataaaagagttactttgatagagtaaataataggagcttaaacccccttatttctaggactatgagaatcgaacccatccctgagaatccaaaattctccgtgccacctatcacaccccatcctaaagtaaggtcagctaaataagctatcgggcccataccccgaaaatgttggttatacccttcccgtactaattaatcccctggcccaacccgtcatctactctaccatctttgcaggcacactcatcacagcgctaagctcgcactgattttttacctgagtaggcctagaaataaacatgctagcttttattccagttctaaccaaaaaaataaaccctcgttccacagaagctgccatcaagtatttcctcacgcaagcaaccgcatccataatccttctaatagctatcctcttcaacaatatactctccggacaatgaaccataaccaatactaccaatcaatactcatcattaataatcataatggctatagcaataaaactaggaatagccccctttcacttctgagtcccagaagttacccaaggcacccctctgacatccggcctgcttcttctcacatgacaaaaactagcccccatctcaatcatataccaaatctctccctcactaaacgtaagccttctcctcactctctcaatcttatccatcatagcaggcagttgaggtggactaaaccaaacccagctacgcaaaatcttagcatactcctcaattacccacataggatgaataatagcagttctaccgtacaaccctaacataaccattcttaatttaactatttatattatcctaactactaccgcattcctactactcaacttaaactccagcaccacgaccctactactatctcgcacctgaaacaagctaacatgactaacacccttaattccatccaccctcctctccctaggaggcctgcccccgctaaccggctttttgcccaaatgggccattatcgaagaattcacaaaaaacaatagcctcatcatccccaccatcatagccaccatcaccctccttaacctctacttctacctacgcctaatctactccacctcaatcacactactccccatatctaacaacgtaaaaataaaatgacagtttgaacatacaaaacccaccccattcctccccacactcatcgcccttaccacgctactcctacctatctccccttttatactaataatcttatagaaatttaggttaaatacagaccaagagccttcaaagccctcagtaagttgcaatacttaatttctgtaacagctaaggactgcaaaaccccactctgcatcaactgaacgcaaatcagccactttaattaagctaagcccttactagaccaatgggacttaaacccacaaacacttagttaacagctaagcaccctaatcaactggcttcaatctacttctcccgccgccgggaaaaaaggcgggagaagccccggcaggtttgaagctgcttcttcgaatttgcaattcaatatgaaaatcacctcggagctggtaaaaagaggcctaacccctgtctttagatttacagtccaatgcttcactcagccattttacctcacccccacccctgatgttcgccgaccgttgactattctctacaaaccacaaagacattggaacactatacctattattcggcgcatgagctggagtcctaggcacagctctaagcctccttattcgagccgagctgggccagccaggcaaccttctaggtaacgaccacatctacaacgttatcgtcacagcccatgcatttgtaataatcttcttcatagtaatacccatcataatcggaggctttggcaactgactagttcccctaataatcggtgcccccgatatggcgtttccccgcataaacaacataagcttctgactcttacctccctctctcctactcctgctcgcatctgctatagtggaggccggagcaggaacaggttgaacagtctaccctcccttagcagggaactactcccaccctggagcctccgtagacctaaccatcttctccttacacctagcaggtgtctcctctatcttaggggccatcaatttcatcacaacaattatcaatataaaaccccctgccataacccaataccaaacgcccctcttcgtctgatccgtcctaattacagcagtcctacttctcctatctctcccagtcctagctgctggcatcactatactactaacagaccgcaacctcaacaccaccttcttcgaccccgccggaggaggagaccccattctataccaacacctattctgatttttcggtcaccctgaagtttatattcttatcctaccaggcttcggaataatctcccatattgtaacttactactccggaaaaaaagaaccatttggatacataggtatggtctgagctatgatatcaattggcttcctaggatttatcgtgtgagcacaccatatatttacagtaggaatagacgtagacacacgagcatatttcacctccgctaccataatcatcgctatccccaccggcgtcaaagtatttagctgactcgccacactccacggaagcaatatgaaatgatctgctgcagtgctctgagccctaggattcatctttcttttcaccgtaggtggcctgactggcattgtattagcaaactcatcactagacatcgtactacacgacacgtactacgttgtagctcacttccactatgtcctatcaataggagctgtatttgccatcataggaggcttcattcactgatttcccctattctcaggctacaccctagaccaaacctacgccaaaatccatttcactatcatattcatcggcgtaaatctaactttcttcccacaacactttctcggcctatccggaatgccccgacgttactcggactaccccgatgcatacaccacatgaaacatcctatcatctgtaggctcattcatttctctaacagcagtaatattaataattttcatgatttgagaagccttcgcttcgaagcgaaaagtcctaatagtagaagaaccctccataaacctggagtgactatatggatgccccccaccctaccacacattcgaagaacccgtatacataaaatctagacaaaaaaggaaggaatcgaaccccccaaagctggtttcaagccaaccccatggcctccatgactttttcaaaaaggtattagaaaaaccatttcataactttgtcaaagttaaattataggctaaatcctatatatcttaatggcacatgcagcgcaagtaggtctacaagacgctacttcccctatcatagaagagcttatcacctttcatgatcacgccctcataatcattttccttatctgcttcctagtcctgtatgcccttttcctaacactcacaacaaaactaactaatactaacatctcagacgctcaggaaatagaaaccgtctgaactatcctgcccgccatcatcctagtcctcatcgccctcccatccctacgcatcctttacataacagacgaggtcaacgatccctcccttaccatcaaatcaattggccaccaatggtactgaacctacgagtacaccgactacggcggactaatcttcaactcctacatacttcccccattattcctagaaccaggcgacctgcgactccttgacgttgacaatcgagtagtactcccgattgaagcccccattcgtataataattacatcacaagacgtcttgcactcatgagctgtccccacattaggcttaaaaacagatgcaattcccggacgtctaaaccaaaccactttcaccgctacacgaccgggggtatactacggtcaatgctctgaaatctgtggagcaaaccacagtttcatgcccatcgtcctagaattaattcccctaaaaatctttgaaatagggcccgtatttaccctatagcaccccctctagagcccactgtaaagctaacttagcattaaccttttaagttaaagattaagagaaccaacacctctttacagtgaaatgccccaactaaatactaccgtatggcccaccataattacccccatactccttacactattcctcatcacccaactaaaaatattaaacacaaactaccacctacctccctcaccaaagcccataaaaataaaaaattataacaaaccctgagaaccaaaatgaacgaaaatctgttcgcttcattcattgcccccacaatcctaggcctacccgccgcagtactgatcattctatttccccctctattgatccccacctccaaatatctcatcgacaaccgactaatcaccacccaacaatgactaatcaaactaacctcaaaacaaatgataaccatacacaacactaaaggacgaacctgatctcttatactagtatccttaatcatttttattgccacaactaacctcctcggactcctgcctcactcatttacaccaaccacccaactatctataaacctagccatggccatccccttatgagcgggcgcagtgattataggctttcgctctaagattaaaaatgccctagcccacttcttaccacaaggcacacctacaccccttatccccatactagttattatcgaaaccatcagcctactcattcaaccaatagccctggccgtacgcctaaccgctaacattactgcaggccacctactcatgcacctaattggaagcgccaccctagcaatatcaaccattaaccttccctctacacttatcatcttcacaattctaattctactgactatcctagaaatcgctgtcgccttaatccaagcctacgttttcacacttctagtaagcctctacctgcacgacaacacataatgacccaccaatcacatgcctatcatatagtaaaacccagcccatgacccctaacaggggccctctcagccctcctaatgacctccggcctagccatgtgatttcacttccactccataacgctcctcatactaggcctactaaccaacacactaaccatataccaatgatggcgcgatgtaacacgagaaagcacataccaaggccaccacacaccacctgtccaaaaaggccttcgatacgggataatcctatttattacctcagaagtttttttcttcgcaggatttttctgagccttttaccactccagcctagcccctaccccccaattaggagggcactggcccccaacaggcatcaccccgctaaatcccctagaagtcccactcctaaatacatccgtattactcgcatcaggagtatcaatcacctgagctcaccatagtctaatagaaaacaaccgaaaccaaataattcaagcactgcttattacaattttactgggtctctattttaccctcctacaagcctcagagtacttcgagtctcccttcaccatttccgacggcatctacggctcaacattttttgtagccacaggcttccacggacttcacgtcattattggctcaactttcctcactatctgcttcatccgccaactaatatttcactttacatccaaacatcactttggcttcgaagccgccgcctgatactggcattttgtagatgtggtctgactatttctgtatgtctccatctattgatgagggtcttactcttttagtataaatagtaccgttaacttccaattaactagttttgacaacattcaaaaaagagtaataaacttcgccttaattttaataatcaacaccctcctagccttactactaataattattacattttgactaccacaactcaacggctacatagaaaaatccaccccttacgagtgcggcttcgaccctatatcccccgcccgcgtccctttctccataaaattcttcttagtagctattaccttcttattatttgatctagaaattgccctccttttacccctaccatgagccctacaaacaactaacctgccactaatagttatgtcatccctcttattaatcatcatcctagccctaagtctggcctatgagtgactacaaaaaggattagactgaaccgaattggtatatagtttaaacaaaacgaatgatttcgactcattaaattatgataatcatatttaccaaatgcccctcatttacataaatattatactagcatttaccatctcacttctaggaatactagtatatcgctcacacctcatatcctccctactatgcctagaaggaataatactatcgctgttcattatagctactctcataaccctcaacacccactccctcttagccaatattgtgcctattgccatactagtctttgccgcctgcgaagcagcggtgggcctagccctactagtctcaatctccaacacatatggcctagactacgtacataacctaaacctactccaatgctaaaactaatcgtcccaacaattatattactaccactgacatgactttccaaaaaacacataatttgaatcaacacaaccacccacagcctaattattagcatcatccctctactattttttaaccaaatcaacaacaacctatttagctgttccccaaccttttcctccgaccccctaacaacccccctcctaatactaactacctgactcctacccctcacaatcatggcaagccaacgccacttatccagtgaaccactatcacgaaaaaaactctacctctctatactaatctccctacaaatctccttaattataacattcacagccacagaactaatcatattttatatcttcttcgaaaccacacttatccccaccttggctatcatcacccgatgaggcaaccagtcagaacgcctgaacgcaggcacatacttcctattctacaccctagtaggctcccttcccctactcatcgcactaatttacactcacaacaccctaggctcactaaacattctactactcactctcactgcccaagaactatcaaactcctgagccaacaacttaatatgactagcttacacaatagcttttatagtaaagatacctctttacggactccacttatgactccctaaagcccatgtcgaagcccccatcgctgggtcaatagtacttgccgcagtactcttaaaactaggcggctatggtataatacgcctcacactcattctcaaccccctgacaaaacacatagcctaccccttccttgtactatccctatgaggcataatcataacaagctccatctgcctacgacaaacagacctaaaatcgctcattgcatactcttcaatcagccacatagccctcgtagtaacagccattctcatccaaaccccctgaagcttcaccggcgcagtcattctcataatcgcccacggacttacatcctcattactattctgcctagcaaactcaaactacgaacgcactcacagtcgcatcataatcctctctcaaggacttcaaactctactcccactaatagctttttgatgacttctagcaagcctcgctaacctcgccttaccccccactattaacctactgggagaactctctgtgctagtaaccacgttctcctgatcaaatatcactctcctacttacaggactcaacatactagtcacagccctatactccctctacatatttaccacaacacaatggggctcactcacccaccacattaacaacataaaaccctcattcacacgagaaaacaccctcatgttcatacacctatcccccattctcctcctatccctcaaccccgacatcattaccgggttttcctcttgtaaatatagtttaaccaaaacatcagattgtgaatctgacaacagaggcttacgaccccttatttaccgagaaagctcacaagaactgctaactcatgcccccatgtctaacaacatggctttctcaacttttaaaggataacagctatccattggtcttaggccccaaaaattttggtgcaactccaaataaaagtaataaccatgcacactactataaccaccctaaccctgacttccctaattccccccatccttaccaccctcgttaaccctaacaaaaaaaactcatacccccattatgtaaaatccattgtcgcatccacctttattatcagtctcttccccacaacaatattcatgtgcctagaccaagaagttattatctcgaactgacactgagccacaacccaaacaacccagctctccctaagcttcaaactagactacttctccataatattcatccctgtagcattgttcgttacatggtccatcatagaattctcactgtgatatataaactcagacccaaacattaatcagttcttcaaatatctactcatcttcctaattaccatactaatcttagttaccgctaacaacctattccaactgttcatcggctgagagggcgtaggaattatatccttcttgctcatcagttgatgatacgcccgagcagatgccaacacagcagccattcaagcaatcctatacaaccgtatcggcgatatcggtttcatcctcgccttagcatgatttatcctacactccaactcatgagacccacaacaaatagcccttctaaacgctaatccaagcctcaccccactactaggcctcctcctagcagcagcaggcaaatcagcccaattaggtctccacccctgactcccctcagccatagaaggccccaccccagtctcagccctactccactcaagcactatagttgtagcaggaatcttcttactcatccgcttccaccccctagcagaaaatagcccactaatccaaactctaacactatgcttaggcgctatcaccactctgttcgcagcagtctgcgcccttacacaaaatgacatcaaaaaaatcgtagccttctccacttcaagtcaactaggactcataatagttacaatcggcatcaaccaaccacacctagcattcctgcacatctgtacccacgccttcttcaaagccatactatttatgtgctccgggtccatcatccacaaccttaacaatgaacaagatattcgaaaaataggaggactactcaaaaccatacctctcacttcaacctccctcaccattggcagcctagcattagcaggaatacctttcctcacaggtttctactccaaagaccacatcatcgaaaccgcaaacatatcatacacaaacgcctgagccctatctattactctcatcgctacctccctaacaagcgcctatagcactcgaataattcttctcaccctaacaggtcaacctcgcttccccacccttactaacattaacgaaaataaccccaccctactaaaccccattaaacgcctggcagccggaagcctattcgcaggatttctcattactaacaacatttcccccgcatcccccttccaaacaacaatccccctctacctaaaactcacagccctcgctgtcactttcctaggacttctaacagccctagacctcaactacctaaccaacaaacttaaaataaaatccccactatgcacattttatttctccaacatactcggattctaccctagcatcacacaccgcacaatcccctatctaggccttcttacgagccaaaacctgcccctactcctcctagacctaacctgactagaaaagctattacctaaaacaatttcacagcaccaaatctccacctccatcatcacctcaacccaaaaaggcataattaaactttacttcctctctttcttcttcccactcatcctaaccctactcctaatcacataacctattcccccgagcaatctcaattacaatatatacaccaacaaacaatgttcaaccagtaactactactaatcaacgcccataatcatacaaagcccccgcaccaataggatcctcccgaatcaaccctgacccctctccttcataaattattcagcttcctacactattaaagtttaccacaaccaccaccccatcatactctttcacccacagcaccaatcctacctccatcgctaaccccactaaaacactcaccaagacctcaacccctgacccccatgcctcaggatactcctcaatagccatcgctgtagtatatccaaagacaaccatcattccccctaaataaattaaaaaaactattaaacccatataacctcccccaaaattcagaataataacacacccgaccacaccgctaacaatcaatactaaacccccataaataggagaaggcttagaagaaaaccccacaaaccccattactaaacccacactcaacagaaacaaagcatacatcattattctcgcacggactacaaccacgaccaatgatatgaaaaaccatcgttgtatttcaactacaagaacaccaatgaccccaatacgcaaaattaaccccctaataaaattaattaaccactcattcatcgacctccccaccccatccaacatctccgcatgatgaaacttcggctcactccttggcgcctgcctgatcctccaaatcaccacaggactattcctagccatgcactactcaccagacgcctcaaccgccttttcatcaatcgcccacatcactcgagacgtaaattatggctgaatcatccgctaccttcacgccaatggcgcctcaatattctttatctgcctcttcctacacatcgggcgaggcctatattacggatcatttctctactcagaaacctgaaacatcggcattatcctcctgcttgcaactatagcaacagccttcataggctatgtcctcccgtgaggccaaatatcattctgaggggccacagtaattacaaacttactatccgccatcccatacattgggacagacctagttcaatgaatctgaggaggctactcagtagacagtcccaccctcacacgattctttacctttcacttcatcttgcccttcattattgcagccctagcagcactccacctcctattcttgcacgaaacgggatcaaacaaccccctaggaatcacctcccattccgataaaatcaccttccacccttactacacaatcaaagacgccctcggcttacttctcttccttctctccttaatgacattaacactattctcaccagacctcctaggcgacccagacaattataccctaaccaaccccttaaatacccctccccacatcaagcccgaatgatatttcctattcgcctacacaattctccgatccgtccctaacaaactaggaggcgtccttgccctattactatccatcctcatcctagcaataatccccatcctccatatatccaaacaacaaagcataatatttcgcccactaagccaatcactttattgactcctagccgcagacctcctcattctaacctgaatcggaggacaaccagtaagctacccttttaccatcattggacaagtagcatccgtactatacttcacaacaatcctaatcctaataccaactatctccctaattgaaaacaaaatactcaaatgggcctgtccttgtagtataaactaatacaccagtcttgtaaaccggagatgaaaacctttttccaaggacaaatcagagaaaaagtctttaactccaccattagcacccaaagctaagattctaatttaaactattctctgttctttcatggggaagcagatttgggtaccacccaagtattgactcacccatcaacaaccgctatgtatttcgtacattactgccagccaccatgaatattgtacggtaccataaatacttgaccacctgtagtacataaaaacccaatccacatcaaccccccctccccactgcttacaagcaagtacagcaaccaaccctcaactatcacacattaactgcaactccaaagccacccctcacccactaggataccaacaaacctacccacccttaacagtacatagtacataaagccatttaccgtacatagcacattacagtcaaattccttctcgtccccatggatgacccccctcagataggggtcccttgaccaccatcctccgtgaaatcaatatcccgcacaagagtgctactctcctcgctccgggcccataacacttgggggtagctaaagtgaactgtatccgacatctggttcctacttcagggccataaagcctaaatagcccacacgttccccttaaataagacatcacgatg

SEQ ID NO: 187 - DNA, 16571 bp, Homo sapiens mitochondrial
  3109: "n" refers to a nucleotide at position 3107 of the Cambridge Reference Sequence (CRS, Anderson et al. 1981 Nature 290:457-465), later determined to be absent from the human mtDNA sequence according to the revised CRS (rCRS, Andrews et al. 1999 Nature Genetics 23:147); "n" therefore represents a single nucleotide deletion at a position corresponding to nucleotide 3107 of SEQ ID NO:1 as provided herein.
gatcacaggtctatcaccctattaaccactcacgggagctctccatgcatttggtattttcgtctggggggtgtgcacgcgatagcattgcgagacgctggagccggagcaccctatgtcgcagtatctgtctttgattcctgcctcatcctattatttatcgcacctacgttcaatattacaggcgaacatacttactaaagtgtgttaattaattaatgcttgtaggacataataataacaattgaatgtctgcacagccgctttccacacagacatcataacaaaaaatttccaccaaaccccccctcccccccgcttctggccacagcacttaaacacatctctgccaaaccccaaaaacaaagaaccctaacaccagcctaaccagatttcaaattttatcttttggcggtatgcacttttaacagtcaccccccaactaacacattattttcccctcccactcccatactactaatctcatcaatacaacccccgcccatcctacccagcacacacacaccgctgctaaccccataccccgaaccaaccaaaccccaaagacaccccccacagtttatgtagcttacctcctcaaagcaatacactgaaaatgtttagacgggctcacatcaccccataaacaaataggtttggtcctagcctttctattagctcttagtaagattacacatgcaagcatccccattccagtgagttcaccctctaaatcaccacgatcaaaagggacaagcatcaagcacgcagcaatgcagctcaaaacgcttagcctagccacacccccacgggaaacagcagtgattaacctttagcaataaacgaaagtttaactaagctatactaaccccagggttggtcaatttcgtgccagccaccgcggtcacacgattaacccaagtcaatagaaaccggcgtaaagagtgttttagatcaccccctccccaataaagctaaaactcacctgagttgtaaaaaactccagttgacacaaaatagactacgaaagtggctttaacatatctgaacacacaatagctaagacccaaactgggattagataccccactatgcttagccctaaacctcaacagttaaatcaacaaaactgctcgccagaacactacgagccacagcttaaaactcaaaggacctggcggtgcttcatatccctctagaggagcctgttctgtaatcgataaaccccgatcaacctcaccacctcttgctcagcctatataccgccatcttcagcaaaccctgatgaaggctacaaagtaagcgcaagtacccacgtaaagacgttaggtcaaggtgtagcccatgaggtggcaagaaatgggctacattttctaccccagaaaactacgatagcccttatgaaacttaagggtcgaaggtggatttagcagtaaactgagagtagagtgcttagttgaacagggccctgaagcgcgtacacaccgcccgtcaccctcctcaagtatacttcaaaggacatttaactaaaacccctacgcatttatatagaggagacaagtcgtaacatggtaagtgtactggaaagtgcacttggacgaaccagagtgtagcttaacacaaagcacccaacttacacttaggagatttcaacttaacttgaccgctctgagctaaacctagccccaaacccactccaccttactaccagacaaccttagccaaaccatttacccaaataaagtataggcgatagaaattgaaacctggcgcaatagatatagtaccgcaagggaaagatgaaaaattataaccaagcataatatagcaaggactaacccctataccttctgcataatgaattaactagaaataactttgcaaggagaaccaaagctaagacccccgaaaccagacgagctacctaagaacagctaaaagagcacacccgtctatgtagcaaaatagtgggaagatttataggtagaggcgacaaacctaccgagcctggtgatagctggttgtccaagatagaatcttagttcaactttaaatttgcccacagaaccctctaaatccccttgtaaatttaactgttagtccaaagaggaacagctctttggacactaggaaaaaaccttgtagagagagtaaaaaatttaacacccatagtaggcctaaaagcagccaccaattaagaaagcgttcaagctcaacacccactacctaaaaaatcccaaacatataactgaactcctcacacccaattggaccaatctatcaccctatagaagaactaatgttagtataagtaacatgaaaacattctcctccgcataagcctgcgtcagattaaaacactgaactgacaattaacagcccaatatctacaatcaaccaacaagtcattattaccctcactgtcaacccaacacaggcatgctcataaggaaaggttaaaaaaagtaaaaggaactcggcaaatcttaccccgcctgtttaccaaaaacatcacctctagcatcaccagtattagaggcaccgcctgcccagtgacacatgtttaacggccgcggtaccctaaccgtgcaaaggtagcataatcacttgttccttaaatagggacctgtatgaatggctccacgagggttcagctgtctcttacttttaaccagtgaaattgacctgcccgtgaagaggcgggcatgacacagcaagacgagaagaccctatggagctttaatttattaatgcaaacagtacctaacaaacccacaggtcctaaactaccaaacctgcattaaaaatttcggttggggcgacctcggagcagaacccaacctccgagcagtacatgctaagacttcaccagtcaaagcgaactactatactcaattgatccaataacttgaccaacggaacaagttaccctagggataacagcgcaatcctattctagagtccatatcaacaatagggtttacgacctcgatgttggatcaggacatcccgatggtgcagccgctattaaaggttcgtttgttcaacgattaaagtcctacgtgatctgagttcagaccggagtaatccaggtcggtttctatctacnttcaaattcctccctgtacgaaaggacaagagaaataaggcctacttcacaaagcgccttcccccgtaaatgatatcatctcaacttagtattatacccacacccacccaagaacagggtttgttaagatggcagagcccggtaatcgcataaaacttaaaactttacagtcagaggttcaattcctcttcttaacaacatacccatggccaacctcctactcctcattgtacccattctaatcgcaatggcattcctaatgcttaccgaacgaaaaattctaggctatatacaactacgcaaaggccccaacgttgtaggcccctacgggctactacaacccttcgctgacgccataaaactcttcaccaaagagcccctaaaacccgccacatctaccatcaccctctacatcaccgccccgaccttagctctcaccatcgctcttctactatgaacccccctccccatacccaaccccctggtcaacctcaacctaggcctcctatttattctagccacctctagcctagccgtttactcaatcctctgatcagggtgagcatcaaactcaaactacgccctgatcggcgcactgcgagcagtagcccaaacaatctcatatgaagtcaccctagccatcattctactatcaacattactaataagtggctcctttaacctctccacccttatcacaacacaagaacacctctgattactcctgccatcatgacccttggccataatatgatttatctccacactagcagagaccaaccgaacccccttcgaccttgccgaaggggagtccgaactagtctcaggcttcaacatcgaatacgccgcaggccccttcgccctattcttcatagccgaatacacaaacattattataataaacaccctcaccactacaatcttcctaggaacaacatatgacgcactctcccctgaactctacacaacatattttgtcaccaagaccctacttctaacctccctgttcttatgaattcgaacagcatacccccgattccgctacgaccaactcatacacctcctatgaaaaaacttcctaccactcaccctagcattacttatatgacatgtctccatacccattacaatctccagcattccccctcaaacctaagaaatatgtctgataaaagagttactttgatagagtaaataataggagcttaaacccccttatttctaggactatgagaatcgaacccatccctgagaatccaaaattctccgtgccacctatcacaccccatcctaaagtaaggtcagctaaataagctatcgggcccataccccgaaaatgttggttatacccttcccgtactaattaatcccctggcccaacccgtcatctactctaccatctttgcaggcacactcatcacagcgctaagctcgcactgattttttacctgagtaggcctagaaataaacatgctagcttttattccagttctaaccaaaaaaataaaccctcgttccacagaagctgccatcaagtatttcctcacgcaagcaaccgcatccataatccttctaatagctatcctcttcaacaatatactctccggacaatgaaccataaccaatactaccaatcaatactcatcattaataatcataatggctatagcaataaaactaggaatagccccctttcacttctgagtcccagaggttacccaaggcacccctctgacatccggcctgcttcttctcacatgacaaaaactagcccccatctcaatcatataccaaatctctccctcactagacgtaagccttctcctcactctctcaatcttatccatcatagcaggcagttgaggtggattaaaccaaacccagctacgcaaaatcttagcatactcctcaattacccacataggatgaataatagcagttctaccgtacaaccctaacataaccattcttaatttaactatttatattatcctaactactaccgcattcctactactcaacttaaactccagcaccacaaccctactactatctcgcacctgaaacaagctaacatgactaacacccttaattccatccaccctcctctccctaggaggcctgcccccgctaaccggctttttgcccaaatgggccattatcgaagaattcacaaaaaacaatagcctcatcatccccaccatcatagccaccatcaccctccttaacctctacttctacctacgcctaatctactccacctcaatcacactactccccatatctaacaacgtaaaaataaaatgacagtttgaacatacaaaacccaccccattcctccccacactcatcgcccttaccacgctactcctacctatctccccttttatactaataatcttatagaaatttaggttaaatacagaccaagagccttcaaagccctcagtaagttgcaatacttaatttctgtaacagctaaggactgcaaaaccccactctgcatcaactgaacgcaaatcagccactttaattaagctaagcccttactagaccaatgggacttaaacccacaaacacttagttaacagctaagcaccctaatcaactggcttcaatctacttctcccgccgccgggaaaaaaggcgggagaagccccggcaggtttgaagctgcttcttcgaatttgcaattcaatatgaaaatcacctcggagctggtaaaaagaggcctaacccctgtctttagatttacagtccaatgcttcactcagccattttacctcacccccactgatgttcgccgaccgttgactattctctacaaaccacaaagacattggaacactatacctattattcggcgcatgagctggagtcctaggcacagctctaagcctccttattcgagccgagctgggccagccaggcaaccttctaggtaacgaccacatctacaacgttatcgtcacagcccatgcatttgtaataatcttcttcatagtaatacccatcataatcggaggctttggcaactgactagttcccctaataatcggtgcccccgatatggcgtttccccgcataaacaacataagcttctgactcttacctccctctctcctactcctgctcgcatctgctatagtggaggccggagcaggaacaggttgaacagtctaccctcccttagcagggaactactcccaccctggagcctccgtagacctaaccatcttctccttacacctagcaggtgtctcctctatcttaggggccatcaatttcatcacaacaattatcaatataaaaccccctgccataacccaataccaaacgcccctcttcgtctgatccgtcctaatcacagcagtcctacttctcctatctctcccagtcctagctgctggcatcactatactactaacagaccgcaacctcaacaccaccttcttcgaccccgccggaggaggagaccccattctataccaacacctattctgatttttcggtcaccctgaagtttatattcttatcctaccaggcttcggaataatctcccatattgtaacttactactccggaaaaaaagaaccatttggatacataggtatggtctgagctatgatatcaattggcttcctagggtttatcgtgtgagcacaccatatatttacagtaggaatagacgtagacacacgagcatatttcacctccgctaccataatcatcgcaatccccaccggcgtcaaagtatttagctgactcgccacactccacggaagcaatatgaaatgatctgctgcagtgctctgagccctaggattcatctttcttttcaccgtaggtggcctgactggcattgtattagcaaactcatcactagacatcgtactacacgacacgtactacgttgtagctcacttccactatgtcctatcaataggagctgtatttgccatcataggaggcttcattcactgatttcccctattctcaggctacaccctagaccaaacctacgccaaaatccatttcactatcatattcatcggcgtaaatctaactttcttcccacaacactttctcggcctatccggaatgccccgacgttactcggactaccccgatgcatacaccacatgaaacatcctatcatctgtaggctcattcatttctctaacagcagtaatattaataattttcatgatttgagaagccttcgcttcgaagcgaaaagtcctaatagtagaagaaccctccataaacctggagtgactatatggatgccccccaccctaccacacattcgaagaacccgtatacataaaatctagacaaaaaaggaaggaatcgaaccccccaaagctggtttcaagccaaccccatggcctccatgactttttcaaaaaggtattagaaaaaccatttcataactttgtcaaagttaaattataggctaaatcctatatatcttaatggcacatgcagcgcaagtaggtctacaagacgctacttcccctatcatagaagagcttatcacctttcatgatcacgccctcataatcattttccttatctgcttcctagtcctgtatgcccttttcctaacactcacaacaaaactaactaatactaacatctcagacgctcaggaaatagaaaccgtctgaactatcctgcccgccatcatcctagtcctcatcgccctcccatccctacgcatcctttacataacagacgaggtcaacgatccctcccttaccatcaaatcaattggccaccaatggtactgaacctacgagtacaccgactacggcggactaatcttcaactcctacatacttcccccattattcctagaaccaggcgacctgcgactccttgacgttgacaatcgagtagtactcccgattgaagcccccattcgtataataattacatcacaagacgtcttgcactcatgagctgtccccacattaggcttaaaaacagatgcaattcccggacgtctaaaccaaaccactttcaccgctacacgaccgggggtatactacggtcaatgctctgaaatctgtggagcaaaccacagtttcatgcccatcgtcctagaattaattcccctaaaaatctttgaaatagggcccgtatttaccctatagcaccccctctaccccctctagagcccactgtaaagctaacttagcattaaccttttaagttaaagattaagagaaccaacacctctttacagtgaaatgccccaactaaatactaccgtatggcccaccataattacccccatactccttacactattcctcatcacccaactaaaaatattaaacacaaactaccacctacctccctcaccaaagcccataaaaataaaaaattataacaaaccctgagaaccaaaatgaacgaaaatctgttcgcttcattcattgcccccacaatcctaggcctacccgccgcagtactgatcattctatttccccctctattgatccccacctccaaatatctcatcaacaaccgactaatcaccacccaacaatgactaatcaaactaacctcaaaacaaataataaccatacacaacactaaaggacgaacctgatctcttatactagtatccttaatcatttttattgccacaactaacctcctcggactcctgcctcactcatttacaccaaccacccaactatctataaacctagccatggccatccccttatgagcgggcgcagtgattataggctttcgctctaagattaaaaatgccctagcccacttcttaccacaaggcacacctacaccccttatccccatactagttattatcgaaaccatcagcctactcattcaaccaatagccctggccgtacgcctaaccgctaacattactgcaggccacctactcatgcacctaattggaagcgccaccctagcaatatcaaccattaaccttccctctacacttatcatcttcacaattctaattctactgactatcctagaaatcgctgtcgccttaatccaagcctacgttttcacacttctagtaagcctctacctgcacgacaacacataatgacccaccaatcacatgcctatcatatagtaaaacccagcccatgacccctaacaggggccctctcagccctcctaatgacctccggcctagccatgtgatttcacttccactccataacgctcctcatactaggcctactaaccaacacactaaccatataccaatgatggcgcgatgtaacacgagaaagcacataccaaggccaccacacaccacctgtccaaaaaggccttcgatacgggataatcctatttattacctcagaagtttttttcttcgcaggatttttctgagccttttaccactccagcctagcccctaccccccaattaggagggcactggcccccaacaggcatcaccccgctaaatcccctagaagtcccactcctaaacacatccgtattactcgcatcaggagtatcaatcacctgagctcaccatagtctaatagaaaacaaccgaaaccaaataattcaagcactgcttattacaattttactgggtctctattttaccctcctacaagcctcagagtacttcgagtctcccttcaccatttccgacggcatctacggctcaacattttttgtagccacaggcttccacggacttcacgtcattattggctcaactttcctcactatctgcttcatccgccaactaatatttcactttacatccaaacatcactttggcttcgaagccgccgcctgatactggcattttgtagatgtggtttgactatttctgtatgtctccatctattgatgagggtcttactcttttagtataaatagtaccgttaacttccaattaactagttttgacaacattcaaaaaagagtaataaacttcgccttaattttaataatcaacaccctcctagccttactactaataattattacattttgactaccacaactcaacggctacatagaaaaatccaccccttacgagtgcggcttcgaccctatatcccccgcccgcgtccctttctccataaaattcttcttagtagctattaccttcttattatttgatctagaaattgccctccttttacccctaccatgagccctacaaacaactaacctgccactaatagttatgtcatccctcttattaatcatcatcctagccctaagtctggcctatgagtgactacaaaaaggattagactgaaccgaattggtatatagtttaaacaaaacgaatgatttcgactcattaaattatgataatcatatctaccaaatgcccctcatttacataaatattatactagcatttaccatctcacttctaggaatactagtatatcgctcacacctcatatcctccctactatgcctagaaggaataatactatcgctgttcattatagctactctcataaccctcaacacccactccctcttagccaatattgtgcctattgccatactagtctttgccgcctgcgaagcagcggtgggcctagccctactagtctcaatctccaacacatatggcctagactacgtacataacctaaacctactccaatgctaaaactaatcgtcccaacaattatattactaccactgacatgactttccaaaaaacacataatttgaatcaacacaaccacccacagcctaattattagcatcatccctctactattttttaaccaaatcaacaacaacctatttagctgttccccaaccttttcctccgaccccctaacaacccccctcctaatactaactacctgactcctacccctcacaatcatggcaagccaacgccacttatccagtgaaccactatcacgaaaaaaactctacctctctatactaatctccctacaaatctccttaattataacattcacagccacagaactaatcatattttatatcttcttcgaaaccacacttatccccaccttggctatcatcacccgatgaggcaaccagccagaacgcctgaacgcaggcacatacttcctattctacaccctagtaggctcccttcccctactcatcgcactgatttacactcacaacaccctaggctcactaaacattctactactcactctcactgcccaagaactatcaaactcctgagccaacaacttaatatgactagcttacacaatagcttttatagtaaagatacctctttacggactccacttatgactccctaaagcccatgtcgaagcccccatcgctgggtcaatagtacttgccgcagtactcttaaaactaggcggctatggtataatacgcctcacactcattctcaaccccctgacaaaacacatagcctaccccttccttgtactatccctatgaggcataattataacaagctccatctgcctacgacaaacagacctaaaatcgctcattgcatactcttcaatcagccacatagccctcgtagtaacagccattctcatccaaaccccctgaagcttcaccggcgcagtcattctcataatcgcccacggacttacatcctcattactattctgcctagcaaactcaaactacgaacgcactcacagtcgcatcataatcctctctcaaggacttcaaactctgctcccactaatagctttttgatgacttctagcaagcctcgctaacctcgccttaccccccactattaacctactgggagaactctctgtgctagtaaccacgttctcctgatcaaatatcactctcctacttacaggactcaacatactagtcacagccctatactccctctacatatttaccacaacacaatggggctcactcacccaccacattagcaacataaaaccctcattcacacgagaaaacaccctcatgttcatacacctatcccccattctcctcctatccctcaaccccgacatcattaccgggttttcctcttgtaaatatagtttaaccaaaacatcagattgtgaatctgacaacagaggcttacgaccccttatttaccgagaaagctcacaagaactgctaactcatgcccccatgtctaacaacatggctttctcaacttttaaaggataacagctatccattggtcttaggccccaaaaattttggtgcaactccaaataaaagtaataaccatgcacactactataaccaccctaaccctgacttccctaattccccccatccttaccaccctcgttaaccctaacaaaaaaaactcatacccccattatgtaaaatccattgtcgcatccacctttattatcagtctcttccccacaacaatattcatgtgcctagaccaagaagttattatctcgaactgacactgagccacaacccaaacaacccagctctccctaagcttcaaactagactacttctccataatattcatccctgtagcattgttcgttacatggtccatcatagaattctcactgtgatatataaactcagacccaaacattaatcagttcttcaaatatctactcatcttcctaattaccatactaatcttagttaccgctaacaacctattccaactgttcatcggctgagagggcgtaggaattatatccttcttgctcatcagttgatgatacgcccgagcagatgccaacacagcagccattcaagcaatcctatacaaccgtatcggcgatatcggtttcatcctcgccttagcatgatttatcctacactccaactcatgagacccacaacaaatagcccttctaaacgctaatccaagcctcaccccactactaggcctcctcctagcagcagcaggcaaatcagcccaattaggtctccacccctgactcccctcagccatagaaggccccaccccagtctcagccctactccactcaagcactatagttgtagcaggaatcttcttactcatccgcttccaccccctagcagaaaatagcccactaatccaaactctaacactatgcttaggcgctatcaccactctgttcgcagcagtctgcgcccttacacaaaatgacatcaaaaaaatcgtagccttctccacttcaagtcaactaggactcataatagttacaatcggcatcaaccaaccacacctagcattcctgcacatctgtacccacgccttcttcaaagccatactatttatgtgctccggatccatcatccacaaccttaacaatgaacaagatattcgaaaaataggaggactactcaaaaccatacctctcacttcaacctccctcaccattggcagcctagcattagcaggaatacctttcctcacaggtttctactccaaagaccacatcatcgaaaccgcaaacatatcatacacaaacgcctgagccctatctattactctcatcgctacctccctgacaagcgcctatagcactcgaataattcttctcaccctaacaggtcaacctcgcttccccacccttactaacattaacgaaaataaccccaccctactaaaccccattaaacgcctggcagccggaagcctattcgcaggatttctcattactaacaacatttcccccgcatcccccttccaaacaacaatccccctctacctaaaactcacagccctcgctgtcactttcctaggacttctaacagccctagacctcaactacctaaccaacaaacttaaaataaaatccccactatgcacattttatttctccaacatactcggattctaccctagcatcacacaccgcacaatcccctatctaggccttcttacgagccaaaacctgcccctactcctcctagacctaacctgactagaaaagctattacctaaaacaatttcacagcaccaaatctccacctccatcatcacctcaacccaaaaaggcataattaaactttacttcctctctttcttcttcccactcatcctaaccctactcctaatcacataacctattcccccgagcaatctcaattacaatatatacaccaacaaacaatgttcaaccagtaactactactaatcaacgcccatagtcatacaaagcccccgcaccaataggatcctcccgaatcaaccctgacccctctccttcataaattattcagcttcctacactattaaagtttaccacaaccaccaccccatcatactctttcacccacagcaccaatcctacctccatcgctaaccccactaaaacactcaccaagacctcaacccctgacccccatgcctcaggatactcctcaatagccatcgctgtagtatatccaaagacaaccatcattccccctaaataaattaaaaaaactattaaacccatataacctcccccaaaattcagaataataacacacccgaccacaccgctaacaatcaatactaaacccccataaataggagaaggcttagaagaaaaccccacaaaccccattactaaacccacactcaacagaaacaaagcatacatcattattctcgcacggactacaaccacgaccaatgatatgaaaaaccatcgttgtatttcaactacaagaacaccaatgaccccaatacgcaaaattaaccccctaataaaattaattaaccactcattcatcgacctccccaccccatccaacatctccgcatgatgaaacttcggctcactccttggcgcctgcctgatcctccaaatcaccacaggactattcctagccatacactactcaccagacgcctcaaccgccttttcatcaatcgcccacatcactcgagacgtaaattatggctgaatcatccgctaccttcacgccaatggcgcctcaatattctttatctgcctcttcctacacatcgggcgaggcctatattacggatcatttctctactcagaaacctgaaacatcggcattatcctcctgcttgcaactatagcaacagccttcataggctatgtcctcccgtgaggccaaatatcattctgaggggccacagtaattacaaacttactatccgccatcccatacattgggacagacctagttcaatgaatctgaggaggctactcagtagacagtcccaccctcacacgattctttacctttcacttcatcttgcccttcattattgcagccctagcagcactccacctcctattcttgcacgaaacgggatcaaacaaccccctaggaatcacctcccattccgataaaatcaccttccacccttactacacaatcaaagacgccctcggcttacttctcttcattctctccttaatgacattaacactattctcaccagacctcctaggcgacccagacaattataccctagccaaccccttaaacacccctccccacatcaagcccgaatgatatttcctattcgcctacacaattctccgatccgtccctaacaagctaggaggcgtccttgccctattactatccatcctcatcctagcaataatccccatcctccatatatccaaacaacaaagcataatatttcgcccactaagccaatcactttattgactcctagccgcagacctcctcattctaacctgaatcggaggacaaccagtaagctacccttttaccatcattggacaagtagcatccgtactatacttcacaacaatcctaatcctaataccaactatctccctaattgaaaacaaaatactcaaatgggcctgtccttgtagtataaactaatacaccagtcttgtaaaccgaagatgaaaacctttttccaaggacaaatcagagaaaaagtctttaactccaccattagcacccaaagctaagattctaatttaaactattctctgttctttcatggggaagcagatttgggtaccacccaagtattgactcacccatcaacaaccgctatgtatttcgtacattactgccagccaccatgaatattgcacggtaccataaatacttgaccacctgtagtacataaaaacccaatccacatcaaaaccccctccccatgcttacaagcaagtacagcaatcaaccctcaactatcacacatcaactgcaactccaaagccacccctcacccactaggataccaacaaacctacccatctttaacagcacatagtacataaagccatttaccgtacatagcacattacagtcaaatcccttctcgtccccatggatgacccccctcagataggggtcccttgaccaccatcctccgtgaaatcaatatcccgcacaagagtgctactctcctcgctccgggcccataacacttgggggtagctaaagtgaactgtatccgacatctggttcctacttcagggccataaagcctaaatagcccacacgttccccttaaataagacatcacgatg

SEQ ID NO: 188 - DNA, 16570 bp, Homo sapiens mitochondrial
  3108: "n" refers to a nucleotide at position 3107 of the Cambridge Reference Sequence (CRS, Anderson et al. 1981 Nature 290:457-465), later determined to be absent from the human mtDNA sequence according to the revised CRS (rCRS, Andrews et al. 1999 Nature Genetics 23:147); "n" therefore represents a single nucleotide deletion at a position corresponding to nucleotide 3107 of SEQ ID NO:1 as provided herein.
gatcacaggtctatcaccctattaaccactcacgggagctctccatgcatttggtattttcgtctggggggtgtgcacgcgatagcattgcgagacgctggagccggagcaccctatgtcgcagtatctgtctttgattcctgcctcattctattatttatcgcacctacgttcaatattacaggcgaacatacttactaaagtgtgttaattaattaatgcttgtaggacataataataacaattgaatgtctgcacagccgctttccacacagacatcataacaaaaaatttccaccaaaccccccctcccccgccttctggccacagcacttaaacacatctctgccaaaccccaaaaacaaagaaccctaacaccagcctaaccagatttcaaattttatcttttggcggtatgcacttttaacagtcaccccccaactaacacattattttcccctcccactcccatactactaatctcatcaatacaacccccgcccatcctacccagcatacacacaccgctgctaaccccataccccgaaccaaccaaaccccaaagacaccccccacagtttatgtagcttacctcctcaaagcaatacactgaaaatgtttagacgggctcacatcaccccataaacaaataggtttggtcctagcctttctattagctcttagtaagattacacatgcaagcatccccgttccagtgagttcaccctctaaatcaccacgatcaaaagggacaagcatcaagcacgcagcaatgcagctcaaaacgcttagcctagccacacccccacgggaaacagcagtgattaacctttagcaataaacgaaagtttaactaagctatactaaccccagggttggtcaatttcgtgccagccaccgcggtcacacgattaacccaagtcaatagaagccggcgtaaagagtgttttagatcaccccctccccaataaagctaaaactcacctgagttgtaaaaaactccagttgacacaaaatagactacgaaagtggctttaacatatctgaacacacaatagctaagacccaaactgggattagataccccactatgcttagccctaaacctcaacagttaaatcaacaaaactgctcgccagaacactacgagccacagcttaaaactcaaaggacctggcggtgcttcatatccctctagaggagcctgttctgtaatcgataaaccccgatcaacctcaccacctcttgctcagcctatataccgccatcttcagcaaaccctgatgaaggctacaaagtaagcgcaagtacccacgtaaagacgttaggtcaaggtgtagcccatgaggtggcaagaaatgggctacattttctaccccagaaaactacgatagcccttatgaaacttaagggtcgaaggtggatttagcagtaaactgagagtagagtgcttagttgaacagggccctgaagcgcgtacacaccgcccgtcaccctcctcaagtatacttcaaaggacatttaactaaaacccctacgcatttatatagaggagacaagtcgtaacatggtaagtgtactggaaagtgcacttggacgaaccagagtgtagcttaacacaaagcacccaacttacacttaggagatttcaacttaacttgaccgctctgagctaaacctagccccaaacccactccaccttactaccagacaaccttagccaaaccatttacccaaataaagtataggcgatagaaattgaaacctggcgcaatagatatagtaccgcaagggaaagatgaaaaattataaccaagcataatatagcaaggactaacccctataccttctgcataatgaattaactagaaataactttgcaaggagagccaaagctaagacccccgaaaccagacgagctacctaagaacagctaaaagagcacacccgtctatgtagcaaaatagtgggaagatttataggtagaggcgacaaacctaccgagcctggtgatagctggttgtccaagatagaatcttagttcaactttaaatttgcccacagaaccctctaaatccccttgtaaatttaactgttagtccaaagaggaacagctctttggacactaggaaaaaaccttgtagagagagtaaaaaatttaacacccatagtaggcctaaaagcagccaccaattaagaaagcgttcaagctcaacacccactacctaaaaaatcccaaacatataactgaactcctcacacccaattggaccaatctatcaccctatagaagaactaatgttagtataagtaacatgaaaacattctcctccgcataagcctgcgtcagattaaaacactgaactgacaattaacagcccaatatctacaatcaaccaacaagtcattattaccctcactgtcaacccaacacaggcatgctcataaggaaaggttaaaaaaagtaaaaggaactcggcaaatcttaccccgcctgtttaccaaaaacatcacctctagcatcaccagtattagaggcaccgcctgcccagtgacacatgtttaacggccgcggtaccctaaccgtgcaaaggtagcataatcacttgttccttaaatagggacctgtatgaatggctccacgagggttcagctgtctcttacttttaaccagtgaaattgacctgcccgtgaagaggcgggcatgacacagcaagacgagaagaccctatggagctttaatttattaatgcaaacagtacctaacaaacccacaggtcctaaactaccaaacctgcattaaaaatttcggttggggcgacctcggagcagaacccaacctccgagcagtacatgctaagacttcaccagtcaaagcgaactactatactcaattgatccaataacttgaccaacggaacaagttaccctagggataacagcgcaatcctattctagagtccatatcaacaatagggtttacgacctcgatgttggatcaggacatcccgatggtgcagccgctattaaaggttcgtttgttcaacgattaaagtcctacgtgatctgagttcagaccggagtaatccaggtcggtttctatctacnttcaaattcctccctgtacgaaaggacaagagaaataaggcctacttcacaaagcgccttcccccgtaaatgatatcatctcaacttagcattatacccacacccacccaagaacagggtttgttaagatggcagagcccggtaatcgcataaaacttaaaactttacagtcagaggttcaattcctcttcttaacaacatacccatggccaacctcctactcctcattgtacccattctaatcgcaatggcattcctaatgcttaccgaacgaaaaattctaggctatatacaactacgcaaaggccccaacgttgtaggcccctacgggctactacaacccttcgctgacgccataaaactcttcaccaaagagcccctaaaacccgccacatctaccatcaccctctacatcaccgccccgaccttagctctcaccatcgctcttctactatgaacccccctccccatacccaaccccctggtcaacctcaacctaggcctcctatttattctagccacctctagcctagccgtttactcaatcctctgatcagggtgagcatcaaactcaaactacgccctgatcggcgcactgcgagcagtagcccaaacaatctcatatgaagtcaccctagccatcattctactatcaacattactaataagtggctcctttaacctctccacccttatcacaacacaagaacacctctgattactcctgccatcatgacccttggccataatatgatttatctccacactagcagagaccaaccgaacccccttcgaccttgccgaaggggagtccgaactagtctcaggcttcaacatcgaatacgccgcaggccccttcgccctattcttcatagccgaatacacaaacattattataataaacaccctcaccactacaatcttcctaggaacaacatatgacgcactctcccctgaactctacacaacatattttgtcaccaagaccctacttctaacctccctgttcttatgaattcgaacagcatacccccgattccgctacgaccaactcatacacctcctatgaaaaaacttcctaccactcaccctagcattacttatatgatatgtctccatacccattacaatctccagcattccccctcaaacctaagaaatatgtctgataaaagagttactttgatagagtaaataataggagcttaaacccccttatttctaggactatgagaatcgaacccatccctgagaatccaaaattctccgtgccacctatcacaccccatcctaaagtaaggtcagctaaataagctatcgggcccataccccgaaaatgttggttatacccttcccgtactaattaatcccctggcccaacccgtcatctactctaccatctttgcaggcacactcatcacagcgctaagctcgcactgattttttacctgagtaggcctagaaataaacatgctagcttttattccagttctaaccaaaaaaataaaccctcgttccacagaagctgccatcaagtatttcctcacgcaagcaaccgcatccataatccttctaatagctatcctcttcaacaatatactctccggacaatgaaccataaccaatactaccaatcaatactcatcattaataatcataatggctatagcaataaaactaggaatagccccctttcacttctgagtcccagaggttacccaaggcacccctctgacatccggcctgcttcttctcacatgacaaaaactagcccccatctcaatcatataccaaatctctccctcactaaacgtaagccttctcctcactctctcaatcttatccatcatagcaggcagttgaggtggattaaaccaaacccagctacgcaaaatcttagcatactcctcaattacccacataggatgaataatagcagttctaccgtacaaccctaacataaccattcttaatttaactatttatattatcctaactactaccgcattcctactactcaacttaaactccagcaccacgaccctactactatctcgcacctgaaacaagctaacatgactaacacccttaattccatccaccctcctctccctaggaggcctgcccccgctaaccggctttttgcccaaatgggccattatcgaagaattcacaaaaaacaatagcctcatcatccccaccatcatagccaccatcaccctccttaacctctacttctacctacgcctaatctactccacctcaatcacactactccccatatctaacaacgtaaaaataaaatgacagtttgaacatacaaaacccaccccattcctccccacactcatcgcccttaccacgctactcctacctatctccccttttatactaataatcttatagaaatttaggttaaatacagaccaagagccttcaaagccctcagtaagttgcaatacttaatttctgtaacagctaaggactgcaaaaccccactctgcatcaactgaacgcaaatcagccactttaattaagctaagcccttgctagaccaatgggacttaaacccacaaacacttagttaacagctaagcaccctaatcaactggcttcaatctacttctcccgccgccgggaaaaaaggcgggagaagccccggcaggtttgaagctgcttcttcgaatttgcaattcaatatgaaaatcacctcggagctggtaaaaagaggcctaacccctgtctttagatttacagtccaatgcttcactcagccattttacctcacccccactgatgttcgccgaccgttgactattctctacaaaccacaaagacattggaacactatacctattattcggcgcatgagctggagtcctaggcacagctctaagcctccttattcgagccgagctgggccagccaggcaaccttctaggtaacgaccacatctacaacgttatcgtcacagcccatgcatttgtaataatcttcttcatagtaatacccatcataatcggaggctttggcaactgactagttcccctaataatcggtgcccccgatatggcgtttccccgcataaacaacataagcttctgactcttacctccctctctcctactcctgctcgcatctgctatagtggaggccggagcaggaacaggttgaacagtctaccctcccttagcagggaactactcccaccctggagcctccgtagacctaactatcttctccttacacctagcaggtgtctcctctatcttaggggccatcaatttcatcacaacaattatcaatataaaaccccctgccataacccaataccaaacgcccctcttcgtctgatccgtcctaatcacagcagtcctacttctcctatctctcccagtcctagctgctggcatcactatactactaacagaccgcaacctcaacaccaccttcttcgaccccgccggaggaggagaccccattctataccaacacctattctgatttttcggtcaccctgaagtttatattcttatcctaccaggcttcggaataatctcccatattgtaacttactactccggaaaaaaagaaccatttggatacataggtatggtctgagctatgatatcaattggcttcctagggtttatcgtgtgagcacaccatatatttacagtaggaatagacgtagacacacgagcatatttcacctccgctaccataatcatcgctatccccaccggcgtcaaagtatttagctgactcgccacactccacggaagcaatatgaaatgatctgctgcagtgctctgagccctaggattcatctttcttttcaccgtaggtggcctgactggcattgtattagcaaactcatcactagacatcgtactacacgacacgtactacgttgtagctcacttccactatgtcctatcaataggagctgtatttgccatcataggaggcttcattcactgatttcccctattctcaggctacaccctagaccaaacctacgccaaaatccatttcactatcatattcatcggcgtaaatctaactttcttcccacaacactttctcggcctatccggaatgccccgacgttactcggactaccccgatgcatacaccacatgaaacatcctatcatctgtaggctcattcatttctctaacagcagtaatattaataattttcatgatttgagaagccttcgcttcgaagcgaaaagtcctaatagtagaagaaccctccataaacctggagtgactatatggatgccccccaccctaccacacattcgaagaacccgtatacataaaatctagacaaaaaaggaaggaatcgaaccccccaaagctggtttcaagccaaccccatggcctccatgactttttcaaaaaggtattagaaaaaccatttcataactttgtcaaagttaaattataggctaaatcctatatatcttaatggcacatgcagcgcaagtaggtctacaagacgctacttcccctatcatagaagagcttatcacctttcatgatcacgccctcataatcattttccttatctgcttcctagtcctgtatgcccttttcctaacactcacaacaaaactaactaatactaacatctcagacgctcaggaaatggaaaccgtctgaactatcctgcccgccatcatcctagtcctcatcgccctcccatccctacgcatcctttacataacagacgaggtcaacgatccctcccttaccatcaaatcaattggccaccaatggtactgaacctacgagtacaccgactacggcggactaatcttcaactcctacatacttcccccattattcctagaaccaggcgacctgcgactccttgacgttgacaatcgagtagtactcccgattgaagcccccattcgtataataattacatcacaagacgtcttgcactcatgagctgtccccacattaggcttaaaaacagatgcaattcccggacgtctaaaccaaaccactttcaccgctacacgaccgggggtatactacggtcaatgctctgaaatctgtggagcaaaccacagtttcatgcccatcgtcctagaattaattcccctaaaaatctttgaaatagggcccgtatttaccctatagcaccccctctaccccctctagagcccactgtaaagctaacttagcattaaccttttaagttaaagattaagagaaccaacacctctttacagtgaaatgccccaactaaatactaccgtatggcccaccataattacccccatactccttacactattcctcatcacccaactaaaaatattaaacacaaactaccacctacctccctcaccaaagcccataaaaataaaaaattataacaaaccctgagaaccaaaatgaacgaaaatctgttcgcttcattcattgcccccacaatcctaggcctacccgccgcagtactgatcattctatttccccctctattgatccccacctccaaatatctcatcaacaaccgactaatcaccacccaacaatgactaatcaaactaacctcaaaacaaatgataaccatacacaacactaaaggacgaacctgatctcttatactagtatccttaatcatttttattgccacaactaacctcctcggactcctgcctcactcatttacaccaaccacccaactatctataaacctagccatggccatccccttatgagcgggcgcagtgattataggctttcgctctaagattaaaaatgccctagcccacttcttaccacaaggcacacctacaccccttatccccatactagttattatcgaaaccatcagcctactcattcaaccaatagccctggccgtacgcctaaccgctaacattactgcaggccacctactcatgcacctaattggaagcgccaccctagcaatatcaaccattaaccttccctctacacttatcatcttcacaattctaattctactgactatcctagaaatcgctgtcgccttaatccaagcctacgttttcacacttctagtaagcctctacctgcacgacaacacataatgacccaccaatcacatgcctatcatatagtaaaacccagcccatgacccctaacaggggccctctcagccctcctaatgacctccggcctagccatgtgatttcacttccactccataacgctcctcatactaggcctactaaccaacacactaaccatataccaatgatggcgcgatgtaacacgagaaagcacataccaaggccaccacacaccacctgtccaaaaaggccttcgatacgggataatcctatttattacctcagaaatttttttcttcgcaggatttttctgagccttttaccactccagcctagcccctaccccccaattaggagggcactggcccccaacaggcatcaccccgctaaatcccctagaagtcccactcctaaacacatccgtattactcgcatcaggagtatcaatcacctgagctcaccatagtctaatagaaaacaaccgaaaccaaataattcaagcactgcttattacaattttactgggtctctattttaccctcctacaagcctcagagtacttcgagtctcccttcaccatttccgacggcatctacggctcaacattttttgtagccacaggcttccacggacttcacgtcattattggctcaactttcctcactatctgcttcatccgccaactaatatttcactttacatccaaacatcactttggcttcgaagccgccgcctgatactggcattttgtagatgtggtttgactatttctgtatgtctccatctattgatgagggtcttactcttttagtataaatagtaccgttaacttccaattaactagttttgacaacattcaaaaaagagtaataaacttcgccttaattttaataatcaacaccctcctagccttactactaataattattacattttgactaccacaactcaacggctacatagaaaaatccaccccttacgagtgcggcttcgaccctatatcccccgcccgcgtccctttctccataaaattcttcttagtagctattaccttcttattatttgatctagaaattgccctccttttacccctaccatgagccctacaaacaactaacctgccactaatagttatgtcatccctcttattaatcatcatcctagccctaagtctggcctatgagtgactacaaaaaggattagactgaaccgaattggtatatagtttaaacaaaacgaatgatttcgactcattaaattatgataatcatatttaccaaatgcccctcatttacataaatattatactagcatttaccatctcacttctaggaatactagtatatcgctcacacctcatatcctccctactatgcctagaaggaataatactatcgctgttcattatagctactctcataaccctcaacacccactccctcttagccaatattgtgcctattgccatactagtctttgccgcctgcgaagcagcggtgggcctagccctactagtctcaatctccaacacatatggcctagactacgtacataacctaaacctactccaatgctaaaactaatcgtcccaacaattatattactaccactgacatgactttccaaaaaacacataatttgaatcaacacaaccacccacagcctaattattagcatcatccctctactattttttaaccaaatcaacaacaacctatttagctgttccccaaccttttcctccgaccccctaacaacccccctcctaatactaactacctgactcctacccctcacaatcatggcaagccaacgccacttatccagtgaaccactatcacgaaaaaaactctacctctctatactaatctccctacaaatctccttaattataacattcacagccacagaactaatcatattttatatcttcttcgaaaccacacttatccccaccttggctatcatcacccgatgaggcaaccagccagaacgcctgaacgcaggcacatacttcctattctacaccctagtaggctcccttcccctactcatcgcactaatttacactcacaacaccctaggctcactaaacattctactactcactctcactgcccaagaactatcaaactcctgagccaacaacttaatatgactagcttacacaatagcttttatagtaaagatacctctttacggactccacttatgactccctaaagcccatgtcgaagcccccatcgctgggtcaatagtacttgccgcagtactcttgaaactaggcggctatggtataatacgcctcacactcattctcaaccccctgacaaaacacatagcctaccccttccttgtactatccctatgaggcataattataacaagctccatctgcctacgacaaacagacctaaaatcgctcattgcatactcttcaatcagccacatagccctcgtagtaacagccattctcatccaaaccccctgaagcttcaccggcgcagtcattctcataatcgcccacggacttacatcctcattactattctgcctagcaaactcaaactacgaacgcactcacagtcgcatcataatcctctctcaaggacttcaaactctactcccactaatagctttttgatgacttctagcaagcctcgctaacctcgccttaccccccactattaacctactgggagaactctctgtgctagtaaccacgttctcctgatcaaatatcactctcctacttacaggactcaacatactagtcacagccctatactccctctacatatttaccacaacacaatggggctcactcacccaccacattaacaacataaaaccctcattcacacgagaaaacaccctcatgttcatacacctatcccccattctcctcctatccctcaaccccgacatcattaccgggttttcctcttgtaaatatagtttaaccaaaacatcagattgtgaatctgacaacagaggcttacgaccccttatttaccgagaaagctcacaagaactgctaactcatgcccccatgtctaacaacatggctttctcaacttttaaaggataacagctatccattggtcttaggccccaagaattttggtgcaactccaaataaaagtaataaccatgcacactactataaccaccctaaccctaacttccctaattccccccatccttaccaccctcgttaaccctaacaaaaaaaactcatacccccattatgtaaaatccattgtcgcatccacctttattatcagtctcttccccacaacaatattcatgtgcctagaccaagaagttattatctcgaactgacactgagccacaacccaaacaacccagctctccctaagcttcaaactagactacttctccataatattcatccctgtagcattgttcgttacatggtccatcatagaattctcactgtgatatataaactcagacccaaacattaatcagttcttcaaatatctactcatcttcctaattaccatactaatcttagttaccgctaacaacctattccaactgttcatcggctgagagggcgtaggaattatatccttcttgctcatcagttgatgatacgcccgagcagatgccaacacagcagccattcaagcaatcctatacaaccgtatcggcgatatcggtttcatcctcgccttagcatgatttatcctacactccaactcatgagacccacaacaaatagcccttctaaacgctaatccaagcctcaccccactactaggcctcctcctagcagcagcaggcaaatcagcccaattaggtctccacccctgactcccctcagccatagaaggccccaccccagtctcagccctactccactcaagcactatagttgtagcaggaatcttcttactcatccgcttccaccccctagcagaaaatagcccactaatccaaactctaacactatgcttaggcgctatcaccactctattcgcagcagtctgcgcccttacacaaaatgacatcaaaaaaatcgtagccttctccacttcaagtcaactaggactcataatagttacaatcggcatcaaccaaccacacctagcattcctgcacatctgtacccacgccttcttcaaagccatactatttatgtgctccgggtccatcatccacaaccttaacaatgaacaagatattcgaaaaataggaggactactcaaaaccatacctctcacttcaacctccctcaccattggcagcctagcattagcaggaatacctttcctcacaggtttctactccaaagaccacatcatcgaaaccgcaaacatatcatacacaaacgcctgagccctatctattactctcatcgctacctccctgacaagcgcctatagcactcgaataatccttctcaccctaacaggtcaacctcgcttccccacccttactaacattaacgaaaataaccccaccctactaaaccccattaaacgcctggcagccggaagcctattcgcaggatttctcattactaacaacatttcccccgcatcccccttccaaacaacaatccccctctacctaaaactcacagccctcgctgtcactttcctaggacttctaacagccctagacctcaactacctaaccaacaaacttaaaataaaatccccactatgcacattttatttctccaacatactcggattctaccctagcatcacacaccgcacaatcccctatctaggccttcttacgagccaaaacctgcccctactcctcctagacctaacctgactagaaaagctattacctaaaacaatttcacagcaccaaatctccacctccatcatcacctcaacccaaaaaggcataattaaactttacttcctctctttcttcttcccactcatcctaaccctactcctaatcacataacctattcccccgagcaatctcaattacaatatacacaccaacaaacaatgttcaaccagtaactactactaatcaacgcccataatcatacaaagcccccgcaccaataggatcctcccgaatcaaccctgacccctctccttcataaattattcagcttcctacactattaaagtttaccacaaccaccaccccatcatactctttcacccacagcaccaatcctacctccatcgctaaccccactaaaacactcaccaagacctcaacccctgacccccatgcctcaggatactcctcaatagccatcgctgtagtatatccaaagacaaccatcattccccctaaataaattaaaaaaactattaaacccatataacctcccccaaaattcagaataataacacacccgaccacaccgctaacaatcaatactaaacccccataaataggagaaggcttagaagaaaaccccacaaaccccattactaaacccacactcaacagaaacaaagcatacatcattattctcgcacggactacaaccacgaccaatgatatgaaaaaccatcgttgtatttcaactacaagaacaccaatgaccccaatacgcaaaattaaccccctaataaaattaattaaccactcattcatcgacctccccaccccatccaacatctccgcatgatgaaacttcggctcactccttggcgcctgcctgatcctccaaatcaccacaggactattcctagccatgcactactcaccagacgcctcaaccgccttttcatcaatcgcccacatcactcgagacgtaaattatggctgaatcatccgctaccttcacgccaatggcgcctcaatattctttatctgcctcttcctacacatcgggcgaggcctatattacggatcatttctctactcagaaacctgaaacatcggcattatcctcctgcttgcaactatagcaacagccttcataggctatgtcctcccgtgaggccaaatatcattctgaggggccacagtaattacaaacctactatccgccatcccatacattgggacagacctagttcaatgaatctgaggaggctactcagtagacagtcccaccctcacacgattctttacctttcacttcatcttgcccttcattattgcagccctagcagcactccacctcctattcttgcacgaaacgggatcaaacaaccccctaggaatcacctcccattccgataaaatcaccttccacccttactacacaatcaaagacgccctcggcttacttctcttccttctctccttaatgacattaacactattctcaccagacctcctaggcgacccagacaattataccctagccaaccccttaaacacccctccccacatcaagcccgaatgatatttcctattcgcctacacaattctccgatccgtccctaacaaactaggaggcgtccttgccctattactatccatcctcatcctagcaataatccccatcctccatatatccaaacaacaaagcataatatttcgcccactaagccaatcactttattgactcctagccgcagacctcctcattctaacctgaatcggaggacaaccagtaagctacccttttaccatcattggacaagtagcatccgtactatacttcacaacaatcctaatcctaataccaactatctccctaattgaaaacaaaatactcaaatgggcctgtccttgtagtataaactaatacaccagtcttgtaaaccggagatgaaaacctttttccaaggacaaatcagagaaaaagtctttaactccaccattagcacccaaagctaagattctaatttaaactattctctgttctttcatggggaagcagatttgggtaccacccaagtattgactcacccatcaacaaccgctatgtatttcgtacattactgccagccaccatgaatattgtacggtaccataaatacttgaccacctgtagtacataaaaacccaatctacatcaaaacccccccctcatgcttacaagcaagtacagcaatcaaccctcaactatcacacatcaactgcaactccaaagccacccctcacccattaggataccaacaaacctacccacccttaacagtacatagcacataaagccatttaccgtacatagcacattacagtcaaatcccttctcgtccccatggatgacccccctcagataggggtcccttgaccaccatcctccgtgaaatcaatatcccgcacaagagtgctactctcctcgctccgggcccataacacttgggggtagctaaagtgaactgtatccgacatctggttcctacttcagggtcataaagcctaaatagcccacacgttccccttaaataagacatcacgatg

SEQ ID NO: 189 - DNA, 16568 bp, Homo sapiens mitochondrial; identical to SEQ ID NO: 184
  3106: "n" refers to a nucleotide at position 3107 of the Cambridge Reference Sequence (CRS, Anderson et al. 1981 Nature 290:457-465), later determined to be absent from the human mtDNA sequence according to the revised CRS (rCRS, Andrews et al. 1999 Nature Genetics 23:147); "n" therefore represents a single nucleotide deletion at a position corresponding to nucleotide 3107 of SEQ ID NO:1 as provided herein.

SEQ ID NO: 190 - DNA, 16567 bp, Homo sapiens mitochondrial
  3106: "n" refers to a nucleotide at position 3107 of the Cambridge Reference Sequence (CRS, Anderson et al. 1981 Nature 290:457-465), later determined to be absent from the human mtDNA sequence according to the revised CRS (rCRS, Andrews et al. 1999 Nature Genetics 23:147); "n" therefore represents a single nucleotide deletion at a position corresponding to nucleotide 3107 of SEQ ID NO:1 as provided herein.
gatcacaggtctatcaccctattaaccactcacgggagctctccatgcatttggtattttcgtctggggggtgtgcacgcgatagcattgcgagacgctggagccggagcaccctatgtcgcagtatctgtctttgattcctgcctcatcctattatttatcgcacctacgttcaatattacaggcgaacatacttactaaagtgtgttaattaattaatgcttgtaggacataataataacaattgaatgtctgcacagccgctttccacacagacatcataacaaaaaatttccaccaaaccccccctcccccgccttctggccacagcacttaaacacatctctgccaaaccccaaaaacaaagaaccctaacaccagcctaaccagatttcaaattttatcttttggcggtatgcacttttaacagtcaccccccaactaacacattattttcccctcccactcccatactactaatctcatcaatacaacccccgcccatcctacccagcacacacaccgctgctaaccccataccccgaaccaaccaaaccccaaagacaccccccacagtttatgtagcttacctcctcaaagcaatacactgaaaatgtttagacgggctcacatcaccccataaacaaataggtttggtcctagcctttctattagctcttagtaagattacacatgcaagcatccccgttccagtgagttcaccctctaaatcaccacgatcaaaagggacaagcatcaagcacgcagcaatgcagctcaaaacgcttagcctagccacacccccacgggaaacagcagtgattaacctttagcaataaacgaaagtttaactaagctatactaaccccagggttggtcaatttcgtgccagccaccgcggtcacacgattaacccaagtcaatagaagccggcgtaaagagtgttttagatcaccccctccccaataaagctaaaactcacctgagttgtaaaaaactccagttgacacaaaatagactacgaaagtggctttaacatatctgaacacacaatagctaagacccaaactgggattagataccccactatgcttagccctaaacctcaacagttaaatcaacaaaactgctcgccagaacactacgagccacagcttaaaactcaaaggacctggcggtgcttcatatccctctagaggagcctgttctgtaatcgataaaccccgatcaacctcaccacctcttgctcagcctatataccgccatcttcagcaaaccctgatgaaggctacaaagtaagcgcaagtacccacgtaaagacgttaggtcaaggtgtagcccatgaggtggcaagaaatgggctacattttctaccccagaaaactacgatagcccttatgaaacttaagggtcgaaggtggatttagcagtaaactgagagtagagtgcttagttgaacagggccctgaagcgcgtacacaccgcccgtcaccctcctcaagtatacttcaaaggacatttaactaaaacccctacgcatttatatagaggagacaagtcgtaacatggtaagtgtactggaaagtgcacttggacgaaccagagtgtagcttaacacaaagcacccaacttacacttaggagatttcaacttaacttgaccgctctgagctaaacctagccccaaacccactccaccttactaccagacaaccttagccaaaccatttacccaaataaagtataggcgatagaaattgaaacctggcgcaatagatatagtaccgcaagggaaagatgaaaaattataaccaagcataatatagcaaggactaacccctataccttctgcataatgaattaactagaaataactttgcaaggagagccaaagctaagacccccgaaaccagacgagctacctaagaacagctaaaagagcacacccgtctatgtagcaaaatagtgggaagatttataggtagaggcgacaaacctaccgagcctggtgatagctggttgtccaagatagaatcttagttcaactttaaatttgcccacagaaccctctaaatccccttgtaaatttaactgttagtccaaagaggaacagctctttggacactaggaaaaaaccttgtagagagagtaaaaaatttaacacccatagtaggcctaaaagcagccaccaattaagaaagcgttcaagctcaacacccactacctaaaaaatcccaaacatataactgaactcctcacacccaattggaccaatctatcaccctatagaagaactaatgttagtataagtaacatgaaaacattctcctccgcataagcctgcgtcagattaaaacactgaactgacaattaacagcccaatatctacaatcaaccaacaagtcattattaccctcactgtcaacccaacacaggcatgctcataaggaaaggttaaaaaaagtaaaaggaactcggcaaatcttaccccgcctgtttaccaaaaacatcacctctagcatcaccagtattagaggcaccgcctgcccagtgacacatgtttaacggccgcggtaccctaaccgtgcaaaggtagcataatcacttgttccttaaatagggacctgtatgaatggctccacgagggttcagctgtctcttacttttaaccagtgaaattgacctgcccgtgaagaggcgggcatgacacagcaagacgagaagaccctatggagctttaatttattaatgcaaacagtacctaacaaacccacaggtcctaaactaccaaacctgcattaaaaatttcggttggggcgacctcggagcagaacccaacctccgagcagtacatgctaagacttcaccagtcaaagcgaactactatactcaattgatccaataacttgaccaacggaacaagttaccctagggataacagcgcaatcctattctagagtccatatcaacaatagggtttacgacctcgatgttggatcaggacatcccgatggtgcagccgctattaaaggttcgtttgttcaacgattaaagtcctacgtgatctgagttcagaccggagtaatccaggtcggtttctatctacnttcaaattcctccctgtacgaaaggacaagagaaataaggcctacttcacaaagcgccttcccccgtaaatgatatcatctcaacttagtattatacccacacccacccaagaacagggtttgttaagatggcagagcccggtaatcgcataaaacttaaaactttacagtcagaggttcaattcctcttcttaacaacatacccatggccaacctcctactcctcattgtacccattctaatcgcaatggcattcctaatgcttaccgaacgaaaaattctaggctatatacaactacgcaaaggccccaacgttgtaggcccctacgggctactacaacctttcgctgacgccataaaactcttcaccaaagagcccctaaaacccgccacatctaccatcaccctctacatcaccgccccgaccttagctctcaccatcgctcttctactatgaacccccctccccatacccaaccccctggtcaacctcaacctaggcctcctatttattctagccacctctagcctagccgtttactcaatcctctgatcagggtgagcatcaaactcaaactacgccctgatcggcgcactgcgagcagtagcccaaacaatctcatatgaagtcaccctagccatcattctactatcaacattactaataagtggctcctttaacctctccacccttatcacaacacaagaacacctctgattactcctgccatcatgacccttggccataatatgatttatctccacactagcagagaccaaccgaacccccttcgaccttgccgaaggggagtccgaactagtctcaggcttcaacatcgaatacgccgcaggccccttcgccctattcttcatagccgaatacacaaacattattataataaacaccctcaccactacaatcttcctaggaacaacatatgacgcactctcccctgaactctacacaacatattttgtcaccaagaccctacttctaacctccctgttcttatgaattcgaacagcatacccccgattccgctacgaccaactcatacacctcctatgaaaaaacttcctaccactcaccctagcattacttatatgatatgtctccatacccattacaatctccagcattccccctcaaacctaagaaatatgtctgataaaagagttactttgatagagtaaataataggagcttaaacccccttatttctaggactatgagaatcgaacccatccctgagaatccaaaattctccgtgccacctatcacaccccatcctaaagtaaggtcagctaaataagctatcgggcccataccccgaaaatgttggttatacccttcccgtactaattaatcccctggcccaacccgtcatctactctaccatctttgcaggcacactcatcacagcgctaagctcgcactgattttttacctgagtaggcctagaaataaacatgctagcttttattccagttctaaccaaaaaaataaaccctcgttccacagaagctgccatcaagtatttcctcacgcaagcaaccgcatccataatccttctaatagctatcctcttcaacaatatactctccggacaatgaaccataaccaatactaccaatcaatactcatcattaataatcataatggctatagcaataaaactaggaatagccccctttcacttctgagtcccagaggttacccaaggcacccctctgacatccggcctgcttcttctcacatgacaaaaactagcccccatctcaatcatataccaaatctctccctcactaaacgtaagccttctcctcactctctcaatcttatccatcatagcaggcagttgaggtggattaaaccaaacccagctacgcaaaatcttagcatactcctcaattacccacataggatgaataatagcagttctaccgtacaaccctaacataaccattcttaatttaactatttatattatcctaactactaccgcattcctactactcaacttaaactccagcaccacgaccctactactatctcgcacctgaaacaagctaacatgactaacacccttaattccatccaccctcctctccctaggaggcctgcccccgctaaccggctttttgcccaaatgggccattatcgaagaattcacaaaaaacaatagcctcatcatccccaccatcatagccaccatcaccctccttaacctctacttctacctacgcctaatctactccacctcaatcacactactccccatatctaacaacgtaaaaataaaatgacagtttgaacatacaaaacccaccccattcctccccacactcatcgcccttaccacgctactcctacctatctccccttttatactaataatcttatagaaatttaggttaaatacagaccaagagccttcaaagccctcagtaagttgcaatacttaatttctgtaacagctaaggactgcaaaaccccactctgcatcaactgaacgcaaatcagccactttaattaagctaagcccttactagaccaatgggacttaaacccacaaacacttagttaacagctaagcaccctaatcaactggcttcaatctacttctcccgccgccgggaaaaaaggcgggagaagccccggcagatttgaagctgcttcttcgaatttgcaattcaatatgaaaatcacctcggagctggtaaaaagaggcctaacccctgtctttagatttacagtccaatgcttcactcagccattttacctcacccccactgatgttcgccgaccgttgactattctctacaaaccacaaagacattggaacactatacctattattcggcgcatgagctggagtcctaggcacagctctaagcctccttattcgagccgagctgggccagccaggcaaccttctaggtaacgaccacatctacaacgttatcgtcacagcccatgcatttgtaataatcttcttcatagtaatacccatcataatcggaggctttggcaactgactagttcccctaataatcggtgcccccgatatggcgtttccccgcataaacaacataagcttctgactcttacccccctctctcctactcctgctcgcatctgctatagtggaggccggagcaggaacaggttgaacagtctaccctcccttagcagggaactactcccaccctggagcctccgtagacctaaccatcttctccttacacctagcaggtgtctcctctatcttaggggccatcaatttcatcacaacaattatcaatataaaaccccctgccataacccaataccaaacgcccctcttcgtctgatccgtcctaatcacagcagtcctacttctcctatctctcccagtcctagctgctggcatcactatactactaacagaccgcaacctcaacaccaccttcttcgaccccgccggaggaggagaccccattctataccaacacctattctgatttttcggtcaccctgaagtttatattcttatcctaccaggcttcggaataatctcccatattgtaacttactactccggaaaaaaagaaccatttggatacataggtatggtctgagctatgatatcaattggcttcctagggtttatcgtgtgagcacaccatatatttacagtaggaatagacgtagacacacgagcatatttcacctccgctaccataatcatcgctatccccaccggcgtcaaagtatttagctgactcgccacactccacggaagcaatatgaaatgatctgctgcagtgctctgagccctaggattcatctttcttttcaccgtaggtggcctgactggcattgtattagcaaactcatcactagacatcgtactacacgacacgtactacgttgtagctcacttccactatgtcctatcaataggagctgtatttgccatcataggaggcttcattcactgatttcccctattctcaggctacaccctagaccaaacctacgccaaaatccatttcactatcatattcatcggcgtaaatctaactttcttcccacaacactttctcggcctatccggaatgccccgacgttactcggactaccccgatgcatacaccacatgaaacatcctatcatctgtaggctcattcatttctctaacagcagtaatattaataattttcatgatttgagaagccttcgcttcgaagcgaaaagtcctaatagtagaagaaccctccataaacctggagtgactatatggatgccccccaccctaccacacattcgaagaacccgtatacataaaatctagacaaaaaaggaaggaatcgaaccccccaaagctggtttcaagccaaccccatggcctccatgactttttcaaaaaggtattagaaaaaccatttcataactttgtcaaagttaaattataggctaaatcctatatatcttaatggcacatgcagcgcaagtaggtctacaagatgctacttcccctatcatagaagagcttatcacctttcatgatcacgccctcataatcattttccttatctgcttcctagtcctgtatgcccttttcctaacactcacaacaaaactaactaatactaacatctcagacgctcaggaaatagaaaccgtctgaactatcctgcccgccatcatcctagtcctcatcgccctcccatccctacgcatcctttacataacagacgaggtcaacgatccctcccttaccatcaaatcaattggccaccaatggtactgaacctacgagtacaccgactacggcggactaatcttcaactcctacatacttcccccattattcctagaaccaggcgacctgcgactccttgacgttgacaatcgagtagtactcccgattgaagcccccattcgtataataattacatcacaagacgtcttgcactcatgagctgtccccacattaggcttaaaaacagatgcaattcccggacgtctaaaccaaaccactttcaccgctacacgaccgggggtatactacggtcaatgctctgaaatctgtggagcaaaccacagtttcatgcccatcgtcctagaattaattcccctaaaaatctttgaaatagggcccgtatttaccctatagcaccccctctaccccctctagagcccactgtaaagctaacttagcattaaccttttaagttaaagattaagagaaccaacacctctttacagtgaaatgccccaactaaatactaccgtatggcccaccataattacccccatactccttacactattcctcatcacccaactaaaaatattaaacacaaactaccacctacctccctcaccaaagcccataaaaataaaaaattataacaaaccctgagaaccaaaatgaacgaaaatctgttcgcttcattcattgcccccacaatcctaggcctacccgccgcagtactgatcattctatttccccctctattaatccccacctccaaatatctcatcaacaaccgactaatcaccacccaacaatgactaatcaaactaacctcaaaacaaatgatagccatacacaacactaaaggacgaacctgatctcttatactagtatccttaatcatttttattgccacaactaacctcctcggactcctgcctcactcatttacaccaaccacccaactatctataaacctagccatggccatccccttatgagcgggcgcagtgattataggctttcgctctaagattaaaaatgccctagcccacttcttaccacaaggcacacctacaccccttatccccatactagttattatcgaaaccatcagcctactcattcaaccaatagccctggccgtacgcctaaccgctaacattactgcaggccacctactcatgcacctaattggaagcgccaccctagcaatatcaaccattaaccttccctctacacttatcatcttcacaattctaattctactgactatcctagaaatcgctgtcgccttaatccaagcctacgttttcacacttctagtaagcctctacctgcacgacaacacataatgacccaccaatcacatgcctatcatatagtaaaacccagcccatgacccctaacaggggccctctcagccctcctaatgacctccggcctagccatgtgatttcacttccactccataacgctcctcatactaggcctactaaccaacacactaaccatataccaatgatggcgcgatgtaacacgagaaagcacataccaaggccaccacacaccacctgtccaaaaaggccttcgatatgggataatcctatttattacctcagaagtttttttcttcgcaggatttttctgagccttttaccactccagcctagcccctaccccccaactaggagggcactggcccccaacaggcatcaccccgctaaatcccctagaagtcccactcctaaacacatccgtattactcgcatcaggagtatcaatcacctgagctcaccatagtctaatagaaaacaaccgaaaccaaataattcaagcactgcttattacaattttactgggtctctattttaccctcctacaagcctcagagtacttcgagtctcccttcaccatttccgacggcatctacggctcaacattttttgtagccacaggcttccacggacttcacgtcattattggctcaactttcctcactatctgcttcatccgccaactaatatttcactttacatccaaacatcactttggcttcgaagccgccgcctgatactggcattttgtagatgtggtttgactatttctgtatgtctccatctattgatgagggtcttactcttttagtataaatagtaccgttaacttccaattaactagttttgacaacattcaaaaaagagtaataaacttcgccttaattttaataatcgacaccctcctagccttactactaataattattacattttgactaccacaactcaacggctacatagaaaaatccaccccttacgagtgcggcttcgaccctatatcccccgcccgcgtccctttctccataaaattcttcttagtagctattaccttcttattatttgatctagaaattgccctccttttacccctaccatgagccctacaaacaactaacctgccactaatagttatgtcatccctcttattaatcatcatcctagccctaagtctggcctatgaatgactacaaaaaggattagactgagccgaattggtatatagtttaaacaaaacgaatgatttcgactcattaaattatgataatcatatttaccaaatgcccctcatttacataaatattatactagcatttaccatctcacttctaggaatactagtatatcgctcacacctcatatcctccctactatgcctagaaggaataatactatcgctgttcattatagctactctcataaccctcaacacccactccctcttagccaatattgtgcctattgccatactagtctttgccgcctgcgaagcagcggtgggcctagccctactagtctcaatctccaacacatatggcctagactacgtacataacctaaacctactccaatgctaaaactaatcgtcccaacaattatattactaccactgacatgactttccaaaaaacacataatttgaatcaacacaaccacccacagcctaattattagcatcatccccctactattttttaaccaaatcaacaacaacctatttagctgttccccaaccttttcctccgaccccctaacaacccccctcctaatactaactacctgactcctacccctcacaatcatggcaagccaacgccacttatccagtgaaccactatcacgaaaaaaactctacctctctatactaatctccctacaaatctccttaattataacattcacagccacagaactaatcatattttatatcttcttcgaaaccacacttatccccaccttggctatcatcacccgatgaggcaaccagccagaacgcctgaacgcaggcacatacttcctattctacaccctagtaggctcccttcccctactcatcgcactaatttacactcacaacaccctaggctcactaaacattctactactcactctcactgcccaagaactatcaaactcctgagccaacaacttaatatgactagcttacacaatagcttttatagtaaagatacctctttacggactccacttatgactccctaaagcccatgtcgaagcccccatcgctgggtcaatagtacttgccgcagtactcttaaaactaggcggctatggtataatacgcctcacactcattctcaaccccctgacaaaacacatagcctaccccttccttgtactatccctatgaggcataattataacaagctccatctgcctacgacaaacagacctaaaatcgctcattgcatactcttcaatcagccacatagccctcgtagtaacagccattctcatccaaaccccctgaagcttcaccggcgcagtcattctcataatcgcccacggacttacatcctcattactattctgcctagcaaactcaaactacgaacgcactcacagtcgcatcataatcctctctcaaggccttcaaactctactcccactaatagctttttgatgacttctagcaagcctcgctaacctcgccttaccccccactattaacctactgggagaactctctgtgctagtaaccacgttctcctgatcaaatatcactctcctacttacaggactcaacatactagtcacagccctatactccctctacatatttaccacaacacaatggggctcactcacccaccacattaacaacataaaaccctcattcacacgagaaaacaccctcatgttcatacacctatcccccattctcctcctatccctcaaccccgacatcattaccgggttttcctcttgtaaatatagtttaaccaaaacatcagattgtgaatctgacaacagaggcttacgaccccttatttaccgagaaagctcacaagaactgctaactcatgcccccatgtctaacaacatggctttctcaacttttaaaggataacagctatccattggtcttaggccccaaaaattttggtgcaactccaaataaaagtaataaccatgcacactactataaccaccctaaccctgacttccctaattccccccatccttaccaccctcgttaaccctaacaaaaaaaactcatacccccattatgtaaaatccattgtcgcatccacctttattatcagtctcttccccacaacaatattcatgtgcctagaccaagaagttattatctcgaactgacactgagccacaacccaaacaacccagctctccctaagcttcaaactagactacttctccataatattcatccctgtagcattgttcgttacatggtccatcatagaattctcactgtgatatataaactcagacccaaacattaatcagttcttcaaatatctactcattttcctaattaccatactaatcttagttaccgctaacaacctattccaactgttcatcggctgagagggcgtaggaattatatccttcttgctcatcagttgatgatacgcccgagcagatgccaacacagcagccattcaagcaatcctatacaaccgtatcggcgatatcggtttcatcctcgccttagcatgatttatcctacactccaactcatgagacccacaacaaatagcccttctaaacgctaatccaagcctcaccccactactaggcctcctcctagcagcagcaggcaaatcagcccaattaggtctccacccctgactcccctcagccatagaaggccccaccccagtctcagccctactccactcaagcactatagttgtagcaggagtcttcttactcatccgcttccaccccctagcagaaaatagcccactaatccaaactctaacactatgcttaggcgctatcaccactctgttcgcagcagtctgcgcccttacacaaaatgacatcaaaaaaatcgtagccttctccacttcaagtcaactaggactcataatagttacaatcggcatcaaccaaccacacctagcattcctgcacatctgtacccacgccttcttcaaagccatactatttatgtgctccgggtccatcatccacaaccttaacaatgaacaagatattcgaaaaataggaggactactcaaaaccatacctctcacttcaacctccctcaccattggcagcctagcattagcaggaatacctttcctcacaggtttctactccaaagaccacatcatcgaaaccgcaaacatatcatacacaaacgcctgagccctatctattactctcatcgctacctccctgacaagcgcctatagcactcgaataattcttctcaccctaacaggtcaacctcgcttccccacccttactaacattaacgaaaataaccccaccctactaaaccccattaaacgcctggcagccggaagcctattcgcaggatttctcattactaacaacatttcccccgcatcccccttccaaacaacaatccccctctacctaaaactcacagccctcgctgtcactttcctaggacttctaacagccctagacctcaactacctaaccaacaaacttaaaataaaatccccactatgcacattttatttctccaacatactaggattctaccctagcatcacacaccgcacaatcccctatctaggccttcttacgagccaaaacctgcccctactcctcctagacctaacctgactagaaaagctattacctaaaacaatttcacagcaccaaatctccacctccatcatcacctcaacccaaaaaggcataattaaactttacttcctctctttcttcttcccactcatcctaaccctactcctaatcacataacctattcccccgagcaatctcaattacaatatatacaccaacaaacaatgttcaaccagtaactactactaatcaacgcccataatcatacaaagcccccgcaccaataggatcctcccgaatcaaccctgacccctctccttcataaattattcagcttcctacactattaaagtttaccacaaccaccaccccatcatactctttcacccacagcaccaatcctacctccatcgctaaccccactaaaacactcaccaagacctcaacccctgacccccatgcctcaggatactcctcaatagccatcgctgtagtatatccaaagacaaccatcattccccctaaataaattaaaaaaactattaaacccatataacctcccccaaaattcagaataataacacacccgaccacaccgctaacaatcaatactaaacccccataaataggagaaggcttagaagaaaaccccacaaaccccattactaaacccacactcaacagaaacaaagcatacatcattattctcgcacggactacaaccacgaccaatgatatgaaaaaccatcgttgtatttcaactacaagaacaccaatgaccccaatacgcaaaattaaccccctaataaaattaattaaccactcattcatcgacctccccaccccatccaacatctccgcatgatgaaacttcggctcactccttggcgcctgcctgatcctccaaatcaccacaggactattcctagccatgcactactcaccagacgcctcaaccgccttttcatcaatcgcccacatcactcgagacgtaaattatggctgaatcatccgctaccttcacgccaatggcgcctcaatattctttatctgcctcttcctacacatcgggcgaggcctatattacggatcatttctctactcagaaacctgaaacatcggcattaccctcctgcttgcaactatagcaacagccttcataggctatgtcctcccgtgaggccaaatatcattctgaggggccacagtaattacaaacttactatccgccatcccatacattgggacagacctagttcaatgaatctgaggaggctactcagtagacagtcccaccctcacacgattctttacctttcacttcatcttacccttcattgttgcagccctagcagcactccacctcctattcttgcacgaaacgggatcaaacaaccccctaggaatcacctcccattccgataaaatcaccttccacccttactacacaatcaaagacgccctcggcttacttctcttccttctctccttaatgacattaacactattctcaccagacctcctaggcgacccagacaattataccctagccaaccccttaaacacccctccccacatcaagcccgaatgatatttcctattcgcctacacaattctccgatccgtccctaacaaactaggaggcgtccttgccctattactatccatcctcatcctagcaataatccccatcctccatatatccaaacaacaaagcataatatttcgcccactaagccaatcactttattgactcctagccgcagacctcctcattctaacctgaatcggaggacaaccagtaagctacccttttaccatcattggacaagtagcatccgtactatacttcgcaacaatcctaatcctaataccaactatctccctaattgaaaacaaaatactcaaatgggcctgtccttgtagtataaactaatacaccagtcttgtaaaccggagatgaaaaccttttccaaggacaaatcagagaaaaagtctttaactccaccattagcacccaaagctaagattctaatttaaactattctctgttctttcatggggaagcagatttgggtaccacccaagtattgactcacccatcaacaaccgctatgtatttcgtacattactgccagccaccatgaatatcgtacggtaccataaatacttgaccacctgtagtacataaaaacccaatccacatcaaaaccccctccccatgcttacaagcaagtacagcaatcaaccttcaactatcatacatcaactgcaactccaaagccacccctcacccactaggatatcaacaaacctacccacccttaacagtacatagcacataaagccatttaccgtacatagcacattacagtcaaatcccttctcgcccccatggatgacccccctcagataggggtcccttgaccaccatcctccgtgaaatcaatatcccgcacaagagtgctactctcctcgctccgggcccataacacttgggggtagctaaagtgaactgtatccgacatctggttcctacttcagggccataaagcctaaatagcccacacgttccccttaaataagacatcacgatg

SEQ ID NO: 191 - DNA, 16571 bp, Homo sapiens mitochondrial
  3109: "n" refers to a nucleotide at position 3107 of the Cambridge Reference Sequence (CRS, Anderson et al. 1981 Nature 290:457-465), later determined to be absent from the human mtDNA sequence according to the revised CRS (rCRS, Andrews et al. 1999 Nature Genetics 23:147); "n" therefore represents a single nucleotide deletion at a position corresponding to nucleotide 3107 of SEQ ID NO:1 as provided herein.
gatcacaggtctatcaccctattaaccactcacgggagctctccatgcatttggtattttcgtctggggggtgtgcacgcgatagcattgcgagacgctggagccggagcaccctatgtcgcagtatctgtctttgattcctgcctcatcctgttatttatcgcacctacgttcaatattacaggcgaacatacttactaaagtgtgttaattaattaatgcttacaggacataataataacaattgaatgtctgcacagccgctttccacacagacatcataacaaaaaatttccaccaaaccccccctcccccccgcttctggccacagcacttaaacacatctctgccaaaccccaaaaacaaagaaccctaacaccagcctaaccagatttcaaattttatcttttggcggtatgcacttttaacagtcaccccccaactaacacattattttcccctcccactcccatactactaatctcatcaatacaacccccgcccatcctacccagcacacacacaccgctgctaaccccataccccgaaccaaccaaaccccaaagacaccccccacagtttatgtagcttacctcctcaaagcaatacactgaaaatgtttagacgggctcacatcaccccataaacaaataggtttggtcctagcctttctattagctcttagtaagattacacatgcaagcatccccgttccagtgagttcaccctctaaatcaccacgatcaaaagggacaagcatcaagcacgcagcaatgcagctcaaaacgcttagcctagccacacccccacgggaaacagcagtgattaacctttagcaataaacgaaagtttaactaagctatactaaccccagggttggtcaatttcgtgccagccaccgcggtcacacgattaacccaagtcaatagaagccggcgtaaagagtgttttagatcaccccctccccaataaagctaaaactcacatgagttgtaaaaaactccagttgacacaaaatagactacgaaagtggctttaacatatctgaacacacaatagctaagacccaaactgggattagataccccactatgcttagccctaaacctcaacagttaaatcaacaaaactgctcgccagaacactacgagccacagcttaaaactcaaaggacctggcggtgcttcatatccctctagaggagcctgttctgtaatcgataaaccccgatcaacctcaccacctcttgctcagcctatataccgccatcttcagcaaaccctgatgaaggctacaaagtaagcgcaagtacccacgtaaagacgttaggtcaaggtgtagcccatgaggtggcaagaaatgggctacattttctaccccagaaaactacgatagcccttatgaaacttaagggtcgaaggtggatttagcagtaaactgagagtagagtgcttagttgaacagggccctgaagcgcgtacacaccgcccgtcaccctcctcaagtatacttcaaaggacatttaactaaaacccctacgcatttatatagaggagacaagtcgtaacatggtaagtgtactggaaagtgcacttggacgaaccagagtgtagcttaacacaaagcacccaacttacacttaggagatttcaacttaacttgaccgctctgagctaaacctagccccaaacccactccaccttactaccagacaaccttaaccaaaccatttacccaaataaagtataggcgatagaaattgaaacctggcgcaatagatatagtaccgcaagggaaagatgaaaaattataaccaagcataatatagcaaggactaacccctataccttctgcataatgaattaactagaaataactttgcaaggagagccaaagctaagacccccgaaaccagacgagctacctaagaacagctaaaagagcacacccgtctatgtagcaaaatagtgggaagatttataggtagaggcgacaaacctaccgagcctggtgatagctggttgtccaagatagaatcttagttcaactttaaatttgcccacagaaccctctaaatccccttgtaaatttaactgttagtccaaagaggaacagctctttggacactaggaaaaaaccttgtagagagagtaaaaaatttaacacccatagtaggcctaaaagcagccaccaattaagaaagcgttcaagctcaacacccactacctaaaaaatcccaaacatataactgaactcctcacacccaattggaccaatctatcaccctatagaagaactaatgttagtataagtaacatgaaaacattctcctccgcataagcctgcgtcagattaaaacactgaactgacaattaacagcccaatatctacaatcaaccaacaagtcattattaccctcactgtcaacccaacacaggcatgctcataaggaaaggttaaaaaaagtaaaaggaactcggcaaatcttaccccgcctgtttaccaaaaacatcacctctagcatcaccagtattagaggcaccgcctgcccagtgacacatgtttaacggccgcggtaccctaaccgtgcaaaggtagcataatcacttgttccttaaatagggacctgtatgaatggctccacgagggttcagctgtctcttacttttaaccagtgaaattgacctgcccgtgaagaggcgggcatgacacagcaagacgagaagaccctatggagctttaatttattaatgcaaacagtacctaacaaacccacaggtcctaaactaccaaacctgcattaaaaatttcggttggggcgacctcggagcagaacccaacctccgagcagtacatgctaagacttcaccagtcaaagcgaactactatactcaattgatccaataacttgaccaacggaacaagttaccctagggataacagcgcaatcctattctagagtccatatcaacaatagggtttacgacctcgatgttggatcaggacatcccgatggtgcagccgctattaaaggttcgtttgttcaacgattaaagtcctacgtgatctgagttcagaccggagtaatccaggtcggtttctatctacnttcaaattcctccctgtacgaaaggacaagagaaataaggcctacttcacaaagcgccttcccccgtaaatgatatcatctcaacttagtattatacccacacccacccaagaacagggtttgttaagatggcagagcccggtaatcgcataaaacttaaaactttacagtcagaggttcaattcctcttcttaacaacatacccatggccaacctcctactcctcattgtacccattctaatcgcaatggcattcctaatgcttaccgaacgaaaaattctaggctatatacaactacgcaaaggccccaacgttgtaggcccctacgggctactacaacccttcgctgacgccataaaactcttcaccaaagagcccctaaaacccgccacatctaccatcaccctctacatcaccgccccgaccttagctctcaccatcgctcttctactatgaacccccctccccatacccaaccccctggtcaacctcaacctaggcctcctatttattctagccacctctagcctagccgtttactcaatcctctgatcagggtgagcatcaaactcaaactacgccctgatcggcgcactacgagcagtagcccaaacaatctcatatgaagtcaccctagccatcattctactatcaacattactaataagtggctcctttaacctctccacccttatcacaacacaagaacacctctgattactcctgccatcatgacccttggccataatatgatttatctccacactagcagagaccaaccgaacccccttcgaccttgccgaaggggagtccgaactagtctcaggcttcaacatcgaatacgccgcaggccccttcgccctattcttcatagccgaatacacaaacattattataataaacaccctcaccactacaatcttcctaggaacaacatatgacgcactctcccctgaactctacacaacatattttgtcaccaagaccctacttctaacctccctgttcttatgaattcgaacagcatacccccgattccgctacgaccaactcatacacctcctatgaaaaaacttcctaccactcaccctagcattacttatatgatatgtctccatacccattacaatctccagcattccccctcaaacctaagaaatatgtctgataaaagagttactttgatagagtaaataataggagcttaaacccccttatttctaggactatgagaatcgaacccatccctgagaatccaaaattctccgtgccacctatcacaccccatcctaaagtaaggtcagctaaataagctatcgggcccataccccgaaaatgttggttatacccttcccgtactaattaatcccctggcccaacccgtcatctactctaccatctttgcaggcacactcatcacagcgctaagctcgcactgattttttacctgagtaggcctagaaataaacatgctagcttttattccagttctaaccaaaaaaataaaccctcgttccacagaagctgccatcaagtatttcctcacgcaagcaaccgcatccataatccttctaatagctatcctcttcaacaatatactctccggacaatgaaccataaccaatactaccaatcaatactcatcattaataatcataatggctatagcaataaaactaggaatagccccctttcacttctgagtcccagaggttacccaaggcacccctctgacatccggcctgcttcttctcacatgacaaaaactagcccccatctcaatcatataccaaatctctccctcactaaacgtaagccttctcctcactctctcaatcttatccatcatagcaggcagttgaggtggattaaaccaaacccagctacgcaaaatcttagcatactcctcaattacccacataggatgaataatagcagttctaccgtacaaccctaacataaccattcttaatttaactatttatattatcctaactactaccgcattcctactactcaacttaaactccagcaccacgaccctactactatctcgcacctgaaacaagctaacatgactaacacccttaattccatccaccctcctctccctaggaggcctgcccccgctaaccggctttttgcccaaatgggccattatcgaagaattcacaaaaaacaatagcctcatcatccccaccatcatagccaccatcaccctccttaacctctacttctacctacgcctaatctactccacctcaatcacactactccccatatctaacaacgtaaaaataaaatgacagtttgaacatacaaaacccaccccattcctccccacactcatcgcccttaccacgctactcctacctatctccccttttatactaataatcttatagaaatttaggttaaatacagaccaagagccttcaaagccctcagtaagttgcaatacttaatttctgtaacagctaaggactgcaaaaccccactctgcatcaactgaacgcaaatcagccactttaattaagctaagcccttactagaccaatgggacttaaacccacaaacacttagttaacagctaagcaccctaatcaactggcttcaatctacttctcccgccgccgggaaaaaaggcgggagaagccccggcaggtttgaagctgcttcttcgaatttgcaattcaatatgaaaatcacctcggagctggtaaaaagaggcctaacccctgtctttagatttacagtccaatgcttcactcagccattttacctcacccccactgatgttcgccgaccgttgactattctctacaaaccacaaagacattggaacactatacctattattcggcgcatgagctggagtcctaggcacagctctaagcctccttattcgagccgagctgggccagccaggcaaccttctaggtaacgaccacatctacaacgttatcgtcacagcccatgcatttgtaataatcttcttcatagtaatacccatcataatcggaggctttggcaactgactagttcccctaataatcggtgcccccgatatggcgtttccccgcataaacaacataagcttctgactcttacccccctctctcctactcctgctcgcatctgctatagtggaggccggagcaggaacaggttgaacagtctaccctcccttagcagggaactactcccaccctggagcctccgtagacctaaccatcttctccttacacctagcaggtgtctcttctatcttaggggccatcaatttcatcacaacaattatcaatataaaaccccctgccataacccaataccaaacgcccctcttcgtctgatccgtcctaatcacagcagtcctacttctcctatctctcccagtcctagctgctggcatcactatactactaacagaccgcaacctcaacaccaccttcttcgaccccgccggaggaggagaccccattctataccaacacctattctgatttttcggtcaccctgaagtttatattcttatcctaccaggcttcggaataatctcccatattgtaacttactactccggaaaaaaagaaccatttggatacataggtatggtctgagctatgatatcaattggcttcctagggtttatcgtgtgagcacaccatatatttacagtaggaatagacgtagacacacgagcatatttcacctccgctaccataatcatcgctatccccaccggcgtcaaagtatttagctgactcgccacactccacggaagcaatatgaaatgatctgctgcagtgctctgagccctaggattcatctttcttttcaccgtaggtggcctgactggcattgtattagcaaactcatcactagacatcgtactacacgacacgtactacgttgtagctcacttccactatgtcctatcaataggagctgtatttgccatcataggaggcttcattcactgatttcccctattctcaggctacaccctagaccaaacctacgccaaaatccatttcactatcatattcatcggcgtaaatctaactttcttcccacaacactttctcggcctatccggaatgccccgacgttactcggactaccccgatgcatacaccacatgaaacatcctatcatctgtaggctcattcatttctctaacagcagtaatattaataattttcatgatttgagaagccttcgcttcgaagcgaaaagtcctaatagtagaagaaccctccataaacctggagtgactatatggatgccccccaccctaccacacattcgaagaacccgtatacataaaatctagacaaaaaaggaaggaatcgaaccccccaaagctggtttcaagccaaccccatggcctccatgactttttcaaaaaggtattagaaaaaccatttcataactttgtcaaagttaaattataggctaaatcctatatatcttaatggcacatgcagcgcaagtaggtctacaagacgctacttcccctatcatagaagagcttatcacctttcatgatcacgccctcataatcattttccttatctgcttcctagtcctgtatgcccttttcctaacactcacaacaaaactaactaatactaacatctcagacgctcaggaaatagaaaccgtctgaactatcctgcccgccatcatcctagtcctcatcgccctcccatccctacgcatcctttacataacagacgaggtcaacgatccctcccttaccatcaaatcaattggccaccaatggtactgaacctacgagtacaccgactacggcggactaatcttcaactcctacatacttcccccattattcctagaaccaggcgacctgcgactccttgacgttgacaatcgagtagtactcccgattgaagcccccattcgtataataattacatcacaagacgtcttgcactcatgagctgtccccacattaggcttaaaaacagatgcaattcccggacgtctaaaccaaaccactttcaccgctacacgaccgggggtatactacggtcaatgctctgaaatctgtggagcaaaccacagtttcatgcccatcgtcctagaattaattcccctaaaaatctttgaaatagggcccgtatttaccctatagcaccccctctaccccctctagagcccactgtaaagctaacttagcattaaccttttaagttaaagattaagagaaccaacacctctttacagtgaaatgccccaactaaatactaccgtatggtccaccataattacccccatactccttacactattcctcatcacccaactaaaaatattaaacacaaactaccacctacctccctcaccaaagcccataaaaataaaaaattataacaaaccctgagaaccaaaatgaacgaaaatctgttcgcttcattcattgcccccacaatcctaggcctacccgccgcagtactgatcattctatttccccctctattgatccccacctccaaatatctcatcaacaaccgactaatcaccacccaacaatgactaatcaaactaacctcaaaacaaatgataaccatacacaacactaaaggacgaacctgatctcttatactagtatccttaatcatttttattgccacaactaacctcctcggactcctgcctcactcatttacaccaaccacccaactatctataaacctagccatggccatccccttatgagcgggcgcagtgattataggctttcgctctaagattaaaaatgccctagcccacttcttaccacaaggcacacctacaccccttatccccatactagttattatcgaaaccatcagcctactcattcaaccaatagccctggccgtacgcctaaccgctaacattactgcaggccacctactcatgcacctaattggaagcgccaccctagcaatatcaaccattaaccttccctctacacttatcatcttcacaattctaattctactgactatcctagaaatcgctgtcgccttaatccaagcctacgttttcacacttctagtaagcctctacctgcacgacaacacataatgacccaccaatcacatgcctatcatatagtaaaacccagcccatgacccctaacaggggccctctcagccctcctaatgacctccggcctagccatgtgatttcacttccactccataacgctcctcatactaggcctactaaccaacacactaaccatataccaatgatggcgcgatgtaacacgagaaagcacataccaaggccaccacacaccacctgtccaaaaaggccttcgatacgggataatcctatttattacctcagaagtttttttcttcgcaggatttttctgagccttttaccactccagcctagcccctaccccccaattaggagggcactggcccccaacaggcatcaccccgctaaatcccctagaagtcccactcctaaacacatccgtattactcgcatcaggagtatcaatcacctgagctcaccatagtctaatagaaaacaaccgaaaccaaataattcaagcactgcttattacaattttactgggtctctattttaccctcctacaagcctcagagtacttcgagtctcccttcaccatttccgacggcatctacggctcaacattttttgtagccacaggcttccacggacttcacgtcattattggctcaactttcctcactatctgcttcatccgccaactaatatttcactttacatccaaacatcactttggcttcgaagccgccgcctgatactggcattttgtagatgtggtttgactatttctgtatgtctccatctattgatgagggtcttactcttttagtataaatagtaccgttaacttccaattaactagttttgacaacattcaaaaaagagtaataaacttcgccttaattttaataatcaacaccctcctagccttactactaataattattacattttgactaccacaactcaacggctacatagaaaaatccaccccttacgagtgcggcttcgaccctatatcccccgcccgcgtccctttctccataaaattcttcttagtagctattaccttcttattatttgatctagaaattgccctccttttacccctaccatgagccctacaaacaactaacctgccactaatagttatgtcatccctcttattaatcatcatcctagccctaagtctggcctatgagtgactacaaaaaggattagactgaaccgaattggtatatagtttaaacaaaacgaatgatttcgactcattaaattatgataatcatatttaccaaatgcccctcatttacataaatattatactagcatttaccatctcacttctaggaatactagtatatcgctcacacctcatatcctccctactatgcctagaaggaataatactatcgctgttcattatagctactctcataaccctcaacacccactccctcttagccaatattgtgcctattgccatactagtctttgccgcctgcgaagcagcggtgggcctagccctactagtctcaatctccaacacatatggcctagactacgtacataacctaaacctactccaatgctaaaactaatcgtcccaacaattatattactaccactgacatgactttccaaaaaacacataatttgaatcaacacaaccacccacagcctaattattagcatcatccctctactattttttaaccaaatcaacaacaacctatttagctgttccccaaccttttcctccgaccccctaacaacccccctcctaatactaactacctgactcctacccctcacaatcatggcaagccaacgccacttatccagtgaaccactatcacgaaaaaaactctacctctctatactaatctccctacaaatctccttaattataacattcacagccacagaactaatcatattttatatcttcttcgaaaccacacttatccccaccttggctatcatcacccgatgaggcaaccagccagaacgcctgaacgcaggcacatacttcctattctacaccctagtaggctcccttcccctactcatcgcactaatttacactcacaacaccctaggctcactaaacattctactactcactctcactgcccaagaactatcaaactcctgagccaacaacttaatatgactagcttacacaatagcttttatagtaaagatacctctttacggactccacttatgactccctaaagcccatgtcgaagcccccatcgctgggtcaatagtacttgccgcagtactcttaaaactaggcggctatggtataatacgcctcacactcattctcaaccccctgacaaaacacatagcctaccccttccttgtactatccctatgaggcataattataacaagctccatctgcctacgacaaacagacctaaaatcgctcattgcatactcttcaatcagccacatagccctcgtagtaacagccattctcatccaaaccccctgaagcttcaccggcgcagtcattctcataatcgcccacggacttacatcctcattactattctgcctagcaaactcaaactacgaacgcactcacagtcgcatcataatcctctctcaaggacttcaaactctactcccactaatagctttttgatgacttctagcaagcctcgctaacctcgccttaccccccactattaacctactgggagaactctctgtgctagtaaccacgttctcctgatcaaatatcactctcctacttacaggactcaacatactagtcacagccctatactccctctacatatttaccacaacacaatggggctcactcacccaccacattaacaacataaaaccctcattcacacgagaaaacaccctcatgttcatacacctatcccccattctcctcctatccctcaaccccgacatcattaccgggttttcctcttgtaaatatagtttaaccaaaacatcagattgtgaatctgacaacagaggcttacgaccccttatttaccgagaaagctcacaagaactgctaactcatgcccccatgtctaacaacatggctttctcaacttttaaaggataacagctatccattggtcttaggccccaaaaattttggtgcaactccaaataaaagtaataaccatgcacactactataaccaccctaaccctgacttccctaattccccccatccttaccaccctcgttaaccctaacaaaaaaaactcatacccccattatgtaaaatccattgtcgcatccacctttattatcagtctcttccccacaacaatattcatgtgcctagaccaagaagttattatctcgaactgacactgagccacaacccaaacaacccagctctccctaagcttcaaactagactacttctccataatattcatccctgtagcattgttcgttacatggtccatcatagaattctcactgtgatatataaactcagacccaaacatcaatcagttcttcaaatatctactcattttcctaattaccatactaatcttagttaccgctaacaacctattccaactgttcatcggctgagagggcgtaggaattatatccttcttgctcatcagttgatgatacgcccgagcagatgccaacacagcagccattcaagcaatcctatacaaccgtatcggcgatatcggtttcatcctcgccttagcatgatttatcctacactccaactcatgagacccacaacaaatagcccttctaaacgctaatccaagcctcaccccactactaggcctcctcctagcagcagcaggcaaatcagcccaattaggtctccacccctgactcccctcagccatagaaggccccaccccagtctcagccctactccactcaagcactatagttgtagcaggaatcttcttactcatccgcttccaccccctagcagaaaatagcccactaatccaaactctaacactatgcttaggcgctatcaccactctgttcgcagcagtctgcgcccttacacaaaatgacatcaaaaaaatcgtagccttctccacttcaagtcaactaggactcataatagttacaatcggcatcaaccaaccacacctagcattcctgcacatctgtacccacgccttcttcaaagccatactatttatgtgctccgggtccatcatccacaaccttaacaatgaacaagatattcgaaaaataggaggactactcaaaaccatacctctcacttcaacctccctcaccattggcagcctagcattagcaggaatacctttcctcacaggtttctactccaaagaccacatcatcgaaaccgcaaacatatcatacacaaacgcctgagccctatctattactctcatcgctacctccctgacaagcgcctatagcactcgaataattcttctcaccctaacaggtcaacctcgcttccccacccttactaacattaacgaaaataaccccaccctactaaaccccattaaacgcctgacagccggaagcctattcgcaggatttctcattactaacaacatttcccccgcatcccccttccaaacaacaatccccctctacctaaaactcacagccctcgctgtcactttcctaggacttctaacagccctagacctcaactacctaaccaacaaacttaaaataaaatccccactatgcacattttatttctccaacatactcggattctaccctagcatcacacaccgcacaatcccctatctaggccttcttgcgagccaaaacctgcccctactcctcctagacctaacctgactagaaaagctattacctaaaacaatttcacagcaccaaatctccacctccatcatcacctcaacccaaaaaggcataattaaactttacttcctctctttcttcttcccactcatcctaaccctactcctaatcacataacctattcccccgagcaatctcaattacaatatatacaccaacaaacaatgttcaaccagtaactactactaatcaacgcccataatcatacaaagcccccgcaccaataggatcctcccgaatcaaccctgacccctctccttcataaattattcagcttcctacactattaaagtttaccacaaccaccaccccatcatactctttcacccacagcaccaatcctacctccatcgctaaccccactaaaacactcaccaagacctcaacccctgacccccatgcctcaggatactcctcaatagccatcgctgtagtatacccaaagacaaccatcattccccctaaataaattaaaaaaactattaaacccatataacctcccccaaaattcagaataataacacacccgaccacaccgctaacaatcaatactaaacccccataaataggagaaggcttagaagaaaaccccacaaaccccattactaaacccacactcaacagaaacaaagcatacatcattattctcgcacggactacaaccacgaccaatgatatgaaaaaccatcgttgtatttcaactacaagaacaccaatgaccccaatacgcaaaattaaccccctaataaaattaattaaccactcattcatcgacctccccaccccatccaacatctccgcatgatgaaacttcggctcactccttggcgcctgcctgatcctccaaatcaccacaggactattcctagccatgcactactcaccagacgcctcaaccgccttttcatcaatcgcccacatcactcgagacgtaaattatggctgaatcatccgctaccttcacgccaatggcgcctcaatattctttatctgcctcttcctacacatcgggcgaggcctatattacggatcatttctctactcagaaacctgaaacatcggcattatcctcctgcttgcaactatagcaacagccttcataggctatgtcctcccgtgaggccaaatatcattctgaggggccacagtaattacaaacttactatccgccatcccatacattgggacagacctagttcaatgaatctgaggaggctactcagtagacagtcccaccctcacacgattctttacctttcacttcatcttgcccttcattattgcagccctagcagcactccacctcctattcttgcacgaaacgggatcaaacaaccccctaggaatcacctcccattccgataaaatcaccttccacccttactacacaatcaaagacgccctcggcttacttctcttccttctctccttaatgacattaacactattctcaccagacctcctaggcgacccagacaattataccctagccaaccccttaaacacccctccccacatcaagcccgaatgatatttcctattcgcctacacaattctccgatccgtccctaacaaactaggaggcgtccttgccctattactatccatcctcatcctagcaataatccccatcctccatatatccaaacaacaaagcataatatttcgcccactaagccaatcactttattgactcctagccgcagacctcctcattctaacctgaatcggaggacaaccagtaagctacccttttaccatcattggacaagtagcatccgtactatacttcacaacaatcctaatcctaataccaactatctccctaattgaaaacaaaatactcaaatgggcctgtccttgtagtataaactaatacaccagtcttgtaaaccagagatgaaaacctttttccaaggacaaatcagagaaaaagtctttaactccaccattagcacccaaagctaagattctaatttaaactattctctgttctttcatggggaagcagatttgggtaccacccaagtattgactcacccatcaacaaccgctatgtatttcgtacattactgccagccaccatgaatattgtacggtaccataaatacttgaccacctgtagtacataaaaacccaatccacatcaaacccccccccccatgcttacaagcaagtacagcaatcaaccttcaactatcacacatcaactgcaactccaaagccacccctcacccactaggatatcaacaaacctacccacccttaacagtacatagtacataaagccatttaccgtacatagcacattacagtcaaatcccttctcgtccccatggatgacccccctcagataggggtcccttgaccaccatcctccgtgaaatcaatatcccgcacaagagtgctactctcctcgctccgggcccataacacttgggggtagctaaagtgaactgtatccgacatctggttcctacttcagggccataaagcctaaatagcccacacgttccccttaaataagacatcacgatg

SEQ ID NO: 192 - DNA, 16570 bp, Homo sapiens mitochondrial
  3108: "n" refers to a nucleotide at position 3107 of the Cambridge Reference Sequence (CRS, Anderson et al. 1981 Nature 290:457-465), later determined to be absent from the human mtDNA sequence according to the revised CRS (rCRS, Andrews et al. 1999 Nature Genetics 23:147); "n" therefore represents a single nucleotide deletion at a position corresponding to nucleotide 3107 of SEQ ID NO:1 as provided herein.
gatcacaggtctatcaccctattaaccactcacgggagctctccatgcatttggtattttcgtctggggggtgtgcacgcgatagcattgcgagacgctggagccggagcaccctatgtcgcagtatctgtctttgattcctgcctcatcctattatttatcgcacctacgttcaatattacaggcgaacatacttactaaagtgtgttaattaattaatgcttgtaggacataataataacaattgaatgtctgcacagccgcttcccacacagacatcataacaaaaaatttccaccaaaccccccctcccccgccttctggccacagcacttaaacacatctctgccaaaccccaaaaacaaagaaccctaacaccagcctaaccagatttcaaattttatcttttggcggtatgcacttttaacagtcaccccccaactaacacattattttcccctcccactcccatactactaatctcatcaacacaacccccgcccatcctacccagcacacacacaccgctgctaaccccataccccgaaccaaccaaaccccaaagacaccccccacagtttatgtagcttacctcctcaaagcaatacactgaaaatgtttagacgggctcacatcaccccataaacaaataggtttggtcctagcctttctattagctcttagtaagattacacatgcaagcatccccgttccagtgagttcaccctctaaatcaccacgatcaaaagggacaagcatcaagcacgcagcaatgcagctcaaaacgcttagcctagccacacccccacgggaaacagcagtgattaacctttagcaataaacgaaagtttaactaagctatactaaccccagggttggtcaatttcgtgccagccaccgcggtcacacgattaacccaagtcaatagaagccggcgtaaagagtgttttagatcaccccctccccaataaagctaaaactcacctgagttgtaaaaaactccagttgacacaaaatagactacgaaagtggctttaacatatctgaacacacaatagctaagacccaaactgggattagataccccactatgcttagccctaaacctcaacagttaaatcaacaaaactgctcgccagaacactacgagccacagcttaaaactcaaaggacctggcggtgcttcatatccctctagaggagcctgttctgtaatcgataaaccccgatcaacctcaccacctcttgctcagcctatataccgccatcttcagcaaaccctgatgaaggctacaaagtaagcgcaagtacccacgtaaagacgttaggtcaaggtgtagcccatgaggtggcaagaaatgggctacattttctaccccagaaaactacgatagcccttatgaaacttaagggtcgaaggtggatttagcagtaaactgagagtagagtgcttagttgaacagggccctgaagcgcgtacacaccgcccgtcaccctcctcaagtatacttcaaaggacatttaactaaaacccctacgcatttatatagaggagacaagtcgtaacatggtaagtgtactggaaagtgcacttggacgaaccagagtgtagcttaacacaaagcacccaacttacacttaggagatttcaacttaacttgaccgctctgagctaaacctagccccaaacccactccaccttactaccagacaaccttagccaaaccatttacccaaataaagtataggcgatagaaattgaaacctggcgcaatagatatagtaccgcaagggaaagatgaaaaattataaccaagcataatatagcaaggactaacccctataccttctgcataatgaattaactagaaataactttgcaaggagagccaaagctaagacccccgaaaccagacgagctacctaagaacagctaaaagagcacacccgtctatgtagcaaaatagtgggaagatttataggtagaggcgacaaacctaccgagcctggtgatagctggttgtccaagatagaatcttagttcaactttaaatttgcccacagaaccctctaaatccccttgtaaatttaattgttagtccaaagaggaacagctctttggacactaggaaaaaaccttgtagagagagtaaaaaatttaacacccatagtaggcctaaaagcagccaccaattaagaaagcgttcaagctcaacacccactacctaaaaaatcccaaacatataactgaactcctcacacccaattggaccaatctatcaccctatagaagaactaatgttagtataagtaacatgaaaacattctcctccgcataagcctgcgtcagattaaaacactgaactgacaattaacagcccaatatctacaatcaaccaacaagtcattattaccctcactgtcaacccaacacaggcatgctcataaggaaaggttaaaaaaagtaaaaggaactcggcaaatcttaccccgcctgtttaccaaaaacatcacctctagcatcaccagtattagaggcaccgcctgcccagtgacacatgtttaacggccgcggtaccctaaccgtgcaaaggtagcataatcacttgttccttaaatagggacctgtatgaatggctccacgagggttcagctgtctcttacttttaaccagtgaaattgacctgcccgtgaagaggcgggcatgacacagcaagacgagaagaccctatggagctttaatttattaatgcaaacagtacctaacaaacccacaggtcctaaactaccaaacctgcattaaaaatttcggttggggcgacctcggagcagaacccaacctccgagcagtacatgctaagacttcaccagtcaaagcgaactactatactcaattgatccaataacttgaccaacggaacaagttaccctagggataacagcgcaatcctattctagagtccatatcaacaatagggtttacgacctcgatgttggatcaggacatcccaatggtgcagccgctattaaaggttcgtttgttcaacgattaaagtcctacgtgatctgagttcagaccggagtaatccaggtcggtttctatctacnttcaaattcctccctgtacgaaaggacaagagaaataaggcctacttcacaaagcgccttcccccgtaaatgatatcatctcaacttagtattatacccacacccacccaagaacagggtttgttaagatggcagagcccggtaatcgcataaaacttaaaactttacagtcagaggttcaattcctcttcttaacaacatacccatggccaacctcctactcctcattgtacccattctaatcgcaatggcattcctaatgcttaccgaacgaaaaattctaggctatatacaactacgcaaaggccccaacgttgtaggcccctacgggctactacaacccttcgctgacgccataaaactcttcaccaaagagcccctaaaacccgccacatctaccatcaccctctacatcaccgccccgaccttagctctcaccatcgctcttctactatgaacccccctccccatacccaaccccctggtcaacctcaacctaggcctcctatttattctagccacctctagcctagccgtttactcaatcctctgatcagggtgagcatcaaactcaaactacgccctgatcggcgcactgcgagcagtagcccaaacaatctcatatgaagtcaccctagccatcattctactatcaacattactaataagtggctcctttaacctctccacccttatcacaacacaagaacacctctgattactcctgccatcatgacccttggccataatatgatttatctccacactagcagagaccaaccgaacccccttcgaccttgccgaaggggagtccgaactagtctcaggcttcaacatcgaatacgccgcaggccccttcgccctattcttcatagccgaatacacaaacattattataataaacaccctcaccactacaatcttcctaggaacaacatatgacgcactctcccctgaactctacacaacatattttgtcaccaagaccctacttctaacctccctgttcttatgaattcgaacagcatacccccgattccgctacgaccaactcatacacctcctatgaaaaaacttcctaccactcaccctagcattacttatatgatatgtctccatacccattacaatctccagcattccccctcaaacctaagaaatatgtctgataaaagagttactttgatagagtaaataataggagcttaaacccccttatttctaggactatgagaatcgaacccatccctgagaatccaaaattctccgtgccacctatcacaccccatcctaaagtaaggtcagctaaataagctatcgggcccataccccgaaaatgttggttatacccttcccgtactaattaatcccctggcccaacccgtcatctactctaccatctttgcaggcacactcatcacagcgctaagctcgcactgattttttacctgagtaggcctagaaataaacatgctagcttttattccagttctaaccaaaaaaataaaccctcgttccacagaagctgccatcaagtatttcctcacgcaagcaaccgcatccataatccttctaatagctatcctcttcaacaatatactctccggacaatgaaccataaccaatactaccaatcaatactcatcattaataatcataatggctatagcaataaaactaggaatagccccctttcacttctgagtcccagaggttacccaaggcacccctctgacatccggcctgcttcttctcacatgacaaaaactagcccctatctcaatcatataccaaatctctccctcactaaacgtaagccttctcctcactctctcaatcttatccatcatagcaggcagttgaggtggattaaaccaaacccagctacgcaaaatcttagcatactcctcaattacccacataggatgaataatagcagttctaccgtacaaccctaacataaccattcttaatttaactatttatattatcctaactactaccgcattcctactactcaacttaaactccagcaccacgaccctactactatctcgcacctgaaacaagataacatgactaacacccttaattccatccaccctcctctccctaggaggcctgcccccgctaaccggctttttgcccaaatgggccattatcgaagaattcacaaaaaacaatagcctcatcatccccaccatcatagccaccatcaccctccttaacctctacttctacctacgcctaatctactccacctcaatcacactactccccatatctaacaacgtaaaaataaaatgacagtttgaacatacaaaacccaccccattcctccccacactcatcgcccttaccacgctactcctacctatctccccttttatactaataatcttatagaaatttaggttaaatacagaccaagagccttcaaagccctcagtaagttgcaatacttaatttctgtaacagctaaggactgcaaaaccccactctgcatcaactgaacgcaaatcagccactttaattaagctaagcccttactagaccaatgggacttaaacccacaaacacttagttaacagctaagcaccctaatcaactggcttcaatctacttctcccgccgccgggaaaaaaggcgggagaagccccggcaggtttgaagctgcttcttcgaatttgcaattcaatatgaaaatcacctcggagctggtaaaaagaggcctaacccctgtctttagatttacagtccaatgcttcactcagccattttacctcacccccactgatgttcgccgaccgttgactattctctacaaaccacaaagacattggaacactatacctattattcggcgcatgagctggagtcctaggcacagctctaagcctccttattcgagccgagctgggccagccaggcaaccttctaggtaacgaccacatctacaacgttatcgtcacagcccatgcatttgtaataatcttcttcatagtaatacccatcataatcggaggctttggcaactgactagttcccctaataatcggtgcccccgatatggcgtttccccgcataaacaacataagcttctgactcttacctccctctctcctactcctgctcgcatctgctatagtggaagccggagcaggaacaggttgaacagtctaccctcccttagcagggaactactcccaccctggagcctccgtagacctaaccatcttctccttacacctagcaggtgtctcctctatcttaggggccatcaatttcatcacaacaattatcaatataaaaccccctgccataacccaataccaaacgcccctcttcgtctgatccgtcctaatcacagcagtcctacttctcctatctctcccagtcctagctgctggcatcactatactactaacagaccgcaacctcaacaccaccttcttcgaccccgccggaggaggagaccccattctataccaacacctattctgatttttcggtcaccctgaagtttatattcttatcctaccaggcttcggaataatctcccatattgtaacttactactccggaaaaaaagaaccatttggatacataggtatggtctgagctatgatatcaattggcttcctagggtttatcgtgtgagcacaccatatatttacagtaggaatagacgtagacacacgagcatatttcacctccgctaccataatcatcgctatccccaccggcgtcaaagtatttagctgactcgccacactccacggaagcaatatgaaatgatctgctgcagtgctctgagccctaggattcatctttcttttcaccgtaggtggcctgactggcattgtattagcaaactcatcactagacatcgtactacacgacacgtactacgttgtagctcacttccactatgtcctatcaataggagctgtatttgccatcataggaggcttcattcactgatttcccctattctcaggctacaccctagaccaaacctacgccaaaatccatttcactatcatattcatcggcgtaaatctaactttcttcccacaacactttctcggcctatccggaatgccccgacgttactcggactaccccgatgcatacaccacatgaaacatcctatcatctgtaggctcattcatttctctaacagcagtaatattaataattttcatgatttgagaagccttcgcttcgaagcgaaaagtcctaatagtagaagaaccctccataaacctggagtgactatatggatgccccccaccctaccacacattcgaagaacccgtatacataaaatctagacaaaaaaggaaggaatcgaaccccccaaagctggtttcaagccaaccccatggcctccatgactttttcaaaaaggtattagaaaaaccatttcataactttgtcaaagttaaattataggctaaatcctatatatcttaatggcacatgcagcgcaagtaggtctacaagacgctacttcccctatcatagaagagcttatcacctttcatgatcacgccctcataatcattttccttatctgcttcctagtcctgtatgcccttttcctaacactcacaacaaaactaactaatactaacatctcagacgctcaggaaatagaaaccgtctgaactatcctgcccgccatcatcctagtcctcatcgccctcccatccctacgcatcctttacataacagacgagatcaacgatccctcccttaccatcaaatcaattggccaccaatggtactgaacctacgagtacaccgactacggcggactaatcttcaactcctacatacttcccccattattcctagaaccaggcgacctgcgactccttgacgttgacaatcgagtagtactcccgattgaagcccccattcgtataataattacatcacaagacgtcttgcactcatgagctgtccccacattaggcttaaaaacagatgcaattcccggacgtctaaaccaaaccactttcaccgctacacgaccgggggtatactacggtcaatgctctgaaatctgtggagcaaaccacagtttcatgcccatcgtcctagaattaattcccctaaaaatctttgaaatagggcccgtatttaccctatagcaccccctctaccccctctagagcccactgtaaagctaacttagcattaaccttttaagttaaagattaagagaaccaacacctctttacagtgaaatgccccaactaaatactaccgtatggcccaccataattacccccatattccttacactattcctcatcacccaactaaaaatattaaacacaaactaccacctacctccctcaccaaagcccataaaaataaaaaattataacaaaccctgagaaccaaaatgaacgaaaatctgttcgcttcattcattgcccccacaatcctaggcctacccgccgcagtactgatcattctatttccccctctattgatccccacctccaaatatctcatcaacaaccgactaatcaccacccaacaatgactaatcaaactaacctcaaaacaaatgatagccatacacaacactaaaggacgaacctgatctcttatactagtatccttaatcatttttattgccacaactaacctcctcggactcctgcctcactcatttacaccaaccacccaactatctataaacctagccatggccatccccttatgagcgggcgcagtgattataggctttcgctctaagattaaaaatgccctagcccacttcttaccacaaggcacacctacaccccttatccccatactagttattatcgaaaccatcagcctactcattcaaccaatagccctggccgtacgcctaaccgctaacattactgcaggccacctactcatgcacctaattggaagcgccaccctagcaatatcaaccattaaccttccctctacacttatcatcttcacaattctaattctactgactatcctagaaatcgctgtcgccttaatccaagcctacgttttcacacttctagtaagcctctacctgcacgacaacacataatgacccaccaatcacatgcctatcatatagtaaaacccagcccatgacccctaacaggggccctctcagccctcctaatgacctccggcctagccatgtgatttcacttccactccataacgctcctcatactaggcctactaaccaacacactaaccatataccaatgatggcgcgatgtaacacgagaaagcacataccaaggccaccacacaccacctgtccaaaaaggccttcgatacgggataatcctatttattacctcagaagtttttttcttcgcaggatttttctgagccttttaccactccagcctagcccctaccccccaactaggagggcactggcccccaacaggcatcaccccgctaaatcccctagaagtcccactcctaaacacatccgtattactcgcatcaggagtatcaatcacctgagctcaccatagtctaatagaaaacaaccgaaaccaaataattcaagcactgcttattacaattttactgggtctctattttaccctcctacaagcctcagagtacttcgagtctcccttcaccatttccgacggcatctacggctcaacattttttgtagccacaggcttccacggacttcacgtcattattggctcaactttcctcactatctgcttcatccgccaactaatatttcactttacatccaaacatcactttggcttcgaagccgccgcctgatactggcattttgtagatgtggtttgactatttctgtatgtctccatctattgatgagggtcttactcttttagtataaatagtaccgttaacttccaattaactagttttgacaacattcaaaaaagagtaataaacttcgccttaattttaataatcaacaccctcctagccttactactaataattattacattttgactaccacaactcaacggctacatagaaaaatccaccccttacgagtgcggcttcgaccctatatcccccgcccgcgtccctttctccataaaattcttcttagtagctattaccttcttattatttgatctagaaattgccctccttttacccctaccatgagccctacaaacaactaacctgccactaatagttatgtcatccctcttattaatcatcatcctagccctaagtctggcctatgagtgactacaaaaaggattagactgagctgaattggtatatagtttaaacaaaacgaatgatttcgactcattaaattatgataatcatatttaccaaatgcccctcatttacataaatattatactagcatttaccatctcacttctaggaatactagtatatcgctcacacctcatatcctccctactatgcctagaaggaataatactatcgctgttcattatagctactctcataaccctcaacacccactccctcttagccaatattgtgcctattgccatactagtctttgccgcctgcgaagcagcggtgggcctagccctactagtctcaatctccaacacatatggcctagactacgtacataacctaaacctactccaatgctaaaactaatcgtcccaacaattatattactaccactgacatgactttccaaaaaacacataatttgaatcaacacaaccacccacagcctaattattagcatcatccccctactattttttaaccaaatcaacaacaacctatttagctgttccccaaccttttcctccgaccccctaacaacccccctcctaatactaactacctgactcctacccctcacaatcatggcaagccaacgccacttatccagtgaaccactatcacgaaaaaaactctacctctctatactaatctccctacaaatctccttaattataacattcacagccacagaactaatcatattttatatcttcttcgaaaccacacttatccccaccttggctatcatcacccgatgaggcaaccagccagaacgcctgaacgcaggcacatacttcctattctacaccctagtaggctcccttcccctactcatcgcactaatttacactcacaacaccctaggctcactaaacattctactactcactctcactgcccaagaactatcaaactcctgagccaacaacttaatatgactagcttacacaatagcttttatagtaaagatacctctttacggactccacttatgactccctaaagcccatgtcgaagcccccatcgctgggtcaatagtacttgccgcagtactcttaaaactaggcggctatggtataatacgcctcacactcattctcaaccccctgacaaaacacatagcctaccccttccttgtactatccctatgaggcataattataacaagctccatctgcctacgacaaacagacctaaaatcgctcattgcatactcttcaatcagccacatagccctcgtagtaacagccattctcatccaaaccccctgaagcttcaccggcgcagtcattctcataatcgcccacggacttacatcctcattactattctgcctagcaaactcaaactacgaacgcactcacagtcgcatcataatcctctctcaaggacttcaaactctactcccactaatagctttttgatgacttctagcaagcctcgctaacctcgccttaccccccactattaacctactgggagaactctctgtgctagtaaccacgttctcctgatcaaatatcactctcctacttacaggactcaacatactagtcacagccctatactccctctacatatttaccacaacacaatggggctcactcacccaccacattaacaacataaaaccctcattcacacgagaaaacaccctcatgttcatacacctatcccccattctcctcctatccctcaaccccgacatcattaccgggttttcctcttgtaaatatagtttaaccaaaacatcagattgtgaatctgacaacagaggcttacgaccccttatttaccgagaaagctcacaagaactgctaactcatgcccccatgtctaacaacatggctttctcaacttttaaaggataacagctatccattggtcttaggccccaaaaattttggtgcaactccaaataaaagtaataaccatgcacactactataaccaccctaaccctgacttccctaattccccccatccttaccaccctcgttaaccctaacaaaaaaaactcatacccccattatgtaaaatccattgtcgcatccacctttattatcagtctcttccccacaacaatattcatgtgcctagaccaagaagttattatctcgaactgacactgagccacaacccaaacaacccagctctccctaagcttcaaactagactacttctccataatattcatccctgtagcattgttcgttacatggtccatcatagaattctcactgtgatatataaactcagacccaaacattaatcagttcttcaaatatctactcattttcctaattaccatactaatcttagttaccgctaacaacctattccaactgttcatcggctgagagggcgtaggaattatatccttcttgctcatcagttgatgatacgcccgagcagatgccaacacagcagccattcaagcaatcctatacaaccgtatcggcgatatcggtttcatcctcgccttagcatgatttatcctacactccaactcatgagacccacaacaaatagcccttctaaacgctaatccaagcctcaccccactactaggcctcctcctagcagcagcaggcaaatcagcccaattaggtctccacccctgactcccctcagccatagaaggccccaccccagtctcagccctactccactcaagcactatagttgtagcaggaatcttcttactcatccgcttccaccccctagcagaaaatagcccactaatccaaactctaacactatgcttaggcgctatcaccactctgttcgcagcagtctgcgcccttacacaaaatgacatcaaaaaaatcgtagccttctccacttcaagtcaactaggactcataatagttacaatcggcatcaaccaaccacacctagcattcctgcacatctgtacccacgccttcttcaaagccatactatttatgtgctccgggtccatcatccacaaccttaacaatgaacaagatattcgaaaaataggaggactactcaaaaccatacctctcacttcaacctccctcaccattggcagcctagcattagcaggaatacctttcctcacaggtttctactccaaagaccacatcatcgaaaccgcaaacatatcatacacaaacgcctgagccctatctattactctcatcgctacctccctgacaagcgcctatagcactcgaataattcttctcaccctaacaggtcaacctcgcttccccacccttactaacattaacgaaaataaccccaccctactaaaccccattaaacgcctggcagccggaagcctattcgcaggatttctcattactaacaacatttcccccgcatcccccttccaaacaacaatccccctctacctaaaactcacagccctcgctgtcactttcctaggacttctaacagccctagacctcaactacctaaccaacaaacttaaaataaaatccccactatgcacattttatttctccaacatactcggattctaccctagcatcacacaccgcacaatcccctatctaggccttcttacgagccaaaacctgcccctactcctcctagacctaacctgactagaaaagctattacctaaaacaatttcacagcaccaaatctccacctccatcatcacctcaacccaaaaaggcataattaaactttacttcctctctttcttcttcccactcatcctaaccctactcctaatcacataacctattcccccgagcaatctcaattacaatatatacaccaacaaacaatgttcaaccagtaactactactaatcaacgcccataatcatacaaagcccccgcaccaataggatcctcccgaatcaaccctgacccctctccttcataaattattcagcttcctacactattaaagtttaccacaaccaccaccccatcatactctttcacccacagcaccaatcctacctccatcgctaaccccactaaaacactcaccaagacctcaacccctgacccccatgcctcaggatactcctcaatagccatcgctgtagtatatccaaagacaaccatcattccccctaaataaattaaaaaaactattaaacccatataacctcccccaaaattcagaataataacacacccgaccacaccgctaacaatcaatactaaacccccataaataggagaaggcttagaagaaaaccccacaaaccccattactaaacccacactcaacagaaacaaagcatatatcattattctcgcacggactacaaccacgaccaatgatatgaaaaaccatcgttgtatttcaactacaagaacaccaatgaccccaatacgcaaaattaaccccctaataaaactaattaaccactcattcatcgacctccccaccccatccaacatctccgcatgatgaaacttcggctcactccttggcgcctgcctgatcctccaaatcaccacaggactattcctagccatgcactactcaccagacgcctcaaccgccttttcatcaatcgcccacatcactcgagacgtaaattatggctgaatcatccgctaccttcacgccaatggcgcctcaatattctttatctgcctcttcctacacatcggacgaggcctatattacggatcatttctctactcagaaacctgaaacatcggcattatcctcctgcttgcaactatagcaacagccttcataggctatgtcctcccgtgaggccaaatatcattctgaggggccacagtaattacaaacttactatccgccatcccatacattgggacagacctagttcaatgaatctgaggaggctactcagtagacagtcccaccctcacacgattctttacctttcacttcatcttacccttcattattgcagccctagcagcactccacctcctattcttgcacgaaacgggatcaaacaaccccctaggaatcacctcccattccgataaaatcaccttccacccttactacacaatcaaagacgccctcggcttacttctcttccttctctccttaatgacattaacactattctcaccagacctcctaggcgacccagacaattataccctagccaaccccttaaacacccctccccacatcaagcccgaatgatatttcctattcgcctacacaattctccgatccgtccctaacaaactaggaggcgtccttgccctattactatccatcctcatcctagcaataatccccatcctccatatatccaaacaacaaagcataatatttcgcccactaagccaatcactttattgactcctagccgcagacctcctcattctaacctgaatcggaggacaaccagtaagctacccttttaccatcattggacaagtagcatccgtactatacttcacaacaatcctaatcctaataccaactatctccctaattgaaaacaaaatactcaaatgggcctgtccttgtagtataaactaatacaccagtcttgtaaaccggagatgaaaacctttttccaaggacaaatcagagaaaaagtctttaactccaccattagcacccaaagctaagattctaatttaaactattctctgttctttcatggggaagcagatttgggtaccacccaagtattgactcacccatcaacaaccgctatgtatttcgtacattactgccagccaccatgaatattgtacggtaccataaatacttgaccacctgtagtacataaaaacccaatccacatcaaaaccccctccccatgcttacaagcaagtacagcaatcaaccttcaactatcacacatcaactgcaactccaaagccacccctcacccactagaataccaacaaacctacccacccttaacagtacatagtacataaagccattcaccgtacatagcacattacagtcaaatctcttctcgcccccatggatgacccccctcagataggggtcccttgaccaccatcctccgtgaaatcaatatcccgcacaagagtgctactctcctcgctccgggcccataacacctgggggtagctaaagtgaactgtatccgacatctggttcctacttcagggtcataaagcctaaatagcccacacgttccccttaaataagacatcacgatg

SEQ ID NO: 193 - DNA, 16567 bp, Homo sapiens mitochondrial
  3105: "n" refers to a nucleotide at position 3107 of the Cambridge Reference Sequence (CRS, Anderson et al. 1981 Nature 290:457-465), later determined to be absent from the human mtDNA sequence according to the revised CRS (rCRS, Andrews et al. 1999 Nature Genetics 23:147); "n" therefore represents a single nucleotide deletion at a position corresponding to nucleotide 3107 of SEQ ID NO:1 as provided herein.
gatcacaggtctatcaccctattaaccactcacgggagctctccatgcatttggtattttcgtctggggggtgtgcacgcgatagcattgcgagacgctggagccggagcaccctatgtcgcagtatctgtctttgattcctgcctcatctcattatttatcgcacctacgttcaatattatagtcgaacatacctactaaagtgtgttaattaattaatgcttgtaggacataataataacaattaaatgtctgcacagccgctttccacacagacatcataacaaaaaatttccaccaaaccccccctcccccacttctggccacagcacttaaacacatctctgccaaaccccgaaaacaaagaaccctaacaccagcctaaccagatttcaaattttatcttttggcggtatgcacttttaacagtcaccccccaactaacacattattttcccctcccactcccatactactaatctcatcaatacaacccccgcccatcctacccagcacacacaccgctgctaaccccataccccgaaccaaccaaaccccaaagacaccccccacagtttatgtagcttacctcctcaaagcaatacactgaaaatgtttagacgggctcacatcaccccataaacaaataggtttggtcctagcctttctattagctcttagtaagattacacatgcaagcatccccactccagtgagttcaccctctaaatcaccacgatcaaaagggacaagcatcaagcacgcaacaatgcagctcaaaacgcttagcctagccacacccccacgggaaacagcagtgataaacctttagcaataaacgaaagtttaactaagctatactaaccccagggttggtcaatttcgtgccagccaccgcggtcacacgattaacccaagtcaatagaagccggcgtaaagagtgttttagatcaccccctccccaataaagctaaaactcacctgagttgtaaaaaactccagttgacacaaaataaactacgaaagtggctttaacatatctgaacacacaatagctaagacccaaactgggattagataccccactatgcttagccctaaacctcaacagttaaatcaacaaaactgctcgccagaacactacgagccacagcttaaaactcaaaggacctggcggtgcttcatatccctctagaggagcctgttctgtaatcgataaaccccgatcaacctcaccacctcttgctcagcctatataccgccatcttcagcaaaccctgatgaaggctacaaagtaagcgcaagtacccacgtaaagacgttaggtcaaggtgtagcccatgaggtggcaagaaatgggctacattttctaccccagaaaactacgatagcccttatgaaacttaagggtcgaaggtggatttagcagtaaactaagagtagagtgcttagttgaacagggccctgaagcgcgtacacaccgcccgtcaccctcctcaagtatacttcaaaggacatttaactaaaacccctacgcatttatatagaggagacaagtcgtaacatggtaagtgtactggaaagtgcacttggacgaaccagagtgtagcttaacacaaagcacccaacttacacttaggagatttcaacttaacttgaccgctctgagctaaacctagccccaaacccactccaccttactaccagacaaccttagccaaaccatttacccaaacaaagtataggcgatagaaattgaaacctggcgcaatagatatagtaccgcaagggaaagatgaaaaattataaccaagcataatatagcaaggactaacccctataccttctgcataatgaattaactagaaataactttgcaaggagagccaaagctaagacccccgaaaccagacgagctacctaagaacagctaaaagagcacacccgtctatgtagcaaaatagtgggaagatttataggtagaggcgacaaacctaccgagcctggtgatagctggttgtccaagatagaatcttagttcaactttaaatttgcccacagaaccctctaaatccccttgtaaatttaactgttagtccaaagaggaacagctctttggacactaggaaaaaaccttgtagagagagtaaaaaatttaacacccatagtaggcctaaaagcagccaccaattaagaaagcgttcaagctcaacacccactacctaaaaaatcccaaacatataactgaactcctcacacccaattggaccaatctatcaccctatagaagaactaatgttagtataagtaacatgaaaacattctcctccgcataagcctgcgtcagatcaaaacactgaactgacaattaacagcccaatatctacaatcaaccaacaagtcattattaccctcactgtcaacccaacacaggcatgctcataaggaaaggttaaaaaaagtaaaaggaactcggcaaatcttaccccgcctgtttaccaaaaacatcacctctagcatcaccagtattagaggcaccgcctgcccagtgacacatgtttaacggccgcggtaccctaaccgtgcaaaggtagcataatcacttgttccttaaatagggacctgtatgaatggctccacgagggttcagctgtctcttacttttaaccagtgaaattgacctgcccgtgaagaggcgggcatgacacagcaagacgagaagaccctatggagctttaatttattaatgcaaacaatacctaacagacccacaggtcctaaactaccaaacctgcattaaaaatttcggttggggcgacctcggagcagaacccaacctccgagcagtacatgctaagacttcaccagtcaaagcgaactaccatactcaattgatccaataacttgaccaacggaacaagttaccctagggataacagcgcaatcctattctagagtccatatcaacaatagggtttacgacctcgatgttggatcaggacatcccgatggtgcagccgctattaaaggttcgtttgttcaacgattaaagtcctacgtgatctgagttcagaccggagtaatccaggtcggtttctatctacnttcaaattcctccctgtacgaaaggacaagagaaataaggcctacttcacaaagcgccttcccccgtaaatgatatcatctcaacttagtattatacccacacccacccaagaacagggtttgttaagatggcagagcccggtaatcgcataaaacttaaaactttacagtcagaggttcaattcctcttcttaacaacacacccatggccaacctcctactcctcattgtacccattctaatcgcaatggcattcctaatgcttaccgaacgaaaaattctaggctatatacaactacgcaaaggccccaacgttgtaggcccctacgggctactacaacccttcgctgacgccataaaactcttcaccaaagagcccctaaaacccgccacatctaccatcaccctctacatcaccgccccgaccttagctctcaccatcgctcttctactatgaacccccctccccatacccaaccccctggttaacctcaacctaggcctcctatttattctagccacctctagcctagccgtttactcaatcctctgatcaggatgagcatcaaactcaaactacgccctaatcggcgcactgcgagcagtagcccaaacaatctcatatgaagtcaccctagccatcattctactatcaacattactaataagtggctcctttaacctctccacccttatcacaacacaagaacacctctgattactcctgccatcatgacccttggccataatatgatttatctccacactagcagagaccaaccgaacccccttcgaccttgccgaaggggagtccgaactagtctcaggcttcaacatcgaatacgccgcaggccccttcgccctattcttcatagccgaatacacaaacattattataataaacaccctcaccactacaatcttcctaggaacaacatatgacgcactctcccctgaactctacacaacatattttgtcaccaagaccctacttctgacctccctgttcttatgaattcgaacagcatacccccgattccgctacgaccaactcatacacctcctatgaaaaaacttcctaccactcaccctagcattacttatatgatatgtctccatacccattacaatctccagcattccccctcaaacctaagaaatatgtctgataaaagagttactttgatagagtaaataataggagcttaaacccccttatttctaggactatgagaatcgaacccatccctgagaatccaaaattctccgtgccacctatcacaccccatcctaaagtaaggtcagctaaataagctatcgggcccataccccgaaaatgttggttatacccttcccgtactaattaatcccctggcccaacccgtcatctactctaccatctttgcaggcacactcatcacagcgctaagctcgcactgattttttacctgagtaggcctagaaataaacatgctagcttttattccagttctaaccaaaaaaataaaccctcgttccacagaagctgccatcaagtatttcctcacgcaagcaaccgcatccataatccttctaatagctatcctcttcaacaatatactctccggacaatgaaccataaccaatactaccaatcaatactcatcattaataatcataatggctatagcaataaaactaggaatagccccctttcacttctgagtcccagaggttacccaaggcacccctctgacatccggcctgcttcttctcacatgacaaaaactagcccccatctcaatcatataccaaatctctccctcactaaacgtaagccttctcctcactctctcaatcttatccatcatagcaggcagttgaggtggattaaaccaaacccagctacgcaaaatcttagcatactcctcaattacccacataggatggataatagcaattctaccgtacaaccctaacataaccattcttaatttaactatttatattatcctaactactaccgcattcctactactcaacttaaactccagcaccacgaccctactactatctcgcacctgaaacaagctaacatgactaacacccttaattccatccaccctcctctccctaggaggcctgcccccgctaaccggctttttgcccaaatgggccattatcgaagaattcacaaaaaacaatagcctcatcatccccaccatcatagccaccatcaccctccttaacctctacttctacctacgcctaatctactccacctcaatcacactactccccatatccaacaacgtaaaaataaaatgacagtttgaacatacaaaacccaccccattcctccccacactcatcgcccttaccacgctactcctacctatctccccttttatactaataatcttatagaaatttaggttaaatacagaccaagagccttcaaagccctcagtaagttgcaatacttaatttctgtaacagctaaggactgcaaaaccccactctgcatcaactgaacgcaaatcagccactttaattaagctaagccctcactagaccaatgggacttaaacccacaaacacttagttaacagctaagcaccctaatcaactggcttcaatctacttctcccgccgccgggaaaaaaggcgggagaagccccggcaggtttgaagctgcttcttcgaatttgcaattcaatatgaaaatcacctcggagctggtaaaaagaggcctaacccctgtctttagatttacagtccaatgcttcactcagccattttacctcacccccactgatgttcgccgaccgttgactattctctacaaaccacaaagacattggaacactatacctattattcggcgcatgagctggagtcctaggcacagctctaagcctccttattcgagccgagctgggccagccaggcaaccttctaggtaacgaccacatctacaacgttatcgtcacagcccatgcatttgtaataatcttcttcatagtaatacccatcataatcggaggctttggcaactgactagttcccctaataatcggtgcccccgatatggcgtttccccgcataaacaacataagcttctgactcttacctccctctctcctactcctgctcgcatctgctatagtggaggccggagcaggaacaggttgaacagtctaccctcccttagcagggaactactcccaccctggagcctccgtagacctaaccatcttctccttacacctagcaggtgtctcctctatcttaggggccatcaatttcatcacaacaattatcaatataaaaccccctgccataacccaataccaaacgcccctcttcgtctgatccgtcctaatcacagcagtcctacttctcctatctctcccagtcctagctgctggcatcactatactactaacagaccgcaaccttaacaccaccttcttcgaccccgccggaggaggagaccccattctataccaacacctattctgatttttcggtcaccctgaagtttatattcttatcctaccaggcttcggaataatctcccatattgtaacttactactccggaaaaaaagaaccatttggatacataggtatggtctgagctatgatatcaattggcttcctagggtttatcgtgtgagcacaccatatatttacagtaggaatagacgtagacacacgagcatatttcacctccgccaccataatcatcgctatccccaccggcgtcaaagtatttagctgactcgccacactccacggaagcaatatgaaatgatctgctgcagtgctctgagccctaggattcatctttcttttcaccgtaggtggcctgactggcattgtattagcaaactcatcgctagacatcgtactacacgacacgtactacgttgtagctcacttccactatgtcctatcaataggggctgtatttgccatcataggaggcttcattcactgatttcccctattctcaggctacaccctagaccaaacctacgccaaaatccatttcgctatcatattcatcggcgtaaatctaactttcttcccacaacactttctcggcctatccggaatgccccgacgttactcggactaccccgatgcatacaccacatgaaatatcctatcatctgtaggctcattcatttctctaacagcagtaatattaataattttcatgatttgagaagccttcgcttcgaagcgaaaagtcctaatagtagaagaaccctccataaacctggagtgactacatggatgccccccaccctaccacacattcgaagaacccgtatacataaaatctagacaaaaaaggaaggaatcgaaccccccaaagctggtttcaagccaaccccatggcctccatgactttttcaaaaagatattagaaaaaccatttcataactttgtcaaagttaaattataggctaaatcctatatatcttaatggcacatgcagcgcaagtaggtctacaagacgctacttcccctatcatagaagagcttatcacctttcatgatcacgccctcataatcattttccttatctgcttcctagtcctgtatgcccttttcctaacactcacaacaaaactaactaatactaacatctcagacgctcaggaaatagaaaccgtctgaactatcctgcccgccatcatcctagtcctcatcgccctcccatccctacgcatcctttacataacagacgaggtcaacgatccctctcttaccatcaaatcaattggccaccaatggtactgaacctacgagtacaccgactacggcggactaatcttcaactcctacatacttcccccattattcctagaaccaggcgacctgcgactccttgacgttgacaatcgagtagtactcccgattgaagcccccattcgtataataattacatcacaagacgtcttgcactcatgagctgtccccacattaggcttaaaaacagatgcaattcccggacgtctaaaccaaaccactttcaccgctacacgaccgggggtatactacggtcaatgctctgaaatctgtggagcaaaccacagtttcatgcccatcgtcctagaattaattcccctaaaaatctttgaaatggggcccgtatttaccctatagcaccccctctaccccctctagagcccactgtaaagctaacttagcattaaccttttaagttaaagattaagagaaccaacacctctttacagtgaaatgccccaactaaatactaccgtatggcccaccataattacccccatactccttacactattcctcatcacccaactaaaaatattaaacacaaactaccacttacctccctcaccaaagcccataaaaataaaaaattataacaaaccctgagaaccaaaatgaacgaaaatctgttcgcttcattcattgcccccacaatcctaggcctacccgccgcagtactgatcattctatttccccctctattgatccccacctccaaatatctcatcaacaaccgactaattaccacccaacaatgactaatcaaactaacctcaaaacaaatgatagccatacacaacactaaaggacgaacctgatctcttatactagtatccttaatcatttttattgccacaactaacctcctcggactcctgcctcactcatttacaccaaccacccaactatctataaacctagccatggccatccccttatgagcgggcgcagtgattataggctttcgctctaagattaaaaatgccctagcccacttcttaccacaaggcacacctacaccccttatccccatactagttattatcgaaaccatcagcctactcattcaaccaatagccctggccgtacgcctaaccgctaacattactgcaggccacctactcatgcacctaattggaagcgccaccctagcaatatcaaccattaaccttccctctacacttatcatcttcacaattctaattctactgactatcctagaaatcgctgtcgccttaatccaagcctacgttttcacacttctagtaagcctctacctgcacgacaacacataatgacccaccaatcacatgcctatcatatagtaaaacccagcccatgacccctaacaggggccctctcagccctcctaatgacctccggcctagccatgtgatttcacttccactccataacgctcctcatactaggcctactaaccaacacactaaccatataccaatgatggcgcgatgtaacacgagaaagcacataccaaggccaccacacaccacctgtccaaaaaggccttcgatacgggataatcctatttattacctcagaagtttttttcttcgcaggatttttctgagccttttaccactccagcctagcccctaccccccaactaggagggcactggcccccaacaggcatcaccccgctaaatcccctagaagtcccactcctaaacacatccgtattactcgcatcaggagtatcaatcacctgagctcaccatagtctaatagaaaacaaccgaaaccaaataattcaagcactgcttattacaattttactgggtctctattttaccctcctacaagcctcagagtacttcgagtctcccttcaccatttccgacggcatctacggctcaacattttttgtagccacaggcttccacggacttcacgtcattattggctcaactttcctcactatctgcttcatccgccaactaatatttcactttacatccaaacatcactttggcttcgaagccgccgcctgatactggcattttgtagatgtggtttgactatttctgtatgtctccatctattgatgagggtcttactcttttagtataaatagtaccgttaacttccaattaactagttttgacaacattcaaaaaagagtaataaacttcgccttaattttaataatcaacaccctcctagccttactactaataattattacattttgactaccacaactcaacggctacatagaaaaatccaccccttacgagtgcggcttcgaccctatatcccccgcccgcgtccctttctccataaaattcttcttagtagctattaccttcttattatttgatctagaaattgccctccttttacccctaccatgagccctacaaacaactaacctgccactaatagttatgtcatccctcttattaatcatcatcctagccctaagtctggcctatgagtgactacaaaaaggattagactgagccgaattggtatatagtttaaacaaaacgaatgatttcgactcattaaattatgataatcatatttaccaaatgcccctcatttacataaatattatactagcatttaccatctcacttctaggaatactagtatatcgctcacacctcatatcctccctactatgcctagaaggaataatactatcgctgttcattatagctactctcataaccctcaacacccactccctcttagccaatattgtgcctattgccatactagtctttgccgcctgcgaagcagcggtaggcctagccctactagtctcaatctccaacacatatggcctagactacgtacataacctaaacctactccaatgctaaaactaatcgtcccaacaattatattactaccactgacatgactctccaaaaaacacataatttgaatcaacacaaccacccacagcctaattattagcatcatccccctactattttttaaccaaatcaacaacaacctatttagctgttccccaaccttttcctccgaccccctaacaacccccctcctaatactaactacctgactcctacccctcacaatcatggcaagccaacgccacttatccagcgaaccactatcacgaaaaaaactctacctctctatactaatctccctacaaatctccttaattataacattcacagccacagaactaatcatattttatatcttcttcgaaaccacacttatccccaccttggctatcatcacccgatgaggcaaccagccagaacgcctgaacgcaggcacatacttcctattctacaccctagtaggctcccttcccctactcatcgcactaatttacactcacaacaccctaggctcactaaacattctactactcactctcactgcccaagaactatcaaactcctgagccaacaacttaatatgactagcttacacaatagcttttatagtaaagatacctctttacggactccacttatgactccctaaagcccatgtcgaagcccccatcgctgggtcaatagtacttgccgcagtactcttaaaactaggcggctatggtataatacgcctcacactcattctcaaccccctgacaaaacacatagcctaccccttccttgtactatccctatgaggcataattataacaagctccatctgcctacgacaaacagacctaaaatcgctcattgcatactcttcaatcagccacatagccctcgtagtaacagccattctcatccaaaccccctgaagcttcaccggcgcagtcattctcataatcgcccacggacttacatcctcattactattctgcctagcaaactcaaactacgaacgcactcacagtcgcatcataatcctctctcaaggacttcaaactctactcccactaatagctttttgatgacttctagcaagcctcgctaacctcgccttaccccccactattaacctactgggagaactctctgtgctagtaaccacgttctcctgatcaaatatcactctcctacttacaggactcaacatactagtcacagccctatactccctctacatatttaccacaacacaatggggctcactcacccaccacattaacaacataaaaccctcattcacacgagaaaacaccctcatgttcatacacctatcccccattctcctcctatccctcaaccccgacatcattaccgggttttcctcttgtaaatatagtttaaccaaaacatcagattgtgaatctgacaacagaggcttacgaccccttatttaccgagaaagctcacaagaactgctaactcatgcccccatgtctaacaacatggctttctcaacttttaaaggataacagctatccattggtcttaggccccaaaaattttggtgcaactccaaataaaagtaataaccatgcacactactataaccaccctaaccctgacttccctaattccccccatccttaccaccctcgttaaccctaacaaaaaaaactcatacccccattatgtaaaatccattgtcgcatccacctttattatcagtctcttccccacaacaatattcatgtgcctagaccaagaagtcattatctcgaactgacactgagccacaacccaaacaacccagctctccctaagcttcaaactagactacttctccataatattcatccctgtagcattgttcgttacatggtccatcatagaattctcactgtgatatataaactcagacccaaacattaatcagttcttcaaatatctactcattttcctaattaccatactaatcttagttaccgctaacaacctattccaactgttcatcggctgagagggcgtaggaattatatccttcttgctcatcagttgatgatacgcccgagcagatgccaacacagcagccattcaagcaatcctatacaaccgtatcggcgatatcggtttcatcctcgccttagcatgatttatcctacactccaactcatgagacccacaacaaatagcccttctaaacgctaatccaagcctcaccccactactaggcctcctcctagcagcagcaggcaaatcagcccaattaggtctccacccctgactcccctcagccatagaaggccccaccccagtctcagccctactccactcaagcactatagttgtagcaggagtcttcttactcatccgcttccaccccctagcagaaaatagcccactaatccaaactctaacactatgcttaggcgctatcaccactctgttcgcagcagtctgcgcccttacacaaaatgacatcaaaaaaatcgtagccttctccacttcaagtcaactaggactcataatagttacaatcggcatcaaccaaccacacctagcattcctgcacatctgtacccacgccttcttcaaagccatactatttatgtgctccgggtccatcatccacaaccttaacaatgaacaagatattcgaaaaataggaggactactcaaaaccatacctctcacttcaacctccctcaccattggcagcctagcattagcaggaatacctttcctcacaggtttctattccaaagaccacatcatcgaaaccgcaaacatatcatacacaaacgcctgagccctatctattactctcatcgctacctccctgacaagcgcctatagcactcgaataattcttctcaccctaacaggtcaacctcgcttccctacccttactaacattaacgaaaataaccccaccctactaaaccccattaaacgcctggcagccggaagcctattcgcaggatttctcattactaacaacatttcccccgcatcccccttccaaacaacaatccccctccacctaaaactcacagccctcgctgtcactttcctaggacttctaacagccctagacctcaactacctaaccaacaaacttaaaataaaatacccactatgcacattttatttctccaacatactcggattctaccctagcatcacacaccgcacaatcccctatctaggccttcttacgagccaaaacctgcccctactcctcctagacctaacctgactagaaaagctattacctaaaacaatttcacagcaccaaatctccacctccatcatcacctcaacccaaaaaggcataattaaactttacttcctctctttcttcttcccactcatcctaaccctactcctaatcacataacctattcccccgagcaatctcaattacaacatatacaccaacaaacaatgttcagccagtaactactactaatcaacgcccataatcatacaaagcccccgcaccaataggatcctcccgaatcaaccctgacccctctccttcataaattattcagcttcctacactattaaagtttaccacaaccaccaccccatcatactctttcacccacagcaccaatcctacctccatcgctaaccccactaaaacactcaccaagacctcaacccctgacccccatgcctcaggatactcctcaatagccatcggtgtagtatatccaaagacaaccatcattccccctaaataaattaaaaaaactattaaacccatataacctcccccaaaattcagaataataacacacccaaccacaccgctaacaatcaatactaaacccccataaataggagaaggcttagaagaaaaccccacaaaccccattactaaacccacactcaacagaaacaaagcatacatcattattctcgcacggactacaaccacgaccaatgatatgaaaaaccatcgttgtatttcaactacaagaacaccaatgaccccaatacgcaaaattagccccctaataaaattaattaaccactcattcatcgacctccccaccccatccaacatctccgcatgatgaaacttcggctcactccttggcgcctgcctgatcctccaaatcaccacaggactattcctagccatgcactactcaccagacgcctcaaccgccttttcatcaatcgcccacatcactcgagacgtaaattatggctgaatcatccgctaccttcacgccaatggcgcctcaatattctttatctgcctcttcctacacatcgggcgaggcctatattacggatcatttctctactcagaaacctgaaacatcggcattatcctcctgcttgcaaccatagcaacagccttcataggctatgtcctcccgtgaggccaaatatcattctgaggggccacagtaattacaaacttactatccgccatcccatacattgggacagacctagttcaatgaatctgaggaggctactcagtagacagtcccaccctcacacgattctttacctttcacttcatcttgcccttcattattgcagccctagcagcactccacctcctattcttgcacgaaacgggatcaaacaaccccctaggaatcacctcccattccgataaaatcaccttccacccttactacacaatcaaagacgccctcggcttacttctcttccttctctccttaatgacattaacactattctcaccagacctcctaggcgacccagacaattataccctagccaaccccttaaacacccctccccacatcaagcccgaatgatatttcctattcgcctacacaattctccgatccgtccctaacaaactaggaggcgtccttgccctattactatccatcctcatcctagcaataatccccatcctccatatatccaaacaacaaagcataatatttcgcccactaagccaatcactttattgactcctagccgcagacctcctcattctaacctgaatcggaggacaaccagtaagctacccttttaccatcattggacaagtagcatccgtactatacttcacaacaatcctaatcctaataccaactatctccctaattgaaaacaaaatactcaaatgggcctgtccttgtagtataaactaatacaccagtcttgtaaaccggagatgaaaacctttttccaaggacaaatcagagaaaaagtctttaactccaccattagcacccaaagctaagattctaatttaaactattctctgttctttcatggggaagcagatttgggtaccacccaagtattgactcacccatcaacaaccgctatgtatttcgtacattactgccagccaccatgaatattgcacggtaccataaatacttgaccacctgtagtacataaaaacccaatccacatcaaaaccctccccccatgcttacaagcaagtacagcaatcaaccttcaactatcacacatcaactgcaactccaaagccaccccttacccattaggatatcaacaaacctacccacccttaacagtacatagcacataaagccatttaccgtacatagcacattacagtcaaatcccttctcgtccccatggatgacccccctcagataggggtcccttgaccaccatcctccgtgaaatcaatatcccgcacaagagtgctactctcctcgctccgggcccataacacttgggggtagctaaagtgaactgtatccgacatctggttcctacttcagggccataaagcctaaatagcccacacgttccccttaaataagacatcacgatg

SEQ ID NO: 194 - DNA, 16571 bp, Homo sapiens mitochondrial
  3109: "n" refers to a nucleotide at position 3107 of the Cambridge Reference Sequence (CRS, Anderson et al. 1981 Nature 290:457-465), later determined to be absent from the human mtDNA sequence according to the revised CRS (rCRS, Andrews et al. 1999 Nature Genetics 23:147); "n" therefore represents a single nucleotide deletion at a position corresponding to nucleotide 3107 of SEQ ID NO:1 as provided herein.
gatcacaggtctatcaccctattaaccactcacgggagctctccatgcatttggtattttcgtctggggggtgtgcacgcgatagcattgcgagacgctggagccggagcaccctatgtcgcagtatctgtctttgattcctaccccatcccattatttatcgcacctacgttcaatattacaggcgaacatacctactaaagtgtgttaattaattaatgcttgtaggacataataataacaattgaatgtctgcacagccgctttccacacagacatcataacaaaaaatttccaccaaaccccccctcccccccgcttctggccacagcacttaaacacatctctgccaaaccccaaaaacaaagaaccctaacaccagcctaaccagatttcaaattttatcttttggcggtatgcacttttaacagtcaccccccaactaacacattattttcccctcccactcccatactactaatctcatcaatacaacccccgcccatcctacccagcacacacacaccgctgctaaccccataccccgaaccaaccaaaccccaaagacaccccccacagtttatgtagcttacctcctcaaagcaatacactgaaaatgtttagacgggctcacatcaccccataaacaaataggtttggtcctagcctttctattagctcttagtaagattacacatgcaagcatccccgttccagtgagttcaccctctaaatcaccacgatcaaaagggacaagcatcaagcacgcaacaatgcagctcaaaacgcttagcctagccacacccccacgggaaacagcagtgattaacctttagcaataaacgaaagtttaactaagctatactaaccccagggttggtcaatttcgtgccagccaccgcggtcacacgattaacccaagtcaatagaagccggcgtaaagagtgttttagatcaccccctccccaataaagctaaaactcacctgagttgtaaaaaactccagttgacacaaaataaactacgaaagtggctttaacatatctgaacacacaatagctaagacccaaactgggattagataccccactatgcttagccctaaacctcaacagttaaatcaacaaaactgctcgccagaacactacgagccacagcttaaaactcaaaggacctggcggtgcttcatatccctctagaggagcctgttctgtaatcgataaaccccgatcaacctcaccacctcttgctcagcctatataccgccatcttcagcaaaccctgatgaaggctacaaagtaagcgcaagtacccacgtaaagacgttaggtcaaggtgtagcccatgaggtggcaagaaatgggctacattttctaccccagaaaactacgatagcccttatgaaacttaagggtcgaaggtggatttagcagtaaactgagagtagagtgcttagttgaacagggccctgaagcgcgtacacaccgcccgtcaccctcctcaagtatacttcaaaggacatttaactaaaacccctacgcatttatatagaggagacaagtcgtaacatggtaagtgtactggaaagtgcacttggacgaaccagagtgtagcttaacacaaagcacccaacttacacttaggagatttcaacttaacttgaccgctctgagctaaacctagccccaaacccactccaccttactaccagacaaccttagccaaaccatttacccaaataaagtataggcgatagaaattgaaacctggcgcaatagatatagtaccgcaagggaaagatgaaaaattataaccaagcataatatagcaaggactaacccctataccttctgcataatgaattaactagaaataactttgcaaggagagccaaagctaagacccccgaaaccagacgagctacctaagaacagctaaaagagcacacccgtctatgtagcaaaatagtgggaagatttataggtagaggcgacaaacctaccgagcctggtgatagctggttgtccaagatagaatcttagttcaactttaaatttgcccacagaaccctctaaatccccttgtaaatttaactgttagtccaaagaggaacagctctttggacactaggaaaaaaccttgtagagagagtaaaaaatttaacacccatagtaggcctaaaagcagccaccaattaagaaagcgttcaagctcaacacccactacctaaaaaatcccaaacatataactgaactcctcacacccaattggaccaatctatcaccctatagaagaactaatgttagtataagtaacatgaaaacattctcctccgcataagcctgcgtcagattaaaacactgaactgacaattaacagcccaatatctacaatcaaccaacaagtcattattacccccactgtcaacccaacacaggcatgctcataaggaaaggttaaaaaaagtaaaaggaactcggcaaatcttaccccgcctgtttaccaaaaacatcacctctagcatcaccagtattagaggcaccgcctgcccagtgacacatgtttaacggccgcggtaccctaaccgtgcaaaggtagcataatcacttgttccttaaatagggacctgtatgaatggctccacgagggttcagctgtctcttacttttaaccagtgaaattgacctgcccgtgaagaggcgggcatgacacagcaagacgagaagaccctatggagctttaatttattaatgcaaacagtacctaacaaacccacaggtcctaaactactaaacctgcattaaaaatttcggttggggcgacctcggagcagaacccaacctccgagcagtacatgctaagacttcaccagtcaaagcgaactactatactcaattgatccaataacttgaccaacggaacaagttaccctagggataacagcgcaatcctattctagagtccatatcaacaatagggtttacgacctcgatgttggatcaggacatcccgatggtgcagccgctattaaaggttcgtttgttcaacgattaaagtcctacgtgatctgagttcagaccggagtaatccaggtcggtttctatctacnttcaaattcctccctgtacgaaaggacaagagaaataaggcctacttcacaaagcgccttcccccgtaaatgatatcatctcaacttagtattatacccacacccacccaagaacagggtttgttaagatggcagagcccggtaatcgcataaaacttaaaactttacagtcagaggttcaattcctcttcttaacaacatacccatggccaacctcctactcctcattgtacccattctaatcgcaatggcattcctaatgcttaccgaacgaaaaattctaggctatatacaactacgcaaaggccccaacgttgtaggcccctacgggctactacaacccttcgctgacgccataaaactcttcaccaaagagcccctaaaacccgccacatctaccatcaccctctacatcaccgccccgaccttagctctcaccatcgctcttctactatgaacccccctccccatacccaaccccctggttaacctcaacctaggcctcctatttattctagccacctctagcctagccgtttactcaatcctctgatcagggtgagcatcaaactcaaactacgccctgatcggcgcactgcgagcagtagcccaaacaatctcatatgaagtcaccctagccatcattctactatcaacattactaataagtggctcctttaacctctccacccttatcacaacacaagaacacctctgattactcctgccatcatgacccttggccataatatgatttatctccacactagcagagaccaaccgaacccccttcgaccttgccgaaggggagtccgaactagtctcaggcttcaacatcgaatacgccgcaggccccttcgccctattcttcatagccgaatacacaaacattattataataaacaccctcaccactacaatcttcctaggaacaacatatgacgcactctcccctgaactctacacaacatattttgtcaccaagaccctacttctgacctccctgttcttatgaattcgaacagcatacccccgattccgctacgaccaactcatacacctcctatgaaaaaacttcctaccactcaccctagcattacttatatgatatgtctccatacccattacaatctccagcattccccctcaaacctaagaaatatgtctgataaaagagttactttgatagagtaaataataggagcttaaacccccttatttctaggactatgagaatcgaacccatccctgagaatccaaaattctccgtgccacctatcacaccccatcctaaagtaaggtcagctaaataagctatcgggcccataccccgaaaatgttggttatacccttcccgtactaattaatcccctggcccaacccgtcatctactctaccatctttgcaggcacactcatcacagcgctaagctcgcactgattttttacctgagtaggcctagaaataaacatgctagcttttattccagttctaaccaaaaaaataaaccctcgttccacagaagctgccatcaagtatttcctcacgcaagcaaccgcatccataatccttctaatagctatcctcttcaacaatatactctccggacaatgaaccataaccaatactaccaatcaatactcatcattaataatcataatggctatagcaataaaactaggaatagccccctttcacttctgagtcccagaggttacccaaggcacccctctgacatccggcctgcttcttctcacatgacaaaaactagcccccatctcaatcatataccaaatctctccctcactaaacgtaagccttctcctcactctctcaatcttatccatcatagcaggcagttgaggtggattaaaccaaacccagctacgcaaaatcttagcatactcctcaattacccacataggatgaataatagcagttctaccgtacaaccctaacataaccattcttaatttaactatttatattatcctaactactaccgcattcctactactcaacttaaactccagcaccacgaccctactactatctcgcacctgaaacaagctaacatgactaacacccttaattccatccaccctcctctccctaggaggcctgcccccgctaaccggctttttgcccaaatgggccattatcgaagaattcacaaaaaacaatagcctcatcatccccaccatcatagccaccatcaccctccttaacctctacttctacctacgcctaatctactccacctcaatcacactactccccatatctaacaacgtaaaaataaaatgacagtttgaacatacaaaacccaccccattcctccccacactcatcgcccttaccacgctactcctacctatctccccttttatactaataatcttatagaaatttaggttaaatacagaccaagagccttcaaagccctcagtaagttgcaatacttaatttctgtaacagctaaggactgcaaaaccccactctgcatcaactgaacgcaaatcagccactttaattaagctaagcccttactagaccaatgggacttaaacccacaaacacttagttaacagctaagcaccctaatcaactggcttcaatctacttctcccgccgccgggaaaaaaggcgggagaagccccggcaggtttgaagctgcttcttcgaatttgcaattcaatatgaaaatcacctcggagctggtaaaaagaggcctaacccctgtctttagatttacagtccaatgcttcactcagccattttacctcacccccactgatgttcgccgaccgttgactattctctacaaaccacaaagacattggaacactatacctattattcggcgcatgagctggagtcctaggcacagctctaagcctccttattcgagccgagctgggccagccaggcaaccttctaggtaacgaccacatctacaacgttatcgtcacagcccatgcatttgtaataatcttcttcatagtaatacccatcataatcggaggctttggcaactgactagttcccctaataattggtgcccccgatatggcgtttccccgcataaacaacataagcttctgactcttacctccctctctcctactcctgctcgcatctgctatagtggaggccggagcaggaacaggttgaacagtctaccctcccttagcagggaactactcccaccctggagcctccgtagacctaaccatcttctccttacacctagcaggtgtctcctctatcttaggggccatcaatttcatcacaacaattatcaatataaaaccccctgccataacccaataccaaacgcccctcttcgtctgatccgtcctaatcacagcagtcctacttctcctatctctcccagtcctagctgctggcatcactatactactaacagaccgcaacctcaacaccaccttcttcgaccccgccggaggaggagaccccattctataccaacacctattctgatttttcggtcaccctgaagtttatattcttatcctaccaggcttcggaataatctcccatattgtaacttactactccggaaaaaaagaaccatttggatacataggtatggtctgagctatgatatcaattggcttcctagggtttatcgtgtgagcacaccatatatttacagtaggaatagacgtagacacacgagcatatttcacctccgctaccataatcatcgctatccccaccggcgtcaaagtatttagctgactcgccacactccacggaagcaatatgaaatgatctgctgcagtgctctgagccctaggattcatctttcttttcaccgtaggtggcctgactggcattgtattagcaaactcatcactagacatcgtactacacgacacgtactacgttgtagctcacttccactatgtcctatcaataggagctgtatttgccatcataggaggcttcattcactgatttcccctattctcaggctacaccctagaccaaacctacgccaaaatccatttcactatcatattcatcggcgtaaatctaaccttcttcccacaacactttctcggcctatccggaatgccccgacgttactcggactaccccgatgcatacaccacatgaaatatcctatcatctgtaggttcattcatttctctaacagcagtaatattaataattttcatgatttgagaagccttcgcttcgaagcgaaaagtcctaatagtagaagaaccctccataaacctggagtgactatatggatgccccccaccctaccacacattcgaagaacccgtatacataaaatctagacaaaaaaggaaggaatcgaaccccccaaagctggtttcaagccaaccccatggcctccatgactttttcaaaaagatattagaaaaaccatttcataactttgtcaaagttaaattataggctaaatcctatatatcttaatggcacatgcagcgcaagtaggtctacaagacgctacttcccctatcatagaagagcttatcacctttcatgatcacgccctcataatcattttccttatctgcttcctagtcctgtatgcccttttcctaacactcacaacaaaactaactaatactaacatctcagacgctcaggaaatagagaccgtctgaactatcctgcccgccatcatcctagtcctcatcgccctcccatccctacgcatcctttacataacagacgaggtcaacgatccctcccttaccatcaaatcaattggccaccaatggtactgaacctacgagtacaccgactacggcggactaatcttcaactcctacatacttcccccattattcctagaaccaggcgacctgcgactccttgacgttgacaatcgagtagtactcccgattgaagcccccattcgtataataattacatcacaagacgtcttgcactcatgagctgtccccacattaggcttaaaaacagatgcaattcccggacgtctaaaccaaaccactttcaccgctacacgaccgggggtatactacggtcaatgctctgaaatctgtggagcaaaccacagtttcatacccatcgtcctagaattaattcccctaaaaatctttgaaatagggcccgtatttaccctatagcaccccctctaccccctctagagcccactgtaaagctaacttagcattaaccttttaagttaaagattaagagaaccaacacctctttacagtgaaatgccccaactaaatactaccgtatggcccaccataattacccccatactccttacactattcctcatcacccaactaaaaatattaaacacaaactaccacctacctccctcaccaaagcccataaaaataaaaaattataacaaaccctgagaaccaaaatgaacgaaaatctgttcgcttcattcattgcccccacaatcctaggcctacccgccgcagtactgatcattctatttccccctctattgatccccacctccaaatatctcatcaacaaccgactaatcaccacccaacaatgactaatcaaactaacctcaaaacaaatgatagccatacacaacactaaaggacgaacctgatctcttatactagtatccttaatcatttttattgccacaactaacctcctcggactcctgcctcactcatttacaccaaccacccaactatctataaacctagccatggccatccccttatgagcgggcgcagtgattataggctttcgctctaagattaaaaatgccctagcccacttcttaccacaaggcacacctacaccccttatccccatactagttattatcgaaaccatcagcctactcattcaaccaacagccctggccgtacgcctaaccgctaacattactgcaggccacctactcatgcacctaattggaagcgccaccctagcaatatcaaccattaaccttccctctacacttatcatcttcacaattctaattctactgactatcctagaaatcgctgtcgccttaatccaagcctacgttttcacacttctagtaagcctctacctgcacgacaacacataatgacccaccaatcgcatgcctatcatatagtaaaacccagcccatgacccctaacaggggccctctcagccctcctaatgacctccggcctagccatgtgatttcacttccactccataacgctcctcatactaggcctactaaccaacacactaaccatataccaatgatggcgcgatgtaacacgagaaagcacataccaaggccaccacacaccacctgtccaaaaaggccttcgatacgggataatcctatttattacctcagaagtttttttcttcgcaggatttttctgagccttttaccactccagcctagcccctaccccccaactaggagggcactggcccccaacaggcatcaccccgctaaatcccctagaagtcccactcctaaacacatccgtattactcgcatcaggagtatcaatcacctgagctcaccatagtctaatagaaaacaaccgaaaccaaataattcaagcactgcttattacaattttactgggtctctattttaccctcctacaagcctcagagtacttcgagtctcccttcaccatttccgacggcatctacggctcaacattttttgtagccacaggcttccacggacttcacgtcattattggctcaactttcctcactatctgcttcatccgccaactaatatttcactttacatccaaacatcaccttggcttcgaagccgccgcctgatactggcattttgtagatgtggtttgactatttctgtatgtctccatctattgatgagggtcttactcttttagtataaatagtaccgttaacttccaattaactagttttgacaacattcaaaaaagagtaataaacttcgccttaattttaataatcaacaccctcctagccttactactaataatcattacattttgactaccacaactcaacggctacatagaaaaatccaccccttacgagtgcggcttcgaccctatatcccccgcccgcgtccctttctccataaaattcttcttagtagctattaccttcttattatttgatctagaaattgccctccttttacccctaccatgagccctacaaacaactaacctgccactaatagttatgtcatccctcttattaatcatcatcctagccctaagtctggcctatgagtgactacaaaaaggattagactgagccgaattggtatatagtttaaacaaaacgaatgatttcgactcattaaattatgataatcatatttaccaaatgcccctcatttacataaatattatactagcatttaccatctcacttctaggaatactagtatatcgctcacacctcatatcctccctactatgcctagaaggaataatactatcgctgttcattatagctactctcataaccctcaacacccactccctcttagccaatattgtgcctattgccatactagtctttgccgcctgcgaagcagcggtgggcctagccctactagtctcaatctccaacacatatggcctagactacgtacataacctaaacctactccaatgctaaaactaatcgtcccaacaattatattactaccactgacatgactttccaaaaaacacataatttgaatcaacacaaccacccacagcctaattattagcatcatccccctactattttttaaccaaatcaacaacaacctatttagctgttccctaaccttttcctccgaccccctaacaacccccctcctaatactaactacctgactcctacccctcacaatcatggcaagccaacgccacttatccagtgaaccactatcacgaaaaaaactctacctctctatactaatctccctacaaatctccttaattataacattcacagccacagaactaatcatattttatatcttcttcgaaaccacacttatccccaccttggctatcatcacccgatgaggcaaccagccagaacgcctgaacgcaggcacatacttcctattctacaccctagtaggctcccttcccctactcatcgcactaatttacactcacaacaccctaggctcactaaacattctactactcactctcactgcccaagaactatcaaactcctgagccaacaacttaatatgactagcttacacaatagcttttatagtaaagatacctctttacggactccacttatgactccctaaagcccatgtcgaagcccccatcgctgggtcaatagtacttgccgcagtactcttaaaactaggcggctatggtataatacgcctcacactcattctcaaccccctgacaaaacacatagcctaccccttccttgtactatccctatgaggcataattataacaagctccatctgcctacgacaaacagacctaaaatcgctcattgcatactcttcaatcagccacatagccctcgtagtaacagccattctcatccaaaccccctgaagcttcaccggcgcagtcattctcataatcgcccacggacttacatcctcattactattctgcctagcaaactcaaactacgaacgcactcacagtcgcatcataatcctctctcaaggacttcaaactctactcccactaatagctttttgatgacttctagcaagcctcgctaacctcgccttaccccccactattaacctactgggagaactctctgtgctagtaaccacattctcctgatcaaatatcactctcctactcacaggactcaacatactagtcacagccctatactccctctacatatttaccacaacacaatggggctcactcacccaccacattaacaacataaaaccctcattcacacgagaaaacaccctcatgttcatacacctatcccccattctcctcctatccctcaaccccgacatcattaccgggttttcctcttgtaaatatagtttaaccaaaacatcagattgtgaatctgacaacagaggcttacgaccccttatttaccgagaaagctcacaagaactgctaactcatgcccccatgtctaacaacatggctttctcaacttttaaaggataacagctatccattggtcttaggccccaaaaattttggtgcaactccaaataaaagtaataaccatgcacactactataaccaccctaaccctgacttccctaattccccccatccttaccaccctcgttaaccctaacaaaaaaaactcatacccccattatgtaaaatccattgtcgcatccacctttattatcagtctcttccccacaacaatattcatgtgcctagaccaagaagttattatctcgaactgacactgagccacaacccaaacaacccagctctccctaagcttcaaactagactacttctccataatattcatccctgtagcattgttcgttacatggtccatcatagaattctcactgtgatatataaactcagacccaaacattaatcagttcttcaagtatctactcattttcctaattaccatactaatcttagttaccgctaacaacctattccaactgttcatcggctgagagggcgtaggaattatatccttcttgctcatcagttgatgatacgcccgagcagatgccaacacagcagccattcaagcaatcctatacaaccgtatcggcgatatcggtttcatcctcgccttagcatgatttatcctacactccaactcatgagacccacaacaaatagcccttctaaacgctaatccaagcctcaccccactactaggcctcctcctagcagcagcaggcaaatcagcccaattaggtctccacccctgactcccctcagccatagaaggccccaccccagtctcagccctactccactcaagcactatagttgtagcaggaatcttcttactcatccgcttccaccccctagcagaaaatagcccactaatccaaactctaacactatgcttaggcgctatcaccactctgttcgcagcagtctgcgcccttacacaaaatgacatcaaaaaaatcgtagccttctccacttcaagtcaactaggactcataatagttacaatcggcatcaaccaaccacacctagcattcctgcacatctgtacccacgccttcttcaaagccatactatttatgtgctccgggtccatcatccacaaccttaacaatgaacaagatattcgaaaaataggaggactactcaaaaccatacctctcacttcaacctccctcaccattggcagcctagcattagcaggaatacctttcctcacaggtttctactccaaagaccacatcatcgaaaccgcaaacatatcatacacaaacgcctgagccctatctattactctcatcgctacctccctaacaagcgcctatagcactcgaataattcttctcaccctaacaggtcaacctcgcttccctacccttactaacattaacgaaaataaccccaccctactaaaccccattaaacgcctgacagccggaagcctattcgcaggatttctcattactaacaacatttcccccgcatcccccttccaaacaacaatccccctctacctaaaactcacggccctcgctgtcactttcctaggacttctaacagccctagacctcaactacctaaccaacaaacttaaaataaaatccccactatgcacattttatttctccaacatactcggattctaccctagcatcacacaccgcacaatcccctatctaggccttcttacgagccaaaacctgcccctactcctcctagacctaacctgactagaaaagctattacctaaaacaatttcacagcaccaaatctccacctccatcatcacctcaacccaaaaaggcataattaaactttacttcctctctttcttcttcccactcatcctaaccctactcctaatcacataacctattcccccgagcaatctcaattacaatatatacaccaacaaacaatgttcaaccagtaactactactaatcaacgcccataatcatacaaagcccccgcaccaataggatcctcccgaatcaaccctgacccctctccttcataaattattcagcttcctacactattaaagtttaccacaaccaccaccccatcatactctttcacccacagcaccaatcctacctccatcgctaaccccactaaaacactcaccaagacctcaacccctgacccccatgcctcaggatactcctcaatagccatcgctgtagtatatccaaagacaaccatcattccccctaaataaattaaaaaaactattaaacccatataacctcccccaaaattcagaataataacacacccgaccacgccgctaacaatcaatactaaacccccataaataggagaaggcttagaagaaaaccccacaaaccccattactaaacccacactcaacagaaacaaagcatacatcattattctcgcacggactacaaccacgaccaatgatatgaaaaaccatcgttgtatttcaactacaagaacaccaatgaccccaatacgcaaaattaaccccctaataaaattaattaaccactcattcatcgacctccccaccccatccaacatctccgcatgatgaaacttcggctcactccttggcgcctgcctgatcctccaaatcaccacaggactattcctagccatgcactactcaccagacgcctcaaccgccttttcatcaatcgcccacatcactcgagacgtaaattatggctgaatcatccgctaccttcacgccaatggcgcctcaatattctttatctgcctcttcctacacatcgggcgaggcctatattacggatcatttctctactcagaaacctgaaacatcggcattatcctcctgcttgcaactatagcaacagccttcataggctatgtcctcccgtgaggccaaatatcattctgaggggccacagtaattacaaacttactatccgccatcccatacattgggacagacctagtccaatgaatctgaggaggctactcagtagacagtcccaccctcacacgattctttacctttcacttcatcttacccttcattattgcagccctagcagcactccacctcctattcttgcacgaaacgggatcaaacaaccccctaggaatcacctcccattccgataaaatcaccttccacccttactacacaatcaaagacgccctcggcttacttctcttccttctctccttaatgacattaacactattctcaccagacctcctaggcgacccagacaattataccctagccaaccccttaaacacccctccccacatcaagcccgaatgatatttcctattcgcctacacaattctccgatccgtccctaacaaactaggaggcgtccttgccctattactatccatcctcatcctagcaataatccccatcctccatatatccaaacaacaaagcataatatttcgcccactaagccaatcactttattgactcctagccgcagacctcctcattctaacctgaatcggaggacaaccagtaagctacccctttaccatcattggacaagtagcatccgtactatacttcacaacaatcctaatcctaataccaactatctccctaattgaaaacaaaatactcaaatgggcctgtccttgtagtataaactaatacaccagtcttgtaaaccggagatgaaaacctttttccaaggacaaatcagagaaaaagtctttaactccaccattagcacccaaagctaagattctaatttaaactattctctgttctttcatggggaagcagatttgggtaccacccaagtattgactcacccatcaacaaccgctatgtatttcgtacattactgccagccaccatgaatattgtacggtaccataaatacttgaccacctgtagtacataaaaacccaatccacatcaaaacccccccctcatgcttacaagcaagtacagcaatcaaccttcaactatcacacatcaactgcaactccaaagccacccctcacccactaggatatcaacaaacctacccatccttaacagtacatagtacataaagccatttaccgtacatagcacattacagtcaaatcccttctcgcccccatggatgacccccctcagataggagtcccttgaccaccatcctccgtgaaatcaatatcccgcacaagagtgctactctcctcgctccgggcccataacacttgggggtagctaaagtgaactgtatccgacatctggttcctacttcagggtcataaagcctaaatagcccacacgttccccttaaataagacatcacgatg

SEQ ID NO: 195 - DNA, 16570 bp, Homo sapiens mitochondrial
  3105: "n" refers to a nucleotide at position 3107 of the Cambridge Reference Sequence (CRS, Anderson et al. 1981 Nature 290:457-465), later determined to be absent from the human mtDNA sequence according to the revised CRS (rCRS, Andrews et al. 1999 Nature Genetics 23:147); "n" therefore represents a single nucleotide deletion at a position corresponding to nucleotide 3107 of SEQ ID NO:1 as provided herein.
gatcacaggtctatcaccctattaaccactcacgggagctctccatgcatttggtattttcgtctggggggtgtgcacgcgatagcattgcgagacgctggagccggagcaccctatgtcgcagtatctgtctttgattcctgcctcatcccattatttatcgcacctacgttcaatattataggagaccatacctattaaagtgtgttaattaattaatgcttgtaggacataataataacaattaaatgtctgcacagccgctttccacacagacatcataacaaaaaatttccgccaaaccccccctcccccaccttctggccacagcacttaaacacatctctgccaaaccccaaaaacaaagaaccctaacaccagcctaaccagatttcaaattttatcttttggcggtatgcacttttaacagtcaccccccaactaacacattattttcccctcccactcccatactactaatctcatcaatacaacccccgcccatcctacccagcacacacaccgctgctaaccccataccccgaaccaaccaaaccccaaagacaccccccacagtttatgtagcttacctcctcaaagcaatacactgaaaatgtttagacgggctcacatcaccccataaacaaataggtttggtcctagcctttctattagctcttagtaagattacacatgcaagcatccccgttccagtgagttcaccctctaaatcaccacgatcaaaagggacaagcatcaagcacgcaacaatgcagctcaaaacgcttagcctagccacacccccacgggaaacagcagtgataaacctttagcaataaacgaaagtttaactaagctatactaaccccagggttggtcaatttcgtgccagccaccgcggtcacacgattaacccaagtcaatagaagccggcgtaaagagtgttttagatcaccccctccccaataaagctaaaactcacctgagttgtaaaaaactccagttgacacaaaataaactacgaaagtggctttaacatatctgaacacacaatagctaagacccaaactgggattagataccccactatgcttagccctaaacctcaacagttaaatcaacaaaactgctcgccagaacactacgagccacagcttaaaactcaaaggacctggcggtgcttcatatccctctagaggagcctgttctgtaatcgataaaccccgatcaacctcaccacctcttgctcagcctatataccgccatcttcagcaaaccctgatgaaggccacaaagtaagcgcaagtacccacgtaaagacgttaggtcaaggtgtagcccatgaggtggcaagaaatgggctacattttctaccccagaaaactacgatagcccttatgaaacttaagggtcgaaggtggatttagcagtaaactgagagtagagtgcttagttgaacagggccctgaagcgcgtacacaccgcccgtcaccctcctcaagtatacttcaaaggacatttaactaaaacccctacgcatttatatagaggagacaagtcgtaacatggtaagtgtactggaaagtgcacttggacgaaccagagtgtagcttaacacaaagcacccaacttacacttaggagatttcaacttaacttgaccgctctgagctaaacctagccccaaacccactccaccttactaccagacaaccttagccaaaccatttacccaaataaagtataggcgatagaaattgaaacctggcgcaatagatatagtaccgcaagggaaagatgaaaaattataaccaagcataatatagcaaggactaacccctataccttctgcataatgaattaactagaaataactttgcaaggagagccaaagctaagacccccgaaaccagacgagctacctaagaacagctaaaagagcacacccgtctatgtagcaaaatagtgggaagatttataggtagaggcgacaaacctaccgagcctggtgatagctggttgtccaagatagaatcttagttcaactttaaatttgcccacagaaccctctaaatccccttgtaaatttaactgttagtccaaagaggaacagctctttggacactaggaaaaaaccttgtagagagagtaaaaaatttaacacccatagtaggcctaaaagcagccaccaattaagaaagcgttcaagctcaacacccactacctaaaaaatcccaaacatataactgaactcctcacacccaattggaccaatctatcaccctatagaagaactaatgttagtataagtaacatgaaaacattctcctccgcataagcctgcgtcagattaaaacactgaactgacaattaacagcccaatatctacaatcaccaacaagtcattattaccctcactgtcaacccaacacaggcatgctcataaggaaaggttaaaaaaagtaaaaggaactcggcaaatcttaccccgcctgtttaccaaaaacatcacctctagcatcaccagtattagaggcaccgcctgcccagtgacacatgtttaacggccgcggtaccctaaccgtgcaaaggtagcataatcacttgttccttaaatagggacctgtatgaatggctccacgagggttcagctgtctcttacttttaaccagtgaaattgacctgcccgtgaagaggcgggcatgacacagcaagacgagaagaccctatggagctttaatttattaatgcaaacaatacctaacaaacccacaggtcctaaactaccaaacctgcattaaaaatttcggttggggcgacctcggagcagaacccaacctccgagcagtacatgctaagacttcaccagtcaaagcgaactaccatactcaattgatccaataacttgaccaacggaacaagttaccctagggataacagcgcaatcctattctagagtccatatcaacaatagggtttacgacctcgatgttggatcaggacatcccgatggtgcagccgctattaaaggttcgtttgttcaacgattaaagtcctacgtgatctgagttcagaccggagtaatccaggtcggtttctatctacnttcaaattcctccctgtacgaaaggacaagagaaataaggcctacttcacaaagcgccttcccccgtaaatgatatcatctcaacttagtattatacccacacccacccaagaacagggtttgttaagatggcagagcccggtaatcgcataaaacttaaaactttacagtcagaggttcaattcctcttcttaacaacatacccatggccaacctcctactcctcattgtacccattctaatcgcaatggcattcctaatgcttaccgaacgaaaaattctaggctatatacaactacgcaaaggccccaacgttgtaggcccctacgggctactacaacccttcgctgacgccataaaactcttcaccaaagagcccctaaaacccgccacatctaccatcaccctctacatcaccgccccgaccttagctctcaccatcgctcttctactatgaacccccctccccatacccaaccccctggttaacctcaacctaggcctcctatttattctagccacctctagcctagccgtttactcaatcctctgatcaggatgagcatcaaactcaaactacgccctgatcggcgcactgcgagcagtagcccaaacaatctcatatgaagtcaccctagccatcattctactatcaacattactaataagtggctcctttaacctctcctcccttatcacaacacaagaacacctctgattactcctgccatcatggcccttggccataatatgatttatctccacactagcagagaccaaccgaacccccttcgaccttgccgaaggggagtccgaactagtctcaggcttcaacatcgaatacgccgcaggccccttcgccctattcttcatagccgaatacacaaacattattataataaacaccctcaccactacaatcttcctaggaacaacatatgacgcactctcccctgaactctacacaacatattttgtcaccaagaccctacttctgacctccctgttcttatgaattcgaacagcatacccccgattccgctacgaccaactcatacacctcctatgaaaaaacttcctaccactcaccctagcattacttatatgatatgtctccatacccattacaatctccagcattccccctcaaacctaagaaatatgtctgataaaagagttactttgatagagtaaataataggagcttaaacccccttatttctaggactatgagaatcgaacccatccctgagaatccaaaattctccgtgccacctatcacaccccatcctaaagtaaggtcagctaaataagctatcgggcccataccccgaaaatgttggttatacccttcccgtactaattaatcccctggcccaacccgtcatctactctaccatctttgcaggcacactcatcacagcgctaagctcgcactgattttttacctgagtaggcctagaaataaacatgctagcttttattccagttctaaccaaaaaaataaaccctcgttccacagaagctgccatcaagtatttcctcacgcaagcaaccgcatccataatccttctaatagctatcctcttcaacaatatactctccggacaatgaaccataaccaatactaccaatcaatactcatcattaataatcataatggctatagcaataaaactaggaatagccccctttcacttctgagtcccagaggttgcccaaggcacccctctgacatccggcctgcttcttctcacatgacaaaaactagcccccatctcaatcatataccaaatctctccctcactaaacgtaagccttctcctcactctctcaatcttatccatcatagcaggcagttgaggtggattaaaccaaacccagctacgcaaaatcttagcatactcctcaattacccacataggatgaataatagcagttctaccgtacaaccctaacataaccattcttaatttaactatttatattatcctaactactaccgcattcctactactcaacttaaactccagcaccacgaccctactactatctcgcacctgaaacaagctaacatgactaacacccttaattccatccaccctcctctccctaggaggcctgcccccgctaaccggctttttgcccaaatgggccattatcgaagaattcacaaaaaacaatagcctcatcatccccaccatcatagccaccatcaccctccttaacctctacttctacctacgcctaatctactccacctcaatcacactactccccatatctaacaacgtaaaaataaaatgacagtttgaacatacaaaacccaccccattcctccccacactcatcgcccttaccacgctactcctacctatctccccttttatactaataatcttatagaaatttaggttaaatacagaccaagagccttcaaagcccccagtaagttgcaatacttaatttctgtaacagctaaggactgcaaaaccccactctgcatcaactgaacgcaaatcagccactttaattaagctaagcccttactagaccaatgggacttaaacccacaaacacttagttaacagctaagcaccctaatcaactggcttcaatctacttctcccgccgccgggaaaaaaggcgggagaagccccggcaggtttgaagctgcttcttcgaatttgcaattcaatatgaaaatcacctcggagctggtaaaaagaggcctaacccctgtctttagatttacagtccaatgcttcactcagccattttacctcacccccactgatgttcgccgaccgttgactattctctacaaaccacaaagacattgggacactatacctattattcggcgcatgagctggagtcctaggcacagctctaagcctccttattcgagccgagctgggccagccaggcaaccttctaggtaacgaccacatctacaacgtcatcgtcacagcccatgcatttgtaataatcttcttcatagtaatacccatcataatcggaggctttggcaactgactagttcccctaataatcggtgcccccgatatggcgtttccccgcataaacaacataagcttctgactcttacctccctctctcctactcctgctcgcatctgctatagtggaggccggagcaggaacaggttgaacagtctaccctcccttagcagggaactactcccaccctggagcctccgtagacctaaccatcttctccttacacctagcaggtgtctcctctatcttaggggccatcaatttcatcacaacaattatcaatataaaaccccctgccataacccaataccaaacgcccctcttcgtctgatccgtcctaatcacagcagtcctacttctcctatctctcccagtcctagctgctggcatcactatactactaacagaccgcaacctcaacaccaccttcttcgaccccgccggaggaggagaccccattctataccaacacctattctgatttttcggtcaccctgaagtttatattcttatcctaccaggcttcggaataatctcccatattgtaacttactactccggaaaaaaagaaccatttggatacataggtatggtctgagctatgatatcaattggcttcctagggtttatcgtgtgagcacaccatatatttacagtaggaatagacgtagacacacgagcatatttcacctccgctaccataatcatcgctatccccaccggcgtcaaagtatttagctgactcgccacactccacggaagcaatatgaaatgatctgctgcagtgctctgagccctaggattcatctttcttttcaccgtaggtggcctgactggcattgtattagcaaactcatcactagacatcgtactacacgacacgtactacgttgtagctcacttccactatgtcctatcaataggggctgtatttgccatcataggaggcttcattcactgatttcccctattctcaggctacaccctagaccaaacctacgccaaaatccatttcgctatcatattcatcggcgtaaatctaactttcttcccacaacactttctcggcctatccggaatgccccgacgttactcggactaccccgatgcatacaccacatgaaatatcctatcatctgtaggctcattcatttctctaacagcagtaatattaataattttcatgatttgagaagccttcgcttcgaagcgaaaagtcctaatagtagaagaaccctccataaacctggagtgactacatggatgccccccaccctaccacacattcgaagaacccgtatacataaaatctagacaaaaaaggaaggaatcgaaccccccaaagctggtttcaagccaaccccatggcctccatgactttttcaaaaagatattagaaaaaccatttcataactttgtcaaagttaaattataggctaaatcctatatatcttaatggcacatgcagcgcaagtaggtctacaagacgctacttcccctatcatagaagagcttatcacctttcatgatcacgccctcataatcattttccttatctgcttcctagtcctgtatgcccttttcctaacactcacaacaaaactaactaatactaacatctcagacgctcaggaaatagaaaccgtctgaactatcctgcccgccatcatcctagtcctcatcgccctcccatccctacgcatcctttacataacagacgaggtcaacgatccctcccttaccatcaaatcaattggccaccaatggtactgaacctacgagtacaccgactacggcggactaatcttcaactcctacatacttcccccattattcctagaaccaggcgacctgcgactccttgacgttgacaatcgagtagtactcccgattgaaacccccattcgtataataattacatcacaagacgtcttgcactcatgagctgtccccacattaggcttaaaaacagatgcaattcccggacgtctaaaccaaaccactttcaccgctacacgaccgggggtatactacggtcaatgctctgaaatctgtggagcaaaccacagtttcatgcccatcgtcctagaattaattcccctaaaagtctttgaaatagggcccgtatttaccctatagcatcccccctcccaccccctttagagcccactgtaaagctaacttagcattaaccttttaagttaaagattaagagaaccaacacctctttacagtgaaatgccccaactaaatactaccgtatggcccaccataattacccccatactccttacactattcctcatcacccaactaaaaatattaaacacaaactaccacttacctccctcaccaaagcccataaaaataaaaaattataacaaaccctgagaaccaaaatgaacgaaaatctgttcgcttcattcattgcccccacaatcctaggcctacccgccgcagtactgatcattctatttccccctctattgattcccacctccaaatatctcatcaacaaccgactaattaccacccaacaatgactaatcaaactaacctcaaaacaaatgatagccatacacaacactaaaggacgaacctgatctcttatactagtatccttaatcatttttattgccacaactaacctcctcggactcctgcctcactcatttacaccaaccacccaactatctataaacctagccatggccatccccttatgagcgggcgcagtgattataggctttcgctctaagattaaaaatgccctagcccacttcttaccacaaggcacacctacaccccttatccccatactagttattatcgaaaccatcagcctactcattcaaccaatagccctggccgtacgcctaaccgctaacattactgcaggccacctactcatgcacctaattggaagcgccaccctagcaatatcgaccattaaccttccctctacacttatcatcttcacaattctaattctactgactatcctagaaatcgctgtcgccttaatccaagcctacgttttcacacttctagtaagcctctacctgcacgacaacacataatgacccaccaatcacatgcctatcatatagtaaaacccagcccatgacccctaacaggggccctctcagccctcctaatgacctccggcctagccatgtgatttcacttccactccataacgctcctcatactaggcctactaaccaacacactaaccatataccaatgatggcgcgatgtaacacgagaaagcacataccaaggccaccacacaccacctgtccaaaaaggccttcgatacgggataatcctatttattacctcagaagtttttttcttcgcaggatttttctgagccttttaccactccagcctagcccctaccccccaactaggagggcactggcccccaacaggcatcaccccgctaaatcccctagaagtcccactcctaaacacatccgtattactcgcatcaggagtatcaatcacctgagctcaccatagtctaatagaaaacaaccgaaaccaaataattcaagcactgcttattacaattttactgggtctctattttaccctcctacaagcctcagagtacttcgagtctcccttcaccatttccgacggcatctacggctcaacattttttgtagccacaggcttccacggactccacgtcattattggctcaactttcctcactatctgcctcatccgccaactaatatttcactttacatccaaacatcactttggcttcgaagccgccgcctgatactggcattttgtagatgtggtttgactatttctgtatgtctccatctattgatgagggtcttactcttttagtataaatagtaccgttaacttccaattaactagttttgacaacattcaaaaaagagtaataaacttcgccttaattttaataaccaacaccctcctagccttactactaataattattacattttgactaccacaactcaacggctacatagaaaaatccaccccttacgagtgcggcttcgaccctatatcccccgcccgcgtccctttctccataaaattcttcttagtagctattaccttcttattatttgatctagaaattgccctccttttacccctaccatgagccctacaaacaactaacctgccactaatagctatgtcatccctcttattaatcatcatcctagccctaagtctggcctatgagtgactacaaaaaggattagactgagccgaattggtatatagtttaaacaaaacgaatgatttcgactcattaaattatgataatcatatttaccaaatgcccctcatttacataaatattatactagcatttaccatctcacttctaggaatactagtatatcgctcacacctcatatcctccctactatgcctagaaggaataatactatcactgttcattatagctactctcataaccctcaacacccactccctcttagccaatattgtgcctattgccatactagtctttgccgcctgcgaagcagcggtaggcctagccctactagtctcaatctccaacacatatggcctagactacgtacataacctaaacctactccaatgctaaaactaatcgtcccaacaattatattactaccactgacatgactctccaaaaaacacataatttgaatcaacacaaccacccacagcctaattattagcatcatccccctactattttttaaccaaatcaacaacaacctatttagctgttccccaaccttttcctccgaccccctaacaacccccctcctaatactaactacctgactcctacccctcacaatcatggcaagccaacgccacttatccagtgaaccactatcacgaaaaaaactctacctctctatactaatctccctacaaatctccttaattataacattcacagccacagaactaatcatattttatatcttcttcgaaaccacacttatccccaccttggctatcatcacccgatgaggcaaccagccagaacgcctgaacgcaggcacatacttcctattctacaccctagtaggctcccttcccctactcatcgcactaatttacactcacaacaccctaggctcactaaacattctactactcactctcactgcccaagaactatcaaactcctgagccaacaacttaatatgactagcttacacaatagcttttatagtaaagatacctctttacggactccacttatgactccctaaagcccatgtcgaagcccccatcgctgggtcaatagtacttgccgcagtactcttaaaactaggcggctatggtataatacgcctcacactcattctcaaccccctgacaaaacacatagcctaccccttccttgtactatccctatgaggcataattataacaagctccatctgcctacgacaaacagacctaaaatcactcattgcatactcttcaatcagccacatagccctcgtagtaacagccattctcatccaaaccccctgaagcttcaccggcgcagtcattctcataatcgcccacggacttacatcctcattactattctgcctagcaaactcaaactacgaacgcactcacagtcgcatcataatcctctctcaaggacttcaaactctactcccactaatagctttttgatgacttctagcaagcctcgctaacctcgccttaccccccactattaacctactgggagaactctccgtgctagtaaccacgttctcctgatcaaatatcactctcctacttacaggactcaacatactagtcacagccctatactccctctacatatttaccacaacacaatggggctcactcacccaccacattaacaacataaaaccctcattcacacgagaaaacaccctcatgttcatacacctatcccccattctcctcctatccctcaaccccgacatcattaccgggttttcctcttgtaaatatagtttaaccaaaacatcagattgtgaatctgacaacagaggcttacgaccccttatttaccgagaaagctcacaagaactgctaactcatgcccccatgtctaacaacatggctttctcaacttttaaaggataacagctatccattggtcttaggccccaaaaattttggtgcaactccaaataaaagtaataaccatgcacactactataaccaccctaaccctgacttccctaattccccccatccttaccaccctcgttaaccctaacaaaaaaaactcatacccccattatgtaaaatccattgtcgcatccacctttattatcagtctcttccccacaacaatattcatgtgcctagaccaagaagttattatctcgaactgacactgagccacaacccaaacaacccagctctccctaagcttcaaactagactacttctccataatattcatccctgtagcattgttcgttacatggtccatcatagaattctcactgtgatatataaactcagacccaaacattaaccagttcttcaaatatctactcattttcctaattaccatactaatcttagttaccgctaacaacctattccaactgttcatcggctgagagggcgtaggaattatatccttcttgctcatcagttgatggtacgcccgagcagatgccaacacagcagccattcaagcaatcctatacaaccgtatcggcgatatcggtttcatcctcgccttagcatgatttatcctacactccaactcatgagacccacaacaaatagcccttctaaacgctaatccaagcctcaccccactactaggcctcctcctagcagcagcaggcaaatcagcccaattaggtctccacccctgactcccctcagccatagaaggccccaccccagtctcagccctactccactcaagcactatagttgtagcaggagtcttcttactcatccgcttccaccccctagcagaaaatagcccactaatccaaactctaacactatgcttaggcgctatcaccactctgttcgcagcagtctgcgcccttacacaaaatgacatcaaaaaaatcgtagccttctccacttcaagtcaactaggactcataatagttacaatcggcatcaaccaaccacacctagcattcctgcacatctgtacccacgccttcttcaaagccatactatttatgtgctccgggtccatcatccacaaccttaacaatgaacaagatattcgaaaaataggaggactactcaaaaccatacctctcacttcaacctccctcaccattggcagcctagcattagcaggaatgcctttcctcacaggtttctattccaaagaccacatcatcgaaaccgcaaacatatcatacacaaacgcctgagccctatctattactctcatcgctacctccctgacaagcgcctatagcactcgaataattcttctcaccctaacaggtcaacctcgcttccctacccttactaacattaacgaaaataaccccaccctactaaaccccattaaacgcctggcagccggaagcctattcgcaggatttctcattactaacaacatttcccccgcatcccccttccaaacaacaatccccctccacctaaaactcacagccctcgctgtcactttcctaggacttctaacagccctagacctcaactacctaaccaacaaacttaaaataaaatccccactatgcacattttatttctccaacatactcggattctaccctagcatcacacaccgcacaatcccctatctaggccttcttacgagccaaaacctgcccctactcctcctagaccaaacctgactagaaaagctattacctaaaacaatttcacagcaccaaatctccacctccatcatcacctcaacccaaaaaggcataattaaactttacttcctctctttcttcttcccactcatcctaaccctactcctaatcacatagcctattcccccgagcaatctcaattacaacatatacaccaacaaacaatgttcaaccagtaactactactaatcaacgcccataatcatacaaagcccccgcaccaataggatcctcccgaatcaaccctgacccctctccttcataaattattcagcttcctacactattaaagtttaccacaaccactaccccatcatactctttcacccacagcaccaatcctacctccatcgctaaccccgctaaaacactcaccaagacctcaacccctgacccccatgcctcaggatactcctcaatagccatcggtgtagtatatccaaagacaaccatcattccccctaaataaattaaaaaaactattaaacccatataacctcccccaaaattcagaataataacacacccaaccacaccgctaacaatcaatactaaacccccataaataggagaaggcttagaagaaaaccccacaaaccccattactaaacccacactcaacagaaacaaagcatacatcattattctcgcacggactacaaccacgaccaatgatatgaaaaaccatcgttgtatttcaactacaagaacaccaatgaccccaatacgcaaaattaaccccctaataaaattaattaaccactcattcatcgacctccccaccccatccaacatctccgcatgatgaaacttcggctcactccttggcgcctgcctgatcctccaaatcaccacaggactattcctagccatgcactattcaccagacgcctcaaccgccttttcatcaatcgcccacatcactcgagacgtaaattatggctgaatcatccgctaccttcacgccaatggcgcctcaatattctttatctgtctcttcctacacatcgggcgaggcctatattacggatcatttctctactcagaaacctgaaacatcggcattatcctcctgcttgcaactatagcaacagccttcataggctatgtcctcccgtgaggccaaatgtcattctgaggggccacagtaattacaaacttactatccgccatcccatacattgggacagacctagttcaatgaatctgaggaggctactcagtagacagtcccaccctcacacgattctttacctttcacttcatcttacccttcattattgcagccctagcagcactccacctcctattcttgcacgaaacgggatcaaacaaccccctaggaatcacctcccattccgataaaatcaccttccacccttactacacaatcaaagacgccctcggcttacttctcttccttctctccttaatgacattaacactattctcaccagacctcctaggcgacccagacaattataccctagccaaccccttaaacacccctccccacatcaagcccgaatgatatttcctattcgcctacacaattctccgatccgtccctaacaaactaggaggcgtccttgccctattactatccatcctcatcctagcaataatccccatcctccatatatccaaacaacaaagcataatatttcgcccactaagccaatcactttattgactcctagccgcagacctcctcattctaacctgaatcggaggacaaccagtaagctacccttttaccatcattggacaagtagcatccgtactatacttcacaacaatcctaatcctaataccaactatctccctaattgaaaacaaaatactcaaatgggcctgtccttgtagtataaactaatacaccagtcttgtaaaccggagatgaaaacctttttccaaggacaaatcagagaaaaagtctttaactccaccattagcacccaaagctaagattctaatttaaactattctctgttctttcatggggaagcagatttgggtaccacccaagtattgactcacccatcaacaaccgccatgtatttcgtacattactgccagccaccatgaatattgtacagtaccataaatacttgaccacctgtagtacataaaaacccaatccacatcaaaaccctccccccatgcttacaagcaagtacagcaatcaaccttcaactatcacacatcagctgcaactccaaagccacccctcacccactaggatatcaacaaacctactcatccttaacagtacatagcacataaagccatttaccgtacatagcacattacagtcaaatcccttctcgtccccatggatgacccccctcagataggggtcccttgaccaccatcctccgtgaaatcaatatcccgcacaagagtgctactctcctcgctccgggcccataacacttgggggtagctaaagtgaactgtatccgacatctggttcctacttcagggccataaagcctaaatagcccacacgttccccttaaataagacatcacgatg

SEQ ID NO: 196 - DNA, 16570 bp, Homo sapiens mitochondrial
  misc_feature 3108: "n" refers to a nucleotide at position 3107 of the Cambridge Reference Sequence (CRS, Anderson et al. 1981 Nature 290:457-465), later determined to be absent from the human mtDNA sequence according to the revised CRS (rCRS, Andrews et al. 1999 Nature Genetics 23:147); "n" therefore represents a single nucleotide deletion at a position corresponding to nucleotide 3107 of SEQ ID NO:1 as provided herein.
  16310: n = A,T,C or G
gatcacaggtctatcaccctattaaccactcacgggagctctccatgcatttggtattttcgtctggggggtgtgcacgcgatagcattgcgagacgctggagccggagcaccctatgtcgcagtatctgtctttgattcctgccccatcccattatttatcgcacctacgttcaatattacaggcgaacatacctactaaagtgtgttaattaattaatgcttgtaggacataataataacaattgaatgtctgcacagccgctttccacacagacatcataacaaaaaatttccaccaaaccccccctcccccgccttctggccacagcacttaaacacatctctgccaaaccccaaaaacaaagaaccctaacaccagcctaaccagatttcaaattttatcttttggcggtatgcacttttaacagtcaccccccaactaacacattattttcccctcccactcccatactactaatctcatcaatacaacccccgcccatcctacccagcacacacacaccgctgctaaccccataccccgaaccaaccaaaccccaaagacaccccccacagtttatgtagcttacctcctcaaagcaatacactgaaaatgtttagacgggctcacatcaccccataaacaaataggtttggtcctagcctttctattagctcttagtaagattacacatgcaagcatccccgttccagtgagttcaccctctaaatcaccacgatcaaaagggacaagcatcaagcacgcaacaatgcagctcaaaacgcttagcctagccacacccccacgggaaacagcagtgattaacctttagcaataaacgaaagtttaactaagctatactaaccccagggttggtcaatttcgtgccagccaccgcggtcacacgattaacccaagtcaatagaagccggcgtaaagagtgttttagatcaccccctccccaataaagctaaaactcacctgagttgtaaaaaactccagttgacacaaaataaactacgaaagtggctttaacatatctgaacacacaatagctaagacccaaactgggattagataccccactatgcttagccctaaacctcaacagttaaatcaacaaaactgctcgccagaacactacgagccacagcttaaaactcaaaggacctggcggtgcttcatatccctctagaggagcctgttctgtaatcgataaaccccgatcaacctcaccacctcttgctcagcctatataccgccatcttcagcaaaccctgatgaaggctacaaagtaagcgcaagtacccacgtaaagacgttaggtcaaggtgtagcccatgaggtggcaagaaatgggctacattttctaccccagaaaactacgatagcccttatgaaacttaagggtcgaaggtggatttagcagtaaactgagagtagagtgcttagttgaacagggccctgaagcgcgtacacaccgcccgtcaccctcctcaagtatacttcaaaggacatttaactaaaacccctacgcatttatatagaggagacaagtcgtaacatggtaagtgtactggaaagtgcacttggacgaaccagagtgtagcttaacacaaagcacccaacttacacttaggagatttcaacttaacttgaccgctctgagctaaacctagccccaaacccactccaccttactaccagacaaccttagccaaaccatttacccaaataaagtataggcgatagaaattgaaacctggcgcaatagatatagtaccgcaagggaaagatgaaaaattataaccaagcataatatagcaaggactaacccctataccttctgcataatgaattaactagaaataactttgcaaggagagccaaagctaagacccccgaaaccagacgagctacctaagaacagctaaaagagcacacccgtctatgtagcaaaatagtgggaagatttataggtagaggcgacaaacctaccgagcctggtgatagctggttgtccaagatagaatcttagttcaactttaaatttgcccacagaaccctctaaatccccttgtaaatttaactgttagtccaaagaggaacagctctttggacactaggaaaaaaccttgtagagagagtaaaaaatttaacacccatagtaggcctaaaagcagccaccaattaagaaagcgttcaagctcaacacccactacctaaaaaatcccaaacatataactgaactcctcacacccaattggaccaatctatcaccctatagaagaactaatgttagtataagtaacatgaaaacattctcctccgcataagcctgcgtcagattaaaacactgaactgacaattaacagcccaatatctacaatcaaccaacaagtcattattacccccactgtcaacccaacacaggcatgctcataaggaaaggttaaaaaaagtaaaaggaactcggcaaatcttaccccgcctgtttaccaaaaacatcacctctagcatcaccagtattagaggcaccgcctgcccagtgacacatgtttaacggccgcggtaccctaaccgtgcaaaggtagcataatcacttgttccttaaatagggacctgtatgaatggctccacgagggttcagctgtctcttacttttaaccagtgaaattgacctgcccgtgaagaggcgggcatgacacagcaagacgagaagaccctatggagctttaatttattaatgcaaacagtacctaacaaacccacaggtcctaaactactaaacctgcattaaaaatttcggttggggcgacctcggagcagaacccaacctccgagcagtacatgctaagacttcaccagtcaaagcgaactactatactcaattgatccaataacttgaccaacggaacaagttaccctagggataacagcgcaatcctattctagagtccatatcaacaatagggtttacgacctcgatgttggatcaggacatcccgatggtgcagccgctattaaaggttcgtttgttcaacgattaaagtcctacgtgatctgagttcagaccggagtaatccaggtcggtttctatctacnttcaaattcctccctgtacgaaaggacaagagaaataaggcctacttcacaaagcgccttcccccgtaaatgatatcatctcaacttagtattatacccacacccacccaagaacagggtttgttaagatggcagagcccggtaatcgcataaaacttaaaactttacagtcagaggttcaattcctcttcttaacaacatacccatggccaacctcctactcctcattgtacccattctaatcgcaatggcattcctaatgcttaccgaacgaaaaattctaggctatatacaactacgcaaaggccccaacgttgtaggcccctacgggctactacaacccttcgctgacgccataaaactcttcaccaaagagcccctaaaacccgccacatctaccatcaccctctacatcaccgccccgaccttagctctcaccatcgctcttctactatgaacccccctccccatacccaaccccctggttaacctcaacctaggcctcctatttattctagccacctctagcctagccgtttactcaatcctctgatcagggtgagcatcaaactcaaactacgccctgatcggcgcactgcgagcagtagcccaaacaatctcatatgaagtcaccctagccatcattctactatcaacattactaataagtggctcctttaacctctccacccttatcacaacacaagaacacctctgattactcctgccatcatgacccttggccataatatgatttatctccacactagcagagaccaaccgaacccccttcgaccttgccgaaggggaatccgaactagtctcaggcttcaacatcgaatacgccgcaggccccttcgccctattcttcatagccgaatacacaaacattattataataaacaccctcaccactacaatcttcctaggaacaacatatgacgcactctcccctgaactctacacaacatattttgtcaccaagaccctacttctgacctccctgttcttatgaattcgaacagcatacccccgattccgctacgaccaactcatacacctcctatgaaaaaacttcctaccactcaccctagcattacttatatgatatgtctccatacccattacaatctccagcattccccctcaaacctaagaaatatgtctgataaaagagttactttgatagagtaaataataggagcttaaacccccttatttctaggactatgagaatcgaacccatccctgagaatccaaaattctccgtgccacctatcacaccccatcctaaagtaaggtcagctaaataagctatcgggcccataccccgaaaatgttggttatacccttcccgtactaattaatcccctggcccaacccgtcatctactctaccatctttgcaggcacactcatcacagcgctaagctcgcactgattttttacctgagtaggcctagaaataaacatgctagcttttattccagttctaaccaaaaaaataaaccctcgttccacagaagctgccatcaagtatttcctcacgcaagcaaccgcatccataatccttctaatagctatcctcttcaacaatatactctccggacaatgaaccataaccaatactaccaatcaatactcatcattaataatcataatggctatagcaataaaactaggaatagccccctttcacttctgagtcccagaggttacccaaggcacccctctgacatccggcctgcttcttctcacatgacaaaaactagcccccatctcaatcatataccaaatctctccctcactaaacgtaagccttctcctcactctctcaatcttatccatcatagcaggcagttgaggtggattaaaccaaacccagctacgcaaaatcttagcatactcctcaattacccacataggatgaataatagcagttctaccgtacaaccctaacataaccattcttaatttaactatttatattatcctaactactaccgcattcctactactcaacttaaactccagcaccacgaccctactactatctcgcacctgaaacaagctaacatgactaacacccttaattccatccaccctcctctccctaggaggcctgcccccgctaaccggctttttgcccaaatgggccattatcgaagaattcacaaagaacaatagcctcatcatccccaccatcatagccaccatcaccctccttaacctctacttctacctacgcctaatctactccacctcaatcacactactccccatatctaacaacgtaaaaataaaatgacagtttgaacatacaaaacccaccccattcctccccacactcatcgcccttaccacgctactcctacctatctccccttttatactaataatcttatagaaatttaggttaaatacagaccaagagccttcaaagccctcagtaagttgcaatacttaatttctgtaacagctaaggactgcaaaaccccactctgcatcaactgaacgcaaatcagccactttaattaagctaagcccttactagaccaatgggacttaaacccacaaacacttagttaacagctaagcaccctaatcaactggcttcaatctacttctcccgccgccgggaaaaaaggcgggagaagccccggcaggtttgaagctgcttcttcgaatttgcaattcaatatgaaaatcacctcggagctggtaaaaagaggcctaacccctgtctttagatttacagtccaatgcttcactcagccattttacctcacccccactgatgttcgccgaccgttgactattctctacaaaccacaaagacattggaacactatacctattattcggcgcatgagctggagtcctaggcacagctctaagcctccttattcgagccgagctgggccagccaggcaaccttctaggtaacgaccacatctacaacgttatcgtcacagcccatgcatttgtaataatcttcttcatagtaatacccatcataatcggaggctttggcaactgactagttcccctaataatcggtgcccccgatatggcgtttccccgcataaacaacataagcttctgactcttacctccctctctcctactcctgctcgcatctgctatagtggaggccggagcaggaacaggttgaacagtctaccctcccttagcagggaactactcccaccctggagcctccgtagacctaaccatcttctccttacacctagcaggtgtctcctctatcttaggggccatcaatttcatcacaacaattatcaatataaaaccccctgccataacccaataccaaacgcccctcttcgtctgatccgtcctaatcacagcagtcctacttctcctatctctcccagtcctagctgctggcatcactatactactaacagaccgcaacctcaacaccaccttcttcgaccccgccggaggaggagaccccattctataccaacacctattctgatttttcggtcaccctgaagtttatattcttatcctaccaggcttcggaataatctcccatattgtaacttactactccggaaaaaaagaaccatttggatacataggtatggtctgagctatgatatcaattggcttcctagggtttatcgtgtgagcacaccatatatttacagtaggaatagacgtagacacacgagcatatttcacctccgctaccataatcatcgctatccccaccggcgtcaaagtatttagctgactcgccacactccacggaagcaatatgaaatgatctgctgcagtgctctgagccctaggattcatctttcttttcaccgtaggtggcctgactggcattgtattagcaaactcatcactagacatcgtactacacgacacgtactacgttgtagctcacttccactatgtcctatcaataggagctgtatttgccatcataggaggcttcattcactgatttcccctattctcaggctacaccctagaccaaacctacgccaaaatccatttcactatcatattcatcggcgtaaatctaaccttcttcccacaacactttctcggcctatccggaatgccccgacgttactcggactaccccgatgcatacaccacatgaaatatcctatcatctgtaggttcattcatttctctaacagcagtaatattaataattttcatgatttgagaagccttcgcttcgaagcgaaaagtcctaatagtagaagaaccctccataaacctggagtgactatatggatgccccccaccctaccacacattcgaagaacccgtatacataaaatctagacaaaaaaggaaggaatcgaaccccccaaagctggtttcaagccaaccccatggcctccatgactttttcaaaaagatattagaaaaaccatttcataactttgtcaaagttaaattataggctaaatcctatatatcttaatggcacatgcagcgcaagtaggtctacaagacgctacttcccctatcatagaagagcttatcacctttcatgatcacgccctcataatcattttccttatctgcttcctagtcctgtatgcccttttcctaacactcacaacaaaactaactaatactaacatctcagacgctcaggaaatagagaccgtctgaactatcctgcccgccatcatcctagtcctcatcgccctcccatccctacgcatcctttacataacagacgaggtcaacgatccctcccttaccatcaaatcaattggccaccaatggtactgaacctacgagtacaccgactacggcggactaatcttcaactcctacatacttcccccattattcctagaaccaggcgacctgcgactccttgacgttgacaatcgagtagtactcccgattgaagcccccattcgtataataattacatcacaagacgtcttgcactcatgagctgtccccacattaggcttaaaaacagatgcaattcccggacgtctaaaccaaaccactttcaccgctacacgaccgggggtatactacggtcaatgctctgaaatctgtggagcaaaccacagtttcatacccatcgtcctagaattaattcccctaaaaatctttgaaatagggcccgtatttaccctatagcaccccctctaccccctctagagcccactgtaaagctaacttagcattaaccttttaagttaaagattaagagaaccaacacctctttacagtgaaatgccccaactaaatactaccgtatggcccaccataattacccccatactccttacactattcctcatcacccaactaaaaatattaaacacaaactaccacctacctccctcaccaaagcccataaaaataaaaaattataacaaaccctgagaaccaaaatgaacgaaaatctgttcgcttcattcattgcccccacaatcctaggcctacccgccgcagtactgatcattctatttccccctctattgatccccacctccaaatatctcatcaacaaccgactaatcaccacccaacaatgactaatcaaactaacctcaaaacaaatgatagccatacacaacactaaaggacgaacctgatctcttatactagtatccttaatcatttttattgccacaactaacctcctcggactcctgcctcactcatttacaccaaccacccaactatctataaacctagccatggccatccccttatgagcgggcgcagtgattataggctttcgctctaagattaaaaatgccctagcccacttcttaccacaaggcacacctacaccccttatccccatactagttattatcgaaaccatcagcctactcattcaaccaatagccctggccgtacgcctaaccgctaacattactgcaggccacctactcatgcacctaattggaagcgccaccctagcaatatcaaccattaaccttccctctacacttatcatcttcacaattctaattctactgactatcctagaaatcgctgtcgccttaatccaagcctacgttttcacacttctagtaagcctctacctgcacgacaacacataatgacccaccaatcgcatgcctatcatatagtaaaacccagcccatgacccctaacaggggccctctcagccctcctaatgacctccggcctagccatgtgatttcacttccactccataacgctcctcatactaggcctactaaccaacacactaaccatataccaatgatggcgcgatgtaacacgagaaagcacataccaaggccaccacacaccacctgtccaaaaaggccttcgatacgggataatcctatttattacctcagaagtttttttcttcgcaggatttttctgagccttttaccactccagcctagcccctaccccccaactaggagggcactggcccccaacaggcatcaccccgctaaatcccctagaagtcccactcctaaacacatccgtattactcgcatcaggagtatcaatcacctgagctcaccatagtctaatagaaaacaaccgaaaccaaataattcaagcactgcttattacaattttactgggtctctattttaccctcctacaagcctcagagtacttcgagtctcccttcaccatttccgacggcatctacggctcaacattttttgtagccacaggcttccacggacttcacgtcattattggctcaactttcctcactatctgcttcatccgccaactaatatttcactttacatccaaacatcactttggcttcgaagccgccgcctgatactggcattttgtagatgtggtttgactatttctgtatgtctccatctattgatgagggtcttactcttttagtataaatagtaccgttaacttccaattaactagttttgacaacattcaaaaaagagtaataaacttcgccttaattttaataatcaacaccctcctagccttactactaataatcattacattttgactaccacaactcaacggctacatagaaaaatccaccccttacgagtgcggcttcgaccctatatcccccgcccgcgtccctttctccataaaattcttcttagtagctattaccttcttattatttgatctagaaattgccctccttttacccctaccatgagccctacaaacaactaacctgccactaatagttatgtcatccctcttattaatcatcatcctagccctaagtctggcctatgagtgactacaaaaaggattagactgagccgaattggtatatagtttaaacaaaacgaatgatttcgactcattaaattatgataatcatatttaccaaatgcccctcatttacataaatattatactagcatttaccatctcacttctaggaatactagtatatcgctcacacctcatatcctccctactatgcctagaaggaataatactatcgctgttcattatagctactctcataaccctcaacacccactccctcttagccaatattgtgcctattgccatactagtctttgccgcctgcgaagcagcggtgggcctagccctactagtctcaatctccaacacatatggcctagactacgtacataacctaaacctactccaatgctaaaactaatcgtcccaacaattatattactaccactgacatgactttccaaaaaacacataatttgaatcaacacaaccacccacagcctaattattagcatcatccccctactattttttaaccaaatcaacaacaacctatttagctgttccccaaccttttcctccgaccccctaacaacccccctcctaatactaactacctgactcctacccctcacaatcatggcaagccaacgccacttatccagtgaaccactatcacgaaaaaaactctacctctctatactaatctccctacaaatctccttaattataacattcacagccacagaactaatcatattttatatcttcttcgaaaccacacttatccccaccttggctatcatcacccgatgaggcaaccagccagaacgcctgaacgcaggcacatacttcctattctacaccctagtaggctcccttcccctactcatcgcactaatttacactcacaacaccctaggctcactaaacattctactactcactctcactgcccaagaactatcaaactcctgagccaacaacttaatatgactagcttacacaatagcttttatagtaaagatacctctttacggactccacttatgactccctaaagcccatgtcgaagcccccatcgctgggtcaatagtacttgccgcagtactcttaaaactaggcggctatggtataatacgcctcacactcattctcaaccccctgacaaaacacatagcctaccccttccttgtactatccctatgaggcataattataacaagctccatctgcctacgacaaacagacctaaaatcgctcattgcatactcttcaatcagccacatagccctcgtagtaacagccattctcatccaaaccccctgaagcttcaccggcgcagtcattctcataatcgcccacggacttacatcctcattactattctgcctagcaaactcaaactacgaacgcactcacagtcgcatcataatcctctctcaaggacttcaaactctactcccactaatagctttttgatgacttctagcaagcctcgctaacctcgccttaccccccactattaacctactgggagaactctctgtgctagtaaccacattctcctgatcaaatatcactctcctactcacaggactcaacatactagtcacagccctatactccctctacatatttaccacaacacaatggggctcactcacccaccacattaacaacataaaaccctcattcacacgagaaaacaccctcatgttcatacacctatcccccattctcctcctatccctcaaccccgacatcattaccgggttttcctcttgtaaatatagtttaaccaaaacatcagattgtgaatctgacaacagaggcttacgaccccttatttaccgagaaagctcacaagaactgctaactcatgcccccatgtctaacaacatggctttctcaacttttaaaggataacagctatccattggtcttaggccccaaaaattttggtgcaactccaaataaaagtaataaccatgcacactactataaccaccctaaccctgacttccctaattccccccatccttaccaccctcgttaaccctaacaaaaaaaactcatacccccattatgtaaaatccattgtcgcatccacctttattatcagtctcttccccacaacaatattcatgtgcctagaccaagaagttattatctcgaactgacactgagccacaacccaaacaacccagctctccctaagcttcaaactagactacttctccataatattcatccctgtagcattgttcgttacatggtccatcatagaattctcactgtgatatataaactcagacccaaacattaatcagttcttcaagtatctactcattttcctaattaccatactaatcttagttaccgctaacaacctattccaactgttcatcggctgagagggcgtaggaattatatccttcttgctcatcagttgatgatacgcccgagcagatgccaacacagcagccattcaagcaatcctatacaaccgtatcggcgatatcggtttcatcctcgccttagcatgatttatcctacactccaactcatgagacccacaacaaatagcccttctaaacgctaatccaagcctcaccccactactaggcctcctcctagcagcagcaggcaaatcagcccaattaggtctccacccctgactcccctcagccatagaaggccccaccccagtctcagccctactccactcaagcactatagttgtagcaggaatcttcttactcatccgcttccaccccctagcagaaaatagcccactaatccaaactctaacactatgcttaggcgctatcaccactctgttcgcagcagtctgcgcccttacacaaaatgacatcaaaaaaatcgtagccttctccacttcaagtcaactaggactcataatagttacaatcggcatcaaccaaccacacctagcattcctgcacatctgtacccacgccttcttcaaagccatactatttatgtgctccgggtccatcatccacaaccttaacaatgaacaagatattcgaaaaataggaggactactcaaaaccatacctctcacttcaacctccctcaccattggcagcctagcattagcaggaatacctttcctcacaggtttctactccaaagaccacatcatcgaaaccgcaaacatatcatacacaaacgcctgagccctatctattactctcatcgctacctccctaacaagcgcctatagcactcgaataattcttctcaccctaacaggtcaacctcgcttccctacccttactaacattaacgaaaataaccccaccctactaaaccccattaaacgcctgacagccggaagcctattcgcaggatttctcattactaacaacatttcccccgcatcccccttccaaacaacaatccccctctacctaaaactcacgggcctcgctgtcactttcctaggacttctaacagccctagacctcaactacctaaccaacaaacttaaaataaaatccccactatgcacattttatttctccaacatactcggattctaccctagcatcacacaccgcacaatcccctatctaggccttcttacgagccaaaacctgcccctactcctcctagacctaacctgactagaaaagctattacctaaaacaatttcacagcaccaaatctccacctccatcatcacctcaacccaaaaaggcataattaaactttacttcctctctttcttcttcccactcatcctaaccctactcctaatcacataacctattcccccgagcaatctcaattacaatatatacaccaacaaacaatgttcaaccagtaactactactaatcaacgcccataatcatacaaagcccccgcaccaataggatcctcccgaatcaaccctgacccctctccttcataaattattcagcttcctacactattaaagtttaccacaaccaccaccccatcatactctttcacccacagcaccaatcctacctccatcgctaaccccactaaaacactcaccaagacctcaacccctgacccccatgcctcaggatactcctcaatagccatcgctgtagtatatccaaagacaaccatcattccccctaaataaattaaaaaaactattaaacccatataacctcccccaaaattcagaataataacacacccgaccacgccgctaacaatcaatactaaacccccataaataggagaaggcttagaagaaaaccccacaaaccccattactaaacccacactcaacagaaacaaagcatacatcattattctcgcacggactacaaccacgaccaatgatatgaaaaaccatcgttgtatttcaactacaagaacaccaatgaccccaatacgcaaaattaaccccctaataaaattaattaaccactcattcatcgacctccccaccccatccaacatctccgcatgatgaaacttcggctcactccttggcgcctgcctgatcctccaaatcaccacaggactattcctagccatgcactactcaccagacgcctcaaccgccttttcatcaatcgcccacatcactcgagacgtaaattatgggtgaatcatccgctaccttcacgccaatggcgcctcaatattctttatctgcctcttcctacacatcgggcgaggcctatattacggatcatttctctactcagaaacctgaaacatcggcattatcctcctgcttgcaactatagcaacagccttcataggctatgtcctcccgtgaggccaaatatcattctgaggggccacagtaattacaaacttactatccgccatcccatacattgggacagacctagttcaatgaatctgagggggctactcagtagacagtcccaccctcacacgattctttacctttcacttcatcttacccttcattattgcagccctagcagcactccacctcctattcttgcacgaaacgggatcaaacaaccccctaggaatcacctcccattccgataaaatcaccttccacccttactacacaatcaaagacgccctcggcttacttctcttccttctctccttaatgacattaacactattctcaccagacctcctaggcgacccagacaattataccctagccaaccccttaaacacccctccccacatcaagcccgaatgatatttcctattcgcctacacaattctccgatccgtccctaacaaactaggaggcgtccttgccctactactatccatcctcatcctagcaataatccccatcctccatatatccaaacaacaaagcataatatttcgcccactaagccaatcactttattgactcctagccgcagacctcctcattctaacctgaatcggaggacaaccagtaagctacccctttaccatcattggacaagtagcatccgtactatacttcacaacaatcctaatcctaataccaactatctccctaattgaaaacaaaatactcaaatgggcctgtccttgtagtataaactaatacaccagtcttgtaaaccggagatgaaaacctttttccaaggacaaatcagagaaaaagtctttaactccaccattagcacccaaagctaagattctaatttaaactattctctgttctttcatggggaagcagatttgggtaccacccaagtattgactcacccatcaacaaccgctatgtatttcgtacattactgccagccaccatgaatattgtacggtaccataaatacttgaccacctgtagtacataaaaacccaatccacatcaaaaccccctccccatgcttacaagcaagtacagcaatcaaccttcaactatcacacatcaactgcaactccaaagccacccctcacccactaggatatcaacaaacctacccacccttaacagtacatngtacataaagccatttaccgtacatagcacattacagtcaaatcccttctcgtccccatggatgacccccctcagataggagtcccttgaccaccatcctccgtgaaatcaatatcccgcacaagagtgctactctcctcgctccgggcccataacacttgggggtagctaaagtgaactgtatccgacatctggttcctacttcagggccataaagcctaaatagcccacacgttccccttaaataagacatcacgatg

SEQ ID NO: 197 - DNA, 16571 bp, Homo sapiens mitochondrial
  3109: "n" refers to a nucleotide at position 3107 of the Cambridge Reference Sequence (CRS, Anderson et al. 1981 Nature 290:457-465), later determined to be absent from the human mtDNA sequence according to the revised CRS (rCRS, Andrews et al. 1999 Nature Genetics 23:147); "n" therefore represents a single nucleotide deletion at a position corresponding to nucleotide 3107 of SEQ ID NO:1 as provided herein.
gatcacaggtctatcaccctattaaccactcacgggagctctccatgcatttggtattttcgtctggggggtgtgcacgcgatagcattgcgagacgctggagccggagcaccctatgtcgcagtatctgtctttgattcctgcctcattctattatttatcgcacctacgttcaatattacaggcgagcatacctactgaagtgtgttaattaattaatgcttgtaggacataataataacaattgaatgtctgcacagccgctttccacacagacatcataacaaaaaatttccaccaaaccccccctcccccccgcttctggccacagcacttaaacacatctctgccaaaccccaaaaacaaagaaccctaacaccagcctaaccagatttcaaattttatcttttggcggtatgcacttttaacagtcaccccccaactaacacattattttcccctcccactcccatactactaatctcatcaatacaacccccgcccatcctacccagcacacacacaccgctgctaaccccataccccgaaccaaccaaaccccaaagacaccccccacagtttatgtagcttacctcctcaaagcaatacactgaaaatgtttagacgggctcacatcaccccataaacaaataggtttggtcctagcctttctattagctcttagtaagattacacatgcaagcatccccgttccagtgagttcaccctctaaatcaccacgatcaaaagggacaagcatcaagcacgcagcaatgcagctcaaaacgcttagcctagccacacccccacgggaaacagcagtgattaacctttagcaataaacgaaagtttaactaagctatactaaccccagggttggtcaatttcgtgccagccaccgcggtcacacgattaacccaagtcaatagaagccggcgtaaagagtgttttagatcaccccctccccaataaagctaaaactcacctgagttgtaaaaaactccagttgacacaaaatagactacgaaagtggctttaacatatctgaacacacaatagctaagacccaaactgggattagataccccactatgcttagccctaaacctcaacagttaaatcaacaaaactgctcgccagaacactacgagccacagcttaaaactcaaaggacctggcggtgcttcatatccctctagaggagcctgttctgtaatcgataaaccccgatcaacctcaccacctcttgctcagcctatataccgccatcttcagcaaaccctgatgaaggctacaaagtaagcgcaagtacccacgtaaagacgttaggtcaaggtgtagcccatgaggtggcaagaaatgggctacattttctaccccagaaaactacgatagcccttatgaaacttaagggtcgaaggtggatttagcagtaaactgagagtagagtgcttagttgaacagggccctgaagcgcgtacacaccgcccgtcaccctcctcaagtatacttcaaaggacatttaactaaaacccctacgcatttatatagaggagacaagtcgtaacatggtaagtgtactggaaagtgcacttggacgaaccagagtgtagcttaacacaaagcacccaacttacacttaggagatttcaacttaacttgaccgctctgagctaaacctagccccaaacccactccaccttactaccagacaaccttagccaaaccatttacccaaataaagtataggcgatagaaattgaaacctggcgcaatagatatagtaccgcaagggaaagatgaaaaattataaccaagcataatatagcaaggactaacccctataccttctgcataatgaattaactagaaataactttgcaaggagagccaaagctaagacccccgaaaccagacgagctacctaagaacagctaaaagagcacacccgtctatgtagcaaaatagtgggaagatttataggtagaggcgacaaacctaccgagcctggtgatagctggttgtccaagatagaatcttagttcaactttaaatttgcccacagaaccctctaaatccccttgtaaatttaactgttagtccaaagaggaacagctctttggacactaggaaaaaaccttgtagagagagtaaaaaatttaacacccatagtaggcctaaaagcagccaccaattaagaaagcgttcaagctcaacacccactacctaaaaaatcccaaacatataactgaactcctcacacccaattggaccaatctatcaccctatagaagaactaatgttagtataagtaacatgaaaacattctcctccgcataagcctgcgtcagatcaaaacactgaactgacaattaacagcccaatatctacaatcaaccaacaagtcattattaccctcactgtcaacccaacacaggcatgctcataaggaaaggttaaaaaaagtaaaaggaactcggcaaatcttaccccgcctgtttaccaaaaacatcacctctagcatcaccagtattagaggcaccgcctgcccagtgacacatgtttaacggccgcggtaccctaaccgtgcaaaggtagcataatcacttgttccttaaatagggacctgtatgaatggctccacgagggttcagctgtctcttacttttaaccagtgaaattgacctgcccgtgaagaggcgggcatgacacagcaagacgagaagaccctatggagctttaatttattaatgcaaacagtacctaacaaacccacaggtcctaaactaccaaacctgcattaaaaatttcggttggggcgacctcggagcagaacccaacctccgagcagtacatgctaagacttcaccagtcaaagcgaactactatactcaattgatccaataacttgaccaacggaacaagttaccctagggataacagcgcaatcctattctagagtccatatcaacaatagggtttacgacctcgatgttggatcaggacatcccgatggtgcagccgctattaaaggttcgtttgttcaacgattaaagtcctacgtgatctgagttcagaccggagtaatccaggtcggtttctatctacnttcaaattcctccctgtacgaaaggacaagagaaataaggcctacttcacaaagcgccttcccccgtaaatgatatcatctcaacttagtattatacccacacccacccaagaacagggtttgttaagatggcagagcccggtaatcgcataaaacttaaaactttacagtcagaggttcaattcctcttcttaacaacatacccatggccaacctcctactcctcattgtacccattctaatcgcaatggcattcctaatgcttaccgaacgaaaaattctaggctatatacaactacgcaaaggccccaacgttgtaggcccctacgggctactacaacccttcgctgacgccataaaactcttcaccaaagagcccctaaaacccgccacatctaccatcaccctctacatcaccgccccgaccttagctctcaccatcgctcttctactatgaacccccctccccatacccaaccccctggtcaacctcaacctaggcctcctatttattctagccacctctagcctagccgtttactcaatcctctgatcagggtgagcatcaaactcaaactacgccctgatcggcgcactgcgagcagtagcccaaacaatctcatatgaagtcaccctagccatcattctactatcaacattactaataagtggctcctttaacctctccacccttatcacaacacaagaacacctctgattactcctgccatcatgacccttggccataatatgatttatctccacactagcagagaccaaccgaacccccttcgaccttgccgaaggggagtccgaactagtctcaggcttcaacatcgaatacgccgcaggccccttcgccctattcttcatagccgaatacacaaacattattataataaacaccctcaccactacaatcttcctaggaacaacatatgacgcactctcccctgaactctacacaacatattttgtcaccaagaccctacttctaacctccctgttcttatgaattcgaacagcatacccccgattccgctacgaccaactcatacacctcctatgaaaaaacttcctaccactcaccctagcattacttatatgatatgtctccatacccattacaatctccagcattccccctcaaacctaagaaatatgtctgataaaagagttactttgatagagtaaataataggagcttaaacccccttatttctaggactatgagaatcgaacccatccctgagaatccaaaattctccgtgccacctatcacaccccatcctaaagtaaggtcagctaaataagctatcgggcccataccccgaaaatgttggttatacccttcccgtactaattaatcccctggcccaacccgtcatctactctaccatctttgcaggcacactcatcacagcgctaagctcgcactgattttttacctgagtaggcctagaaataaacatgctagcttttattccagttctaaccaaaaaaataaaccctcgttccacagaagctgccatcaagtatttcctcacacaagcaaccgcatccataatccttctaatagccatcctcttcaacaatatactctccggacaatgaaccataaccaatactaccaatcaatactcatcattaataatcataatggctatagcaataaaactaggaatagccccctttcacttctgagtcccagaggtcacccaaggcacccctctgacatccggcctgcttcttctcacatgacaaaaactagcccccatctcaatcatataccaaatctctccctcactaaacgtaagccttctcctcactctctcaatcttatccatcatagcaggcagttgaggtggattaaaccaaacccagctacgcaaaatcttagcatactcctcaattacccacataggatgaataatagcagttctaccgtacaaccctaacataaccattcttaatttaactatttatattatcctgactactaccgcattcctactactcaacttaaactccagcaccacgaccctactactatctcgcacctgaaacaagctaacatgactaacacccttaattccatccaccctcctctccctaggaggcctgcccccgctaaccggctttttgcccaaatgggccattatcgaagaattcacaaaaaacaatagcctcatcatccccaccatcatagccaccatcaccctccttaacctctacttctacctacgcctaatctactccacctcaatcacactactccccatatctaacaacgtaaaaataaaatgacagtttgaacatacaaaacccaccccattcctccccacactcatcgcccttaccacgctactcctacctatctccccttttatactaataatcttatagaaatttaggttaaatacagaccaagagccttcaaagccctcagtaagttgcaatacttaatttctgtaacagctaaggactgcaaaaccccactctgcatcaactgaacgcaaatcagccactttaattaagctaagcccttactagaccaatgggacttaaacccacaaacacttagttaacagctaagcaccctaatcaactggcttcaatctacttctcccgccgccgggaaaaaaggcgggagaagccccggcaggtttgaagctgcttcttcgaatttgcaattcaatatgaaaatcacctcggagctggtaaaaagaggcctaacccctgtctttagatttacagtccaatgcttcactcagccattttacctcacccccactgatgttcgccgaccgttgactattctctacaaaccacaaagacattggaacactatacctattattcggcgcatgagctggagtcctaggcacagctctaagcctccttattcgagccgagctgggccagccaggcaaccttctaggtaacgaccacatctacaacgttatcgtcacagcccatgcatttgtaataatcttcttcatagtaatacccatcataatcggaggctttggcaactgactagttcccctaataatcggtgcccccgatatggcgtttccccgcataaacaacataagcttctgactcttacctccctctctcctactcctgctcgcatctgctatagtggaggccggagcaggaacaggttgaacagtctaccctcccttagcagggaactactcccaccctggagcctccgtagacctaaccatcttctccttacacctagcaggtgtctcctctatcttaggggccatcaatttcatcacaacaattatcaatataaaaccccctgccataacccaataccaaacgcccctcttcgtctgatccgtcctaatcacagcagtcctacttctcctatctctcccagtcctagctgctggcatcactatactactaacagaccgcaacctcaacaccaccttcttcgaccccgccggaggaggagaccccattctataccaacacctattctgatttttcggtcaccctgaagtttatattcttatcctaccaggcttcggaataatctcccatattgtaacttactactccggaaaaaaagaaccatttggatacataggtatggtctgagctatgatatcaattggcttcctagggtttatcgtgtgagcacaccatatatttacagtaggaatagacgtagacacacgagcatatttcacctccgctaccataatcatcgctatccccaccggcgtcaaagtatttagctgactcgccacactccacggaagcaatatgaaatgatctgctgcagtgctctgagccctaggattcatctttcttttcaccgtaggtggcctgactggcattgtattagcaaactcatcactagacatcgtactacacgacacgtactacgttgtagctcacttccactatgtcctatcaataggagctgtatttgccatcataggaggcttcattcactgatttcccctattctcaggctacaccctagaccaaacctacgccaaaatccatttcactatcatattcatcggcgtaaatctaactttcttcccacaacactttctcggcctatccggaatgccccgacgttactcggactaccccgatgcatacaccacatgaaacatcctatcatctgtaggctcattcatttctctaacagcagtaatattaataattttcatgatttgagaagccttcgcttcgaagcgaaaagtcctaatagtagaagaaccctccataaacctggagtgactatatggatgccccccaccctaccacacattcgaagaacccgtatacataaaatctagacaaaaaaggaaggaatcgaaccccccaaagctggtttcaagccaaccccatggcctccatgactttttcaaaaaggtattagaaaaaccatttcataactttgtcaaagttaaattataggctaaatcctatatatcttaatggcacatgcagcgcaagtaggtctacaagacgctacttcccctatcatagaagagcttatcacctttcatgatcacgccctcataatcattttccttatctgcttcctagtcctgtatgcccttttcctaacactcacaacaaaactaactaatactaacatctcagacgctcaggaaatagaaaccgtctgaactatcctgcccgccatcatcctagtcctcatcgccctcccatccctacgcatcctttacataacagacgaggtcaacgatccctcccttaccatcaaatcaattggccaccaatggtactgaacctacgagtacaccgactacggcggactaatcttcaactcctacatacttcccccattattcctagaaccaggcgacctgcgactccttgacgttgacaatcgagtagtactcccgattgaagcccccattcgtataataattacatcacaagacgtcttgcactcatgagctgtccccacattaggcttaaaaacagatgcaattcccggacgtctaaaccaaaccactttcaccgctacacgaccgggggtatactacggtcaatgctctgaaatctgtggagcaaaccacagtttcatgcccatcgtcctagaattaattcccctaaaaatctttgaaatagggcccgtatttaccctatagcaccccctctaccccctctagagcccactgtaaagctaacttagcattaaccttttaagttaaagattaagagaaccaacacctctttacagtgaaatgccccaactaaatactaccgtatggcccaccataattacccccatactccttacactattcctcatcacccaactaaaaatattaaacacaaactaccacctacctccctcaccaaagcccataaaaataaaaaattataacaaaccctgagaaccaaaatgaacgaaaatctgttcgcttcattcattgcccccacaatcctaggcctacccgccgcagtactgatcattctatttccccctctattgatccccacctccaaatatctcatcaacaaccgactaatcaccacccaacaatgactaatcaaactaacctcaaaacaaatgatagccatacacaacactaaaggacgaacctgatctcttatactagtatccttaatcatttttattgccacaactaacctcctcggactcctgcctcactcatttacaccaaccacccaactatctataaacctagccatggccatccccttatgagcgggcgcagtgattataggctttcgctctaagattaaaaatgccctagcccacttcttaccacaaggcacacctacaccccttatccccatactagttattatcgaaaccatcagcctactcattcaaccaatagccctggccgtacgcctaaccgctaacattactgcaggccacctactcatgcacctaattggaagcgccaccctagcaatatcaaccattaaccttccctctacacttatcatcttcacaattctaattctactgactatcctagaaatcgctgtcgccttaatccaagcctacgttttcacacttctagtaagcctctacctgcacgacaacacataatgacccaccaatcacatgcctatcatatagtaaaacccagcccatgacccctaacaggggccctctcagccctcctaatgacctccggcctagccatgtgatttcacttccactccataacgctcctcatactaggcctactaaccaacacactaaccatataccaatgatggcgcgatgtaacacgagaaagcacataccaaggccaccacacaccacctgtccaaaaaggccttcgatacgggataatcctatttattacctcagaagtttttttcttcgcaggatttttctgagccttttaccactccagcctagcccctaccccccaactaggagggcactggcccccaacaggcatcaccccgctaaatcccctagaagtcccactcctaaacacatccgtattactcgcatcaggagtatcaatcacctgagctcaccatagtctaatagaaaacaaccgaaaccaaataattcaagcactgcttattacaattttactgggtctctattttaccctcctacaagcctcagagtacttcgagtctcccttcaccatttccgacggcatctacggctcaacattttttgtagccacaggcttccacggacttcacgtcattattggctcaactttcctcactatctgcttcatccgccaactaatatttcactttacatccaaacatcactttggcttcgaagccgccgcctgatactggcattttgtagatgtggtttgactatttctgtatgtctccatctattgatgagggtcttactcttttagtataaatagtaccgttaacttccaattaactagttttgacaacattcaaaaaagagtaataaacttcgccttaattttaataatcaacaccctcctagccttactactaataattattacattttgactaccacaactcaacggctacatagaaaaatccaccccttacgagtgcggcttcgaccctatatcccccgcccgcgtccctttctccataaaattcttcttagtagctattaccttcttattatttgatctagaaattgccctccttttacccctaccatgagccctacaaacaactaacctgccactaatagttatgtcatccctcttattaatcatcatcctagccctaagtctggcctatgagtgactacaaaaaggattagactgagccgaattggtatatagtttaaacaaaacgaatgatttcgactcattaaattatgataatcatatttaccaaatgcccctcatttacataaatattatactagcatttaccatctcacttctaggaatactagtatatcgctcacacctcatatcctccctactatgcctagaaggaataatactatcgctgttcattatagctactctcataaccctcaacacccactccctcttagccaatattgtgcctattgccatactagtctttgccgcctgcgaagcagcggtgggcctagccctactagtctcaatctccaacacatatggcctagactacgtacataacctaaacctactccaatgctaaaactaatcgtcccaacaattatattactaccactgacatgactttccaaaaagcacataatttgaatcaacacaaccacccacagcctaattattagcatcatccccctactattttttaaccaaatcaacaacaacctatttagctgttccccaaccttttcctccgaccccctaacaacccccctcctaatactaactacctgactcctacccctcacaatcatggcaagccaacgccacttatccagtgaaccactatcacgaaaaaaactctacctctctatactaatctccctacaaatctccttaattataacattcacagccacagaactaatcatattttatatcttcttcgaaaccacacttatccccaccttggctatcatcacccgatgaggcaaccagccagaacgcctgaacgcaggcacatacttcctattctacaccctagtaggctcccttcccctactcatcgcactaatttacactcacaacaccctaggctcactaaacattctactactcactctcactgcccaagaactatcaaactcctgagccaacaacttaatatgactagcttacacaatagcttttatagtaaagatacctctttacggactccacttatgactccctaaagcccatgtcgaagcccccatcgctgggtcaatagtacttgccgcagtactcttaaaactaggcggctatggtataatacgcctcacactcattctcaaccccctgacaaaacacatagcctaccccttccttgtactatccctatgaggcataattataacaagctccatctgcctacgacaaacagacctaaaatcgctcattgcatactcttcaatcagccacatagccctcgtagtaacagccattctcatccaaaccccctgaagcttcaccggcgcagtcattctcataatcgcccacggacttacatcctcattactattctgcctagcaaactcaaactacgaacgcactcacagtcgcatcataatcctctctcaaggacttcaaactctactcccactaatagctttttgatgacttctagcaagcctcgctaacctcgccttaccccccactattaacctactgggagaactctctgtgctagtaaccacgttctcctgatcaaatatcactctcctacttacaggactcaacatactagtcacagccctatactccctctacatatttaccacaacacaatggggctcactcacccaccacattaacaacataaaaccctcattcacacgagaaaacaccctcatgttcatacacctatcccccattctcctcctatccctcaaccccgacatcattaccgggttttcctcttgtaaatatagtttaaccaaaacatcagattgtgaatctgacaacagaggcttacgaccccttatttaccgagaaagctcacaagaactgctaactcatgcccccatgtctaacaacatggctttctcaacttttaaaggataacagctatccattggtcttaggccccaaaaattttggtgcaactccaaataaaagtaataaccatgcacactactataaccaccctaaccctgacttccctaattccccccatccttaccaccctcgttaaccccaacaaaaaaaactcatacccccattatgtaaaatccattgtcgcatccacctttattatcagtctcttccccacaacaatattcatgtgcctagaccaagaagttattatctcgaactgacactgagccacaacccaaacaacccagctctccctaagcttcaaactagactacttctccataatattcatccctgtagcattgttcgttacatggtccatcatagaattctcactgtgatatataaactcagacccaaacattaatcagttcttcaaatatctactcattttcctaattaccatactaatcttagttaccgctaacaacctattccaactgttcatcggctgagagggcgtaggaattatatccttcttgctcatcagttgatgatacgcccgagcagatgccaacacagcagccattcaagcaatcctatacaaccgtatcggcgatatcggtttcatcctcgccttagcatgatttatcctacactccaactcatgagacccacaacaaatagcccttctaaacgctaatccaagcctcaccccactactaggcctcctcctagcagcagcaggcaaatcagcccaattaggtctccacccctgactcccctcagccatagaaggccccaccccagtctcagccctactccactcaagcactatagttgtagcaggagtcttcttactcatccgcttccaccccctagcagaaaatagcccactaatccaaactctaacactatgcttaggcgctatcaccactctgttcgcagcagtctgcgcccttacacaaaatgacatcaaaaaaatcgtagccttctccacttcaagtcaactaggactcataatagttacaatcggcatcaaccaaccacacctagcattcctgcacatctgtacccacgccttcttcaaagccatactatttatgtgctccgggtccatcatccacaaccttaacaatgaacaagatattcgaaaaataggaggactactcaaaaccatacctctcacttcaacctccctcaccattggcagcctagcattagcaggaatacctttcctcacaggtttctactccaaagaccacatcatcgaaaccgcaaacatatcatacacaaacgcctgagccctatctattactctcatcgctacctccctgacaagcgcctatagcactcgaataattcttctcaccctaacaggtcaacctcgcttccccacccttactaacattaacgaaaataaccccaccctactaaaccccattaaacgcctggcagccggaagcctattcgcaggatttctcattactaacaacatttcccccgcatcccccttccaaacaacaatccccctctacctaaaactcacagccctcgctgtcactttcctaggacttctaacagccctagacctcaactacctaaccaacaaacttaaaataaaatccccactatgcacattttatttctccaacatactcggattctaccctagcatcacacaccgcacaatcccctatctaggccttcttacgagccaaaacctgcccctactcctcctagacctaacctgactagaaaagctattacctaaaacaatttcacagcaccaaatctccacctccatcatcacctcaacccaaaaaggcataattaaactttacttcctctctttcttcttcccactcatcctaaccctactcctaatcacataacctattcccccgagcaatctcaattacaatatatacaccaacaaacaatgttcaaccagtaaccactactaatcaacgcccataatcatacaaagcccccgcaccaataggatcctcccgaatcaaccctgacccctctccttcataaattattcagcttcctacactattaaagtttaccacaaccaccaccccatcatactctttcacccacagcaccaatcctacctccatcgctaaccccactaaaacactcaccaagacctcaacccctgacccccatgcctcaggatactcctcaatagccatcgctgtagtatatccaaagacaaccatcattccccctaaataaattaaaaaaactattaaacccatataacctcccccaaaattcagaataataacacacccgaccacaccgctaacaatcaatactaaacccccataaataggagaaggcttagaagaaaaccccacaaaccccattactaaacccacactcaacagaaacaaagcatacatcattattctcgcacggactacaaccacgaccaatgatatgaaaaaccatcgttgtatttcaactacaagaacaccaatgaccccaatacgcaaaattaaccccctaataaaattaattaaccactcattcatcgacctccccaccccatccaacatctccgcatgatgaaacttcggctcactccttggcgcctgcctaatcctccaaatcaccacaggactattcctagccatacactactcaccagacgcctcaaccgccttttcatcaatcgcccacatcactcgagacgtaaattatgggtgaatcatccgctaccttcacgccaatggcgcctcaatattctttatctgcctcttcctacacatcgggcgaggcctatattacggatcatttctctactcagaaacctgaaacatcggcattatcctcctgcttgcaactatagcaacagccttcataggctatgtcctcccgtgaggccaaatatcattctgaggggccacagtaattacaaacttactatccgccatcccatacattgggacagacctagttcaatgaatctgaggaggctactcagtagacagtcccaccctcacacgattctttacctttcacttcatcttacccttcattattgcagccctagcagcactccacctcctattcttgcacgaaacgggatcaaacaaccccctaggaatcacctcccattccgataaaatcaccttccacccttactacacaatcaaagacgccctcggcttacttctcttccttctctccttaatgacattaacactattctcaccagacctcctaggcgacccagacaattataccctagccaaccccttaaacacccctccccacatcaagcccgaatgatatttcctattcgcctacacaattctccgatccgtccctaacaaactaggaggcgtccttgccctattactatccatcctcatcctagcaataatccccatcctccatatatccaaacaacaaagcataatatttcgcccactaagccaatcactttattgactcctagccgcagacctcctcattctaacctgaatcggaggacaaccagtaagctacccttttaccatcattggacaagtagcatccgtactatacttcacaacaatcctaatcctaataccaactatctccctaattgaaaacaaaatactcaaatgggcctgtccttgtagtataaactaatacaccagtcttgtaaaccggagatgaaaacctttttccaaggacaaatcagagaaaaagtctttaactccaccattagcacccaaagctaagattctaatttaaactattctctgttctttcatggggaagcagatttgggtaccacccaagtattgactcacccatcaacaaccgctatgtatctcgtacattactgccagccaccatgaatattgtacggtaccataaatacttgaccacctgtagtacataaaaacccaatccacatcaaaaccccctccccatgcttacaagcaagtacagcaatcaaccttcaactatcacacatcaactgcaactccaaagccacccctcacccactaggataccaacaaacctacccacccttaacagtacatagtacataaagtcatttaccgtacatagcacattacagtcaaatcccttctcgtccccatggatgacccccctcagataggggtcccttgaccaccatcctccgtgaaatcaatatcccgcacaagagtgctactctcctcgctccgggcccataacacttgggggtagctaaagtgaactgtatccgacatctggttcctacttcagggccataaagcctaaatagcccacacgttccccttaaataagacatcacgatg

SEQ ID NO: 198 - DNA, 16564 bp, Homo sapiens mitochondrial
  3109: "n" refers to a nucleotide at position 3107 of the Cambridge Reference Sequence (CRS, Anderson et al. 1981 Nature 290:457-465), later determined to be absent from the human mtDNA sequence according to the revised CRS (rCRS, Andrews et al. 1999 Nature Genetics 23:147); "n" therefore represents a single nucleotide deletion at a position corresponding to nucleotide 3107 of SEQ ID NO:1 as provided herein.
gatcacaggtctatcaccctattaaccactcacgggagctctccatgcatttggtattttcgtctggggggtgtgcacgcgatagcattgcgagacgctggagccggagcaccctatgtcgcagtatctgtctttgattcctgcctcatcctattatttatcgcacctacgttcaatattacaggcgaacatacttactaaagtgtgttaattaattaatgcttgtaggacataataataacaattgaatgtctgcacagccgctttccacacagacatcataacaaaaaatttccaccaaaccccccctcccccccgcttctggccacagcacttaaacacatctctgccaaaccccaaaaacaaagaaccctaacaccagcctaaccagatttcaaattttatcttttggcggtatgcacttttaacagtcaccccccaactaacacattattttcccctcccactcccatactactaatctcatcaatacaacccccacccatcctacccagcacacacacaccgctgctaaccccataccccgaaccaaccaaaccccaaagacaccccccacagtttatgtagcttacctcctcaaagcaatacactgaaaatgtttagacgggctcacatcaccccataaacaaataggtttggtcctagcctttctattagctcttagtaagattacacatgcaagcatccccgttccagtgagttcaccctctaaatcaccacgatcaaaagggacaagcatcaagcacgcagcaatgcagctcaaaacgcttagcctagccacacccccacgggaaacagcagtgattagcctttagcaataaacgaaagtttaactaagctatactaaccccagggttggtcaatttcgtgccagccaccgcggtcacacgattaacccaagtcaatagaagccggcgtaaagagtgttttagatcaccccctccccaataaagctaaaactcacctgagttgtaaaaaactccagttgacacaaaatagactacgaaagtggctttaacatatctgaacacacaatagctaagacccaaactgggattagataccccactatgcttagccctaaacctcaacagttaaatcaacaaaactgctcgccagaacactacgagccacagcttaaaactcaaaggacctggcggtgcttcatatccctctagaggagcctgttctgtaatcgataaaccccgatcaacctcaccacctcttgctcagcctatataccgccatcttcagcaaaccctgatgaaggctacaaagtaagcgcaagtacccacgtaaagacgttaggtcaaggtgtagcccatgaggtggcaagaaatgggctacattttctaccccagaaaactacgatagcccttatgaaacttaagggtcgaaggtggatttagcagtaaactgagagtagagtgcttagttgaacagggccctgaagcgcgtacacaccgcccgtcaccctcctcaagtatacttcaaaggacatttaactaaaacccctacgcatttatatagaggagacaagtcgtaacatggtaagtgtactggaaagtgcacttggacgaaccagagtgtagcttaacacaaagcacccaacttacacttaggagatttcaacttaacttgaccgctctgagctaaacctagccccaaacccactccaccttactaccagacaaccttagccaaaccatttacccaaataaagtataggcgatagaaattgaaacctggcgcaatagatatagtaccgcaagggaaagatgaaaaattataaccaagcataatatagcaaggactaacccctataccttctgcataatgaattaactagaaataactttgcaaggagagccaaagctaagacccccgaaaccagacgagctacctaagaacagctaaaagagcacacccgtctatgtagcaaaatagtgggaagatttataggtagaggcgacaaacctaccgagcctggtgatagctggttgtccaagatagaatcttagttcaactttaaatttgcccacagaaccctctaaatccccttgtaaatttaactgttagtccaaagaggaacagctctttggacactaggaaaaaaccttgtagagagagtaaaaaatttaacacccatagtaggcctaaaagcagccaccaattaagaaagcgttcaagctcaacacccactacctaaaaaatcccaaacatataactgaactcctcacacccaattggaccaatctatcaccctatagaagaactaatgttagtataagtaacatgaaaacattctcctccgcataagcctgcgtcagattaaaacactgaactgacaattaacagcccaatatctacaatcaaccaacaagtcattattaccctcactgtcaacccaacacaggcatgctcataaggaaaggttaaaaaaagtaaaaggaactcggcaaatcttaccccgcctgtttaccaaaaacatcacctctagcatcaccagtattagaggcaccgcctgcccagtgacacatgtttaacggccgcggtaccctaaccgtgcaaaggtagcataatcacttgttccttaaatagggacctgtatgaatggctccacgagggttcagctgtctcttacttttaaccagtgaaattgacctgcccgtgaagaggcgggcatgacacagcaagacgagaagaccctatggagctttaatttattaatgcaaacagtacctaacaaacccacaggtcctaaactaccaaacctgcattaaaaatttcggttggggcgacctcggagcagaacccaacctccgagcagtacatgctaagacttcaccagtcaaagcgaactactatactcaattgatccaataacttgaccaacggaacaagttaccctagggataacagcgcaatcctattctagagtccatatcaacaatagggtttacgacctcgatgttggatcaggacatcccgatggtgcagccgctattaaaggttcgtttgttcaacgattaaagtcctacgtgatctgagttcagaccggagtaatccaggtcggtttctatctacnttcaaattcctccctgtacgaaaggacaagagaaataaggcctacttcacaaagcgccttcccccgtaaatgatatcatctcaacttagtattatacccacacccacccaagaacagggtttgttaagatggcagagcccggtaatcgcataaaacttaaaactttacagtcagaggttcaattcctcttcttaacaacatacccatggccaacctcctactcctcattgcacccattctaatcgcaatggcattcctaatgcttaccgaacgaaaaattctaggctatatacaactacgcaaaggccccaacgttgtaggcccctacgggctactacaacccttcgctgacgccataaaactcttcaccaaagagcccctaaaacccgccacatctaccatcaccctctacatcaccgccccgaccttagctctcaccgtcgctcttctactatgaacccccctccccatacccaaccccctggtcaacctcaacctaggcctcctatttattctagccacctctagcctagccgtttactcaatcctctgatcagggtgagcatcaaactcaaactacgccctgatcggcgcactgcgagcagtagcccaaacaatctcatatgaagtcaccctagccatcattctactatcaacattactaataagtggctcctttaacctctccacccttatcacaacacaagaacacctctgattactcctgccatcatgacccttggccataatatgatttatctccacactagcagagaccaaccgaacccccttcgaccttgccgaaggggagtccgaactagtctcaggcttcaacatcgaatacgccgcaggccccttcgccctattcttcatagccgaatacacaaacattattataataaacaccctcaccactacaatcttcctaggaacaacatatgacgcactctcccctgaactctacacaacatattttgtcaccaagaccctacttctaacctccctgttcttatgaattcgaacagcatacccccgattccgctacgaccaactcatacacctcctatgaaaaaacttcctaccactcaccctagcattacttatatgatatgtctccatacccattacaatctccagcattccccctcaaacctaagaaatatgtctgataaaagagttactttgatagagtaaataataggagcttaaacccccttatttctaggactatgagaatcgaacccatccctgagaatccaaaattctccgtgccacctatcacaccccatcctaaagtaaggtcagctaaataagctatcgggcccataccccgaaaatgttggttatacccttcccgtactaattaatcccctggcccaacccgtcatctactctaccatctttgcaggcacactcatcacagcgctaagctcgcactgattttttacctgagtaggcctagaaataaacatgctagcttttattccagttctaaccaaaaaaataaaccctcgttccacagaagctgccatcaagtatttcctcacgcaagcaaccgcatccataatccttctaatagctatcctcttcaacaatatactctccggacaatgaaccataaccaatactaccaatcaatactcatcattaataatcataatggctatagcaataaaactaggaatagccccctttcacttctgagtcccagaagttacccaaggcacccctctgacatccggcctgcttcttctcacatgacaaaaactagcccccatctcaatcatataccaaatctctccctcactaaacgtaagccttctcctcactctctcaatcttatccatcatagcaggcagttgaggtggactaaaccaaacccagctacgcaaaatcttagcatactcctcaattacccacataggatgaataatagcagttctaccgtacaaccctaacataaccattcttaatttaactatttatattatcctaactactaccgcattcctactactcaacttaaactccagcaccacgaccctactactatctcgcacctgaaacaagctaacatgactaacacccttaattccatccaccctcctctccctaggaggcctgcccccgctaaccggctttttgcccaaatgggccattatcgaagaattcacaaaaaacaatagcctcatcatccccaccatcatagccaccatcaccctccttaacctctacttctacctacgcctaatctactccacctcaatcacactactccccatatctaacaacgtaaaaataaaatgacagtttgaacatacaaaacccaccccattcctccccacactcatcgcccttaccacgctactcctacctatctccccttttatactaataatcttatagaaatttaggttaaatacagaccaagagccttcaaagccctcagtaagttgcaatacttaatttctgtaacagctaaggactgcaaaaccccactctgcatcaactgaacgcaaatcagccactttaattaagctaagcccttactagaccaatgggacttaaacccacaaacacttagttaacagctaagcaccctaatcaactggcttcaatctacttctcccgccgccgggaaaaaaggcgggagaagccccggcaggtttgaagctgcttcttcgaatttgcaattcaatatgaaaatcacctcggagctggtaaaaagaggcctaacccctgtctttagatttacagtccaatgcttcactcagccattttacctcaccccactgatgttcgccgaccgttgactattctctacaaaccacaaagacattggaacactatacctattattcggcgcatgagctggagtcctaggcacagctctaagcctccttattcgagccgagctgggccagccaggcaaccttctaggtaacgaccacatctacaacgttatcgtcacagcccatgcatttgtaataatcttcttcatagtaatacccatcataatcggaggctttggcaactgactagttcccctaataatcggtgcccccgatatggcgtttccccgcataaacaacataagcttctgactcttacctccctctctcctactcctgctcgcatctgctatagtggaggccggagcaggaacaggttgaacagtctaccctcccttagcagggaactactcccaccctggagcctccgtagacctaaccatcttctccttacacctagcaggtgtctcctctatcttaggggccatcaatttcatcacaacaattatcaatataaaaccccctgccataacccaataccaaacgcccctcttcgtctgatccgtcctaattacagcagtcctacttctcctatctctcccagtcctagctgctggcatcactatactactaacagaccgcaacctcaacaccaccttcttcgaccccgccggaggaggagaccccattctataccaacacctattctgatttttcggtcaccctgaagtttatattcttatcctaccaggcttcggaataatctcccatattgtaacttactactccggaaaaaaagaaccatttggatacataggtatggtctgagctataatatcaattggcttcctagggtttatcgtgtgagcacaccatatatttacagtaggaatagacgtagacacacgagcatatttcacctccgctaccataatcatcgctatccccaccggcgtcaaagtatttagctgactcgccacactccacggaagcaatatgaaatgatctgctgcagtgctctgagccctaggattcatctttcttttcaccgtaggtggcctgactggcattgtattagcaaactcatcactagacatcgtactacacgacacgtactacgttgtagctcacttccactatgtcctatcaataggggctgtatttgccatcataggaggcttcattcactgatttcccctattctcaggctacaccctagaccaaacctacgccaaaatccatttcactatcatattcatcggcgtaaatctaactttcttcccacaacactttctcggcctatccggaatgccccgacgttactcggactaccccgatgcatacaccacatgaaacatcctatcatctgtaggctcattcatttctctaacagcagtaatattaataattttcatgatttgagaagccttcgcttcgaagcgaaaagtcctaatagtagaagaaccctccataaacctggagtgactatatggatgccccccaccctaccacacattcgaagaacccgtatacataaaatctagacaaaaaaggaaggaatcgaaccccccaaagctggtttcaagccaaccccatggcctccatgactttttcaaaaaggtattagaaaaaccatttcataactttgtcaaagttaaattataggctaaatcctatatatcttaatggcacatgcagcgcaagtaggtctacaagacgctacttcccctatcatagaagagcttatcacctttcatgatcacgccctcataatcattttccttatctgcttcctagtcctgtatgcccttttcctaacactcacaacaaaactaactaatactaacatctcagacgctcaggaaatagaaaccgtctgaactatcctgcccgccatcatcctagtcctcatcgccctcccatccctacgcatcctttacataacagacgaggtcaacgatccctcccttaccatcaaatcaattggccaccaatggtactgaacctacgagtacaccgactacggcggactaatcttcaactcctacatacttcccccattattcctagaaccaggcgacctgcgactccttgacgttgacaatcgagtagtactcccgattgaagcccccattcgtataataattacatcacaagacgtcttgcactcatgagctgtccccacattaggcttaaaaacagatgcaattcccggacgtctaaaccaaaccactttcaccgctacacgaccgggggtatactacggtcaatgctctgaaatctgtggagcaaaccacagtttcatgcccatcgtcctagaattaattcccctaaaaatctttgaaatagggcccgtatttaccctatagcaccccctcctctagagcccactgtaaagctaacttagcattaaccttttaagttaaagattaagagaaccaacacctctttacagtgaaatgccccaactaaatactaccgtatggcccaccataattacccccatactccttacactattcctcatcacccaactaaaaatattaaacacaaactaccacctacctccctcaccaaagcccataaaaataaaaaattataacaaaccctgagaaccaaaatgaacgaaaatctgttcgcttcattcattgcccccacaatcctaggcctacccgccgcagtactgatcattctatttccccctctattgatccccacctccaaatatctcatcaacaaccgactaatcaccacccaacaatgactaatcaaactaacctcaaaacaaatgataaccatacacaacactaaaggacgaacctgatctcttatactagtatccttaatcatttttattgccacaactaacctcctcggactcctgcctcactcatttacaccaaccacccaactatctataaacctagccatggccatccccttatgagcgggcgcagtgattataggctttcgctctaagattaaaaatgccctagcccacttcttaccacaaggcacacctacaccccttatccccatactagttattatcgaaaccatcagcctactcattcaaccaatagccctggccgtacgcctaaccgctaacattactgcaggccacctactcatgcacctaattggaagcgccaccctagcaatatcaaccattaaccttccctctacacttatcatcttcacaattctaattctactgactatcctagaaatcgctgtcgccttaatccaagcctacgttttcacacttctagtaagcctctacctgcacgacaacacataatgacccaccaatcacatgcctatcatatagtaaaacccagcccatgacccctaacaggggccctctcagccctcctaatgacctccggcctagccatgtgatttcacttccactccataacgctcctcatactaggcctactaaccaacacactaaccatataccaatgatggcgcgatgtaacacgagaaagcacataccaaggccaccacacaccacctgtccaaaaaggccttcgatacgggataatcctatttattacctcagaagtttttttcttcgcaggatttttctgagccttttaccactccagcctagcccctaccccccaattaggagggcactggcccccaacaggcatcaccccgctaaatcccctagaagtcccactcctaaacacatccgtattactcgcatcaggagtatcaatcacctgagctcaccatagtctaatagaaaacaaccgaaaccaaataattcaagcactgcttattacaattttactgggtctctattttaccctcctacaagcctcagagtacttcgagtctcccttcaccatttccgacggcatctacggctcaacattttttgtagccacaggcttccacggacttcacgtcattattggctcaactttcctcactatctgcttcatccgccaactaatatttcactttacatccaaacatcactttggcttcgaagccgccgcctgatactgacattttgtagatgtggtctgactatttctgtatgtctccatctattgatgagggtcttactcttttagtataaatagtaccgttaacttccaattaactagttttgacaacattcaaaaaagagtaataaacttcgccttaattttaataatcaacaccctcctagccttactactaataattattacattttgactaccacaactcaacggctacatagaaaaatccaccccttacgagtgcggcttcgaccctatatcccccgcccgcgtccctttctccataaaattcttcttagtagctattaccttcttattatttgatctagaaattgccctccttttacccctaccatgagccctacaaacaactaacctgccactaatagttatgtcatccctcttattaatcatcatcctagccctaagtctggcctatgagtgactacaaaaaggattagactgaaccgaattggtatatagtttaaacaaaacgaatgatttcgactcattaaattatgataatcatatttaccaaatgcccctcatttacataaatattatactagcatttaccatctcacttctaggaatactagtatatcgctcacacctcatatcctccctactatgcctagaaggaataatactatcgctgttcattatagctactctcataaccctcaacacccactccctcttagccaatattgtgcctattgccatactagtctttgccgcctgcgaagcagcggtgggcctagccctactagtctcaatctccaacacatatggcctagactacgtacataacctaaacctactccaatgctaaaactaatcgtcccaacaattatattactaccactgacatgactttccaaaaaacacataatttgaatcaacacaaccacccacagcctaattattagcatcatccctctactattttttaaccaaatcaacaacaacctatttagctgttccccaaccttttcctccgaccccctaacaacccccctcctaatactaactacctgactcctacccctcacaatcatggcaagccaacgccacttatccagtgaaccactatcacgaaaaaaactctacctctctatactaatctccctacaaatctccttaattataacattcacagccacagaactaatcatattttatatcttcttcgaaaccacacttatccccaccttggctatcatcacccgatgaggcaaccagtcagaacgcctgaacgcaggcacatacttcctattctacaccctagtaggctcccttcccctactcatcgcactaatttacactcacaacaccctaggctcactaaacattctactactcactctcactgcccaagaactatcaaactcctgagccaacaacttaatatgactagcttacacaatagcttttatagtaaagatacctctttacggactccacttatgactccctaaagcccatgtcgaagcccccatcgctgggtcaatagtacttgccgcagtactcttaaaactaggcggctatggtataatacgcctcacactcattctcaaccccctgacaaaacacatagcctaccccttccttgtactatccctatgaggcataattataacaagctccatctgcctacgacaaacagacctaaaatcgctcattgcatactcttcaatcagccacatagccctcgtagtaacagccattctcatccaaaccccctgaagcttcaccggcgcagtcattctcataatcgcccacggacttacatcctcattactattctgcctagcaaactcaaactacgaacgcactcacagtcgcatcataatcctctctcaaggacttcaaactctactcccactaatagctttttgatgacttctagcaagcctcgctaacctcgccttaccccccactattaacctactgggagaactctctgtgctagtaaccacgttctcctgatcaaatatcactctcctacttacaggactcaacatactagtcacagccctatactccctctacatatttaccacaacacaatggggctcactcacccaccacattaacaacataaaaccctcattcacacgagaaaacaccctcatgttcatacacctatcccccattctcctcctatccctcaaccccgacatcattaccgggttttcctcttgtaaatatagtttaaccaaaacatcagattgtgaatctgacaacagaggcttacgaccccttatttaccgagaaagctcacaagaactgctaactcatgcccccatgtctaacaacatggctttctcaacttttaaaggataacagctatccattggtcttaggccccaaaaattttggtgcaactccaaataaaagtaataaccatgcacactactataaccaccctaaccctgacttccctaattccccccatccttaccaccctcgttaaccctaacaaaaaaaactcatacccccattatgtaaaatccattgtcgcatccacctttattatcagtctcttccccacaacaatattcatgtgcctagaccaagaagttattatctcgaactgacactgagccacaacccaaacaacccagctctccctaagcttcaaactagactacttctccataatattcatccctgtagcattgttcgttacatggtccatcatagaattctcactgtgatatataaactcagacccaaacattaatcagttcttcaaatatctactcatcttcctaattaccatactaatcttagttaccgctaacaacctattccaactgttcatcggctgagagggcgtaggaattatatccttcttgctcatcagttgatgatacgcccgagcagatgccaacacagcagccattcaagcaatcctatacaaccgtatcggcgatatcggtttcatcctcgccttagcatgatttatcctacactccaactcatgagacccacaacaaatagcccttctaaacgctaatccaagcctcaccccactactaggcctcctcctagcagcagcaggcaaatcagcccaattaggtctccacccctgactcccctcagccatagaaggccccaccccagtctcagccctactccactcaagcactatagttgtagcaggaatcttcttactcatccgcttccaccccctagcagaaaatagcccactaatccaaactctaacactatgcttaggcgctatcaccactctgttcgcagcagtctgcgcccttacacaaaatgacatcaaaaaaatcgtagccttctccacttcaagtcaactaggactcataatagttacaatcggcatcaaccaaccacacctagcattcctgcacatctgtacccacgccttcttcaaagccatactatttatgtgctccgggtccatcatccacaaccttaacaatgaacaagatattcgaaaaataggaggactactcaaaaccatacctctcacttcaacctccctcaccattggcagcctagcattagcaggaatacctttcctcacaggtttctactccaaagaccacatcatcgaaaccgcaaacatatcatacacaaacgcctgagccctatctattactctcatcgctacctccctaacaagcgcctatagcactcgaataattcttctcaccctaacaggtcaacctcgcttccccacccttactaacattaacgaaaataaccccaccctactaaaccccattaaacgcctggcagccggaagcctattcgcaggatttctcattactaacaacatttcccccgcatcccccttccaaacaacaatccccctctacctaaaactcacagccctcgctgtcactttcctaggacttctaacagccctagacctcaactacctaaccaacaaacttaaaataaaatccccactatgcacattttatttctccaacatactcggattctaccctagcatcacacaccgcacaatcccctatctaggccttcttacgagccaaaacctgcccctactcctcctagacctaacctgactagaaaagctattacctaaaacaatttcacagcaccaaatctccacctccatcatcacctcaacccaaaaaggcataattaaactttacttcctctctttcttcttcccactcatcctaaccctactcctaatcacataacctattcccccgagcaatctcaattacaatatatacaccaacaaacaatgttcaaccagtaactactactaatcaacgcccataatcatacaaagcccccgcaccaataggatcctcccgaatcaaccctgacccctctccttcataaattattcagcttcctacactattaaagtttaccacaaccaccaccccatcatactctttcacccacagcaccaatcctacctccatcgctaaccccactaaaacactcaccaagacctcaacccctgacccccatgcctcaggatactcctcaatagccatcgctgtagtatatccaaagacaaccatcattccccctaaataaattaaaaaaactattaaacccatataacctcccccaaaattcagaataataacacacccgaccacaccgctaacaatcaatactaaacccccataaataggagaaggcttagaagaaaaccccacaaaccccattactaaacccacactcaacagaaacaaagcatacatcattattctcgcacggactacaaccacgaccaatgatatgaaaaaccatcgttgtatttcaactacaagaacaccaatgaccccaatacgcaaaattaaccccctaataaaattaattaaccactcattcatcgacctccccaccccatccaacatctccgcatgatgaaacttcggctcactccttggcgcctgcctgatcctccaaatcaccacaggactattcctagccatgcactactcaccagacgcctcaaccgccttttcatcaatcgcccacatcactcgagacgtaaattatgggtgaatcatccgctaccttcacgccaatggcgcctcaatattctttatctgcctcttcctacacatcgggcgaggcctatattacggatcatttctctactcagaaacctgaaacatcggcattatcctcctgcttgcaactatagcaacagccttcataggctatgtcctcccgtgaggccaaatatcattctgaggggccacagtaattacaaacttactatccgccatcccatacattgggacagacctagttcaatgaatctgaggaggctactcagtagacagtcccaccctcacacgattctttacctttcacttcatcttgcccttcattattgcagccctagcagcactccacctcctattcttgcacgaaacgggatcaaacaaccccctaggaatcacctcccattccgataaaatcaccttccacccttactacacaatcaaagacgccctcggcttacttctcttccttctctccttaatgacattaacactattctcaccagacctcctaggcgacccagacaattataccctagccaaccccttaaatacccctccccacatcaagcccgaatgatatttcctattcgcctacacaattctccgatccgtccctaacaaactaggaggcgtccttgccctattactatccatcctcatcctagcaataatccccatcctccatatatccaaacaacaaagcataatatttcgcccactaagccaatcactttattgactcctagccgcagacctcctcattctaacctgaatcggaggacaaccagtaagctacccttttaccatcattggacaagtagcatccgtactatacttcacaacaatcctaatcctaataccaactatctccctaattgaaaacaaaatactcaaatgggcctgtccttgtagtataaactaatacaccagtcttgtaaaccggagatgaaaacctttttccaaggacaaatcagagaaaaagtctttaactccaccattagcacccaaagctaagattctaatttaaactattctctgttctttcatggggaagcagatttgggtaccacccaagtattgactcacccatcaacaaccgctatgtatttcgtacattactgccagccaccatgaatattgtacggtaccataaatacttgaccacctgtagtacataaaaacccaatccacatcaaaaccccctccccatgcttacaagcaagtacagcaatcaaccctcaactatcacacatcaactgcaactccaaagccacccctcacccactaggataccaacaaacctacccacccttaacagtacatagtacataaagccatttaccgtacatagcacattacagtcaaatcccttctcgtccccatggatgacccccctcagataggggtcccttgaccaccatcctccgtgaaatcaatatcccgcacaagagtgctactctcctcgctccgggcccataacacttgggggtagctaaagtgaactgtatccgacatctggttcctacttcagggccataaagcctaaatagcccacacgttccccttaaataagacatcacgatg

SEQ ID NO: 199 - DNA, 16564 bp, Homo sapiens mitochondrial
  3111: "n" refers to a nucleotide at position 3107 of the Cambridge Reference Sequence (CRS, Anderson et al. 1981 Nature 290:457-465), later determined to be absent from the human mtDNA sequence according to the revised CRS (rCRS, Andrews et al. 1999 Nature Genetics 23:147); "n" therefore represents a single nucleotide deletion at a position corresponding to nucleotide 3107 of SEQ ID NO:1 as provided herein.
gatcacaggtctatcaccctattaaccactcacgggagctctccatgcatttggtattttcctttggggggtgtgcacgcgatagcattgcgagacgctggagccggagcaccctatgtcgcagtatctgtctttgattcctgcctcatcctattatttatcgcacctacgttcaatattacaggcgaacatacttactaaagtgtgttaattaattaatgcttgtaggacataataataacaattgaatgtctgcacagccgctttccacacagacatcataacaaaaaatttccaccaaaccccccctccccccccgcttctggccacagcacttaaacacatctctgccaaaccccaaaaacaaagaaccctaacaccagcctaaccagatttcaaattttatcttttggcggtatgcacttttaacagtcaccccccaactaacacattattttcccctcccactcccatactactaatttcatcaatacaacccccacccatcctacccagcacacacacaccgctgctaaccccataccccgaaccaaccaaaccccaaagacaccccccacagtttatgtagcttacctcctcaaagcaatacactgaaaatgtttagacgggctcacatcaccccataaacaaataggtttggtcctagcctttctattagctcttagtaagattacacatgcaagcatccccgttccagtgagttcaccctctaaatcaccacgatcaaaagggacaagcatcaagcacgcagcaatgcagctcaaaacgcttagcctagccacacccccacgggaaacagcagtgattagcctttagcaataaacgaaagtttaactaagctatactaaccccagggttggtcaatttcgtgccagccaccgcggtcacacgattaacccaagtcaatagaagccggcgtaaagagtgttttagatcacccccctccccaataaagctaaaactcacctgagttgtaaaaaactctagttgacacaaaatagactacgaaagtggctttaacatatctgaacacacaatagctaagacccaaactgggattagataccccactatgcttagccctaaacctcaacagttaaatcaacaaaactgctcgccagaacactacgagccacagcttaaaactcaaaggacctggcggtgcttcatatccctctagaggagcctgttctgtaatcgataaaccccgatcaacctcaccacctcttgctcagcctatataccgccatcttcagcaaaccctgatgaaggctacaaagtaagcgcaagtacccacgtaaagacgttaggtcaaggtgtagcccatgaggtggcaagaaatgggctacattttctaccccagaaaactacgatagcccttatgaaacttaagggtcgaaggtggatttagcagtaaactgagagtagagtgcttagttgaacagggccctgaagcgcgtacacaccgcccgtcaccctcctcaagtatacttcaaaggacatttaactaaaacccctacgcatttatatagaggagacaagtcgtaacatggtaagtgtactggaaagtgcacttggacgaaccagagtgtagcttaacacaaagcacccaacttacacttaggagatttcaacttaacttgaccgctctgagctaaacctagccccaaacccactccaccttactaccagacaaccttagccaaaccatttacccaaataaagtataggcgatagaaattgaaacctggcgcaatagatatagtaccgcaagggaaagatgaaaaattataaccaagcataatatagcaaggactaacccctataccttctgcataatgaattaactagaaataactttgcaaggagagccaaagctaagacccccgaaaccagacgagctacctaagaacagctaaaagagcacacccgtctatgtagcaaaatagtgggaagatttataggtagaggcgacaaacctaccgagcctggtgatagctggttgtccaagatagaatcttagttcaactttaaatttgcccacagaaccctctaaatccccttgtaaatttaactgttagtccaaagaggaacagctctttggacactaggaaaaaaccttgtagagagagtaaaaaatttaacacccatagtaggcctaaaagcagccaccaattaagaaagcgttcaagctcaacacccactacctaaaaaatcccaaacatataactgaactcctcacacccaattggaccaatctatcaccctatagaagaactaatgttagtataagtaacatgaaaacattctcctccgcataagcctgcgtcagattaaaacactgaactgacaattaacagcccaatatctacaatcaaccaacaagtcattattaccctcactgtcaacccaacacaggcatgctcataaggaaaggttaaaaaaagtaaaaggaactcggcaaatcttaccccgcctgtttaccaaaaacatcacctctagcatcaccagtattagaggcaccgcctgcccagtgacacatgtttaacggccgcggtaccctaaccgtgcaaaggtagcataatcacttgttccttaaatagggacctgtatgaatggctccacgagggttcagctgtctcttacttttaaccagtgaaattgacctgcccgtgaagaggcgggcatgacacagcaagacgagaagaccctatggagctttaatttattaatgcaaacagtacctaacaaacccacaggtcctaaactaccaaacctgcattaaaaatttcggttggggcgacctcggagcagaacccaacctccgagcagtacatgctaagacttcaccagtcaaagcgaactactatactcaattgatccaataacttgaccaacggaacaagttaccctagggataacagcgcaatcctattctagagtccatatcaacaatagggtttacgacctcgatgttggatcaggacatcccgatggtgcagccgctattaaaggttcgtttgttcaacgattaaagtcctacgtgatctgagttcagaccggagtaatccaggtcggtttctatctacnttcaaattcctccctgtacgaaaggacaagagaaataaggcctacttcacaaagcgccttcccccgtaaatgatatcatctcaacttagtattatacccacacccacccaagaacagggtttgttaagatggcagagcccggtaatcgcataaaacttaaaactttacagtcagaggttcaattcctcttcttaacaacatacccatggccaacctcctactcctcattgtacccattctaatcgcaatggcattcctaatgcttaccgaacgaaaaattctaggctatatacaactacgcaaaggccccaacgttgtaggcccctacgggctactacaacccttcgctgacgccataaaactcttcaccaaagagcccctaaaacccgccacatctaccatcaccctctacatcaccgccccgaccttagctctcaccgtcgctcttctactatgaacccccctccccatacccaaccccctggtcaacctcaacctaggcctcctatttattctagccacctctagcctagccgtttactcaatcctctgatcagggtgagcatcaaactcaaactacgccctgatcggcgcactgcgagcagtagcccaaacaatctcatatgaagtcaccctagccatcattctactatcaacactactaataagtggctcctttaacctctccacccttatcacaacacaagaacacctctgattactcctgccatcatgacccttggccataatatgatttatctccacactagcagagaccaaccgaacccccttcgaccttgccgaaggggagtccgaactagtctcaggcttcaacatcgaatacgccgcaggccccttcgccctattcttcatagccgaatacacaaacattattataataaacaccctcaccactacaatcttcctaggaacaacatatgacgcactctcccctgaactctacacaacatattttgtcaccaagaccctacttctaacctccctgttcttatgaattcgaacagcatacccccgattccgctacgaccaactcatacatctcctatgaaaaaacttcctaccactcaccctagcattacttatatgatatgtctccatacccattacaatctccagcattccccctcaaacctaagaaatatgtctgataaaagagttactttgatagagtaaataataggagcttaaacccccttatttctaggactatgagaatcgaacccatccctgagaatccaaaattctccgtgccacctatcacaccccatcctaaagtaaggtcagctaaataagctatcgggcccataccccgaaaatgttggttatacccttcccgtactaattaatcccctggcccaacccgtcatctactctaccatctttgcaggcacactcatcacagcgctaagctcgcactgattttttacctgagtaggcctagaaataaacatgctagcttttattccagttctaaccaaaaaaataaaccctcgttccacagaagctgccatcaagtatttcctcacgcaagcaaccgcatccataatccttctaatagctatcctcttcaacaatatactctccggacaatgaaccataaccaatactaccaatcaatactcatcattaataatcataatggctatagcaataaaactaggaatagccccctttcacttctgagtcccagaagttacccaaggcacccctctgacatccggcctgcttcttctcacatgacaaaaactagcccccatctcaatcatataccaaatctctccctcactaaacgtaagccttctcctcactctctcaatcttatccatcatagcaggcagttgaggtggactaaaccaaacccagctacgcaaaatcttagcatactcctcaattacccacataggatgaataatagcagttctaccgtacaaccctaacataaccattcttaatttaactatttatattatcctaactactaccgcattcctactactcaacttaaactccagcaccacgaccctactactatctcgcacctgaaacaagctaacatgactaacacccttaattccatccaccctcctctccctaggaggcctgcccccgctaaccggctttttgcccaaatgggccattatcgaagaattcacaaaaaacaatagcctcatcatccccaccatcatagccaccatcaccctccttaacctctacttctacctacgcctaatctactccacctcaatcacactactccccatatctaacaacgtaaaaataaaatgacagtttgaacatacaaaacccaccccattcctccccacactcatcgcccttaccacgctactcctacctatctccccttttatactaataatcttatagaaatttaggttaaatacagaccaagagccttcaaagccctcagtaagttgcaatacttaatttctgtaacagctaaggactgcaaaaccccactctgcatcaactgaacgcaaatcagccactttaattaagctaagcccttactagaccaatgggacttaaacccacaaacacttagttaacagctaagcaccctaatcaactggcttcaatctacttctcccgccgccgggaaaaaaggcgggagaagccccggcaggtttgaagctgcttcttcgaatttgcaattcaatatgaaaatcacctcggagctggtaaaaagaggcctaacccctgtctttagatttacagtccaatgcttcactcagccattttacctcacccccactgatgttcgccgaccgttgactattctctacaaaccacaaagacattggaacactatacctattattcggcgcatgagctggagtcctaggcacagctctaagcctccttattcgagccgagctgggccagccaggcaaccttctaggtaacgaccacatctacaacgttatcgtcacagcccatgcatttgtaataatcttcttcatagtaatacccatcataatcggaggctttggcaactgactagttcccctaataattggtgcccccgatatggcgtttccccgcataaacaacataagcttctgactcttacctccctctctcctactcctgctcgcatctgctatagtggaggccggagcaggaacaggttgaacagtctaccctcccttagcagggaactactcccaccctggagcctccgtagacctaaccatcttctccttacacctagcaggtgtctcctctatcttaggggccatcaatttcatcacaacaattatcaatataaaaccccctgccataacccaataccaaacgcccctcttcgtctgatccgtcctaattacagcagtcctacttctcctatctctcccagtcctagctgctggcatcactatactactaacagaccgcaacctcaacaccaccttcttcgaccccgccggaggaggagaccccattctataccaacacctattctgatttttcggtcaccctgaagtttatattcttatcctaccaggcttcggaataatctcccatattgtaacttactactccggaaaaaaagaaccatttggatacataggtatggtctgagctatgatatcaattggcttcctagggtttatcgtgtgagcacaccatatatttacagtaggaatagacgtagacacacgagcatatttcacctccgctaccataatcatcgctatccccaccggcgtcaaagtatttagctgactcgccacactccacggaagcaatatgaaatgatctgctgcagtgctctgagccctaggattcatctttcttttcaccgtaggtggcctgactggcattgtattagcaaactcatcactagacatcgtactacacgacacgtactacgttgtagctcacttccactatgtcctatcaataggagctgtatttgccatcataggaggcttcattcactgatttcccctattctcaggctacaccctagaccaaacctacgccaaaatccatttcactatcatattcgtcggcgtaaatctaactttcttcccacaacactttctcggcctatccggaatgccccgacgttactcggactaccccgatgcatacaccacatgaaacatcctatcatctgtaggctcattcatttctctaacagcagtaatattaataattttcatgatttgagaagccttcgcttcgaagcgaaaagtcctaatagtagaagaaccctccataaacctggagtgactatatggatgccccccaccctaccacacattcgaagaacccgtatacataaaatctagacaaaaaaggaaggaatcgaaccccccaaagctggtttcaagccaaccccatggcctccatgactttttcaaaaaggtattagaaaaaccatttcataactttgtcaaagttaaattataggctaaatcctatatatcttaatggcacatgcagcgcaagtaggtctacaagacgctacttcccctatcatagaagagcttatcacctttcatgatcacgccctcataatcattttccttatctgcttcctagtcctgtatgcccttttcctaacactcacaacaaaactaactaatactaacatctcagacgctcaggaaatagaaaccgtctgaactatcctgcccgccatcatcctagtcctcatcgccctcccatccctacgcatcctttacataacagacgaggtcaacgatccctcccttaccatcaaatcaattggccaccaatggtactgaacctacgagtacaccgactacggcggactaatcttcaactcctacatacttcccccattattcctagaaccaggcgacctgcgactccttgacgttgacaatcgagtagtactcccgattgaagcccccattcgtataataattacatcacaagacgtcttgcactcatgagctgtccccacattaggcttaaaaacagatgcaattcccggacgtctaaaccaaaccactttcaccgctacacgaccgggggtatactacggtcaatgctctgaaatctgtggagcaaaccacagtttcatgcccatcgtcctagaattaattcccctaaaaatctttgaaatagggcccgtatttaccctatagcaccccctctagagcccactgtaaagctaacttagcattaaccttttaagttaaagattaagagaaccaacacctctttacagtgaaatgccccaactaaatactaccgtatggcccaccataattacccccatactccttacactattcctcatcacccaactaaaaatattaaacacaagctaccacctacctccctcaccaaagcccataaaaataaaaaattataacaaaccctgagaaccaaaatgaacgaaaatctgttcgcttcattcattgcccccacaatcctaggcctacccgccgcagtactgatcattctatttccccctctattgatccccacctccaaatatctcatcaacaaccgactaatcaccacccaacaatgactaatcaaactaacctcaaaacaaatgataaccatacacaacactaaaggacgaacctgatctcttatactagtatccttaatcatttttattgccacaactaacctcctcggactcctgcctcactcatttacaccaaccacccaactatctataaacctagccatggccatccccttatgagcgggcgcagtgattataggctttcgctctaagattaaaaatgccctagcccacttcttaccacaaggcacacctacaccccttatccccatactagttattatcgaaaccatcagcctactcattcaaccaatagccctggccgtacgcctaaccgctaacattactgcaggccacctactcatgcacctaattggaagcgccaccctagcaatatcaaccattaaccttccctctacacttatcatcttcacaattctaattctactgactatcctagaaatcgctgtcgccttaatccaagcctacgttttcacacttctagtaagcctctacctgcacgacaacacataatgacccaccaatcacatgcctatcatatagtaaaacccagcccatgacccctaacaggggccctctcagccctcctaatgacctccggcctagccatgtgatttcacttccactccataacgctcctcatactaggcctactaaccaacacactaaccatataccaatgatggcgcgatgtaacacgagaaagcacataccaaggccaccacacaccacctgtccaaaaaggccttcgatacgggataatcctatttattacctcagaagtttttttcttcgcaggatttttctgagccttttaccactccagcctagcccctaccccccaattaggagggcactggcccccaacaggcatcaccccgctaaatcccctagaagtcccactcctaaacacatccgtattactcgcatcaggagtatcaatcacctgagctcaccatagtctaatagaaaacaaccgaaaccaaataattcaagcactgcttattacaattttactgggtctctattttaccctcctacaagcctcagagtacttcgagtctcccttcaccatttccgacggcatctacggctcaacattttttgtagccacaggcttccacggacttcacgtcattattggctcaactttcctcactatctgcttcatccgccaactaatatttcactttacatccaaacatcactttggcttcgaagccgccgcctgatactggcattttgtagatgtggtctgactatttctgtatgtctccatctattgatgagggtcttactcttttagtataaatagtaccgttaacttccaattaactagttttgacaacattcaaaaaagagtaataaacttcgccttaattttaataatcaacaccctcctagccttactactaataattattacattttgactaccacaactcaacggctacatagaaaaatccaccccttacgagtgcggcttcgaccctatatcccccgcccgcgtccctttctccataaaattcttcttagtagctattaccttcttattatttgatctagaaattgccctccttttacccctaccatgagccctacaaacaactaacctgccactaatagttatgtcatccctcttattaatcatcatcctagccctaagtctggcctatgagtgactacaaaaaggattagactgaaccgaattggtatatagtttaaacaaaacgaatgatttcgactcattaaattatgataatcatatttaccaaatgcccctcatttacataaatattatactagcatttaccatctcacttctaggaatactagtatatcgctcacacctcatatcctccctactatgcctagaaggaataatactatcgctgttcattatggctactctcataaccctcaacacccactccctcttagccaatattgtgcctattgccatactagtctttgccgcctgcgaagcagcggtgggcctagccctactagtctcaatctccaacacatatggcctagactacgtacataacctaaacctactccaatgctaaaactaatcgtcccaacaattatattactaccactgacatgactttccaaaaaacacataatttgaatcaacacaaccacccacagcctaattattagcatcatccctctactattttttaaccaaatcaacaacaacctatttagctgttccccaaccttttcctccgaccccctaacaacccccctcctaatactaactacctgactcctacccctcacaatcatggcaagccaacgccacttatccagtgaaccactatcacgaaaaaaactctacctctctatactaatctccctacaaatctccttaattataacattcacagccacagaactaatcatattttatatcttcttcgaaaccacacttatccccaccttggctatcatcacccgatgaggcaaccagtcagaacgcctgaacgcaggcacatacttcctattctacaccctagtaggctcccttcccctactcatcgcactaatttacactcacaacaccctaggctcactaaacattctactactcactctcactgcccaagaactatcaaactcctgagccaacaacttaatatgactagcttacacaatagcttttatagtaaagatacctctttacggactccacttatgactccctaaagcccatgtcgaagcccccatcgctgggtcaatagtacttgccgcagtactcttaaaactaggcggctatggtataatacgcctcacactcattctcaaccccctgacaaaacacatagcctaccccttccttgtactatccctatgaggcataattataacaagctccatctgcctacgacaaacagacctaaaatcgctcattgcatactcttcaatcagccacatagccctcgtagtaacagccattctcatccaaaccccctgaagcttcaccggcgcagtcattctcataatcgcccacggacttacatcctcattactattctgcctagcaaactcaaactacgaacgcactcacagtcgcatcataatcctctctcaaggacttcaaactctactcccactaatagctttttgatgacttctagcaagcctcgctaacctcgccttaccccccactattaacctactgggagaactctctgtgctagtaaccacgttctcctgatcaaatatcactctcctacttacaggactcaacatactagtcacagccctatactccctctacatatttaccacaacacaatggggctcactcacccaccacattaacaacataaaaccctcattcacacgagaaaacaccctcatgttcatacacctatcccccattctcctcctatccctcaaccccgacatcattaccgggttttcctcttgtaaatatagtttaaccaaaacatcagattgtgaatctgacaacagaggcttacgaccccttatttaccgagaaagctcacaagaactgctaactcatgcccccatgtctaacaacatggctttctcaacttttaaaggataacagctatccattggtcttaggccccaaaaattttggtgcaactccaaataaaagtaataaccatgcacactactataaccaccctaaccctgacttccctaattccccccatccttaccaccctcgttaaccctaacaaaaaaaactcatacccccattatgtaaaatccattgtcgcatccacctttattatcagtctcttccccacaacaatattcatgtgcctagaccaagaagttattatctcgaactgacactgagccacaacccaaacaacccagctctccctaagcttcaaactagactacttctccataatattcatccctgtagcattgttcgttacatggtccatcatagaattctcactgtgatatataaactcagacccaaacattaatcagttcttcaaatatctactcatcttcctaattaccatactaatcttagttaccgctaacaacctattccaactgttcatcggctgagagggcgtaggaattatatccttcttgctcatcagttgatgatacgcccgagcagatgccaacacagcagccattcaagcaatcctatacaaccgtatcggcgatatcggtttcatcctcgccttagcatgatttatcctacactccaactcatgagacccacaacaaatagcccttctaaacgctaatccaagcctcaccccactactaggcctcctcctagcagcagcaggcaaatcagcccaattaggtctccacccctgactcccctcagccatagaaggccccaccccagtctcagccctactccactcaagcactatagttgtagcaggaatcttcttactcatccgcttccaccccctagcagaaaatagcccactaatccaaactctaacactatgcttaggcgctatcaccactctgttcgcagcagtctgcgcccttacacaaaatgacatcaaaaaaatcgtagccttctccacttcaagtcaactaggactcataatagttacaatcggcatcaaccaaccacacctagcattcctgcacatctgtacccacgccttcttcaaagccatactatttatgtgctccgggtccatcatccacaaccttaacaatgaacaagatattcgaaaaataggaggactactcaaaaccatacctctcacttcaacctccctcaccattggcagcctagcattagcaggaatacctttcctcacaggtttctactccaaagaccacatcatcgaaaccgcaaacatatcatacacaaacgcctgagccctatctattactctcatcgctacctccctaacaagcgcctatagcactcgaataattcttctcaccctaacaggtcaacctcgcttccccacccttactaacattaacgaaaataaccccaccctactaaaccccattaaacgcctggcagccggaagcctattcgcaggatttctcattactaacaacatttcccccgcatcccccttccaaacaacaatccccctctacctaaaactcacagccctcgctgtcactttcctaggacttctaacagccctagacctcaactacctaaccaacaaacttaaaataaaatccccactatgcacattttatttctccaacatactcggattctaccctagcatcacacaccgcacaatcccctatctaggccttcttacgagccaaaacctgcccctactcctcctagacctaacctgactagaaaagctattacctaaaacaatttcacagcaccaaatctccacctccatcatcacctcaacccaaaaaggcataattaaactttacttcctctctttcttcttcccactcatcctaaccctactcctaatcacataacctattcccccgagcaatctcaattacaatatatacaccaacaaacaatgttcaaccagtaactactactaatcaacgcccataatcatacaaagcccccgcaccaataggatcctcccgaatcaaccctgacccctctccttcataaattattcagcttcctacactattaaagtttaccacaaccaccaccccatcatactctttcacccacagcaccaatcctacctccatcgctaaccccactaaaacactcaccaagacctcaacccctgacccccatgcctcaggatactcctcaatagccatcgctgtagtatatccaaagacaaccatcattccccctaaataaattaaaaaaactattaaacccatataacctcccccaaaattcagaataataacacacccgaccacaccgctaacaatcaatactaaacccccataaataggagaaggcttagaagaaaaccccacaaaccccattactaaacccacactcaacagaaacaaagcatacatcattattctcgcacggactacaaccacgaccaatgatatgaaaaaccatcgttgtatttcaactacaagaacaccaatgaccccaatacgcaaaattaaccccctaataaaattaattaaccactcattcatcgacctccccaccccatccaacatctccgcatgatgaaacttcggctcactccttggcgcctgcctgatcctccaaatcaccacaggactattcctagccatgcactactcaccagacgcctcaaccgccttttcatcaatcgcccacatcactcgagacgtaaattatggctgaatcatccgctaccttcacgccaatggcgcctcaatattctttatctgcctcttcctacacatcgggcgaggcctatattacggatcatttctctactcagaaacctgaaacatcggcattatcctcctgcttgcaactatagcaacagccttcataggctatgtcctcccgtgaggccaaatatcattctgaggggccacagtaattacaaacttactatccgccatcccatacattgggacagacctagttcaatgaatctgaggaggctactcagtagacagtcccaccctcacacgattctttacctttcacttcatcttgcccttcattattgcagccctagcagcactccacctcctattcttgcacgaaacgggatcaaacaaccccctaggaatcacctcccattccgataaaatcaccttccacccttactacacaatcaaagacgccctcggcttacttctcttccttctctccttaatgacattaacactattctcaccagacctcctaggcgacccagacaattataccctagccaaccccttaaatacccctccccacatcaagcccgaatgatatttcctattcgcctacacaattctccgatccgtccctaacaaactaggaggtgtccttgccctattactatccatcctcatcctagcaataatccccatcctccatatatccaaacaacaaagcataatatttcgcccactaagccaatcactttattgactcctagccgcagacctcctcattctaacctgaatcggaggacaaccagtaagctacccttttaccatcattggacaagtagcatccgtactatacttcacaacaatcctaatcctaataccaactatctccctaattgaaaacaaaatactcaaatgggcctgtccttgtagtataaactaatacaccagtcttgtaaaccggagatgaaaacctttttccaaggacaaatcagagaaaaagtctttaactccaccattagcacccaaagctaagattctaatttaaactattctctgttctttcatggggaagcagatttgggtaccacccaagtattgactcacccatcaacaaccgctatgtatttcgtacattactgccagccaccatgaatattgtacggtaccataaatacttgaccacctgtagtacataaaaacccaatccacatcaaacccccccccccatgcttacaagcaagtacagcaaccaaccctcaactatcacacatcaactgcaactccaaagccacccctcacccactaggataccaacaaacctacccaccctcaacagtacatagtacataaagccatttaccgtacatagcacattacagtcaaatcccttctcgtccccatggatgacccccctcagataggggtcccttgaccaccatcctccgtgaaatcaatatcccgcacaagagtgctactctcctcgctccgggcccataacacttgggggtagctaaagtgaactgtatccgacatctggttcctacttcagggccataaagcctaaatagcccacacgttccccttaaataagacatcacgatg

SEQ ID NO: 200 - DNA, 16571 bp, Homo sapiens mitochondrial
  3109: "n" refers to a nucleotide at position 3107 of the Cambridge Reference Sequence (CRS, Anderson et al. 1981 Nature 290:457-465), later determined to be absent from the human mtDNA sequence according to the revised CRS (rCRS, Andrews et al. 1999 Nature Genetics 23:147); "n" therefore represents a single nucleotide deletion at a position corresponding to nucleotide 3107 of SEQ ID NO:1 as provided herein.
gatcacaggtctatcaccctattaaccactcacgggagctctccatgcatttggtattttcgtctggggggtgtgcacgcgatagcattgcgagacgctggagccggagcaccctatgtcgcagtatctgtctttgattcctgccccatcccattatttatcgcacctacgttcaatattacaggcgaacatacctactaaagtgtgttaattaattaatgcttgtaggacataataataacaattgaatgtctgcacagccgctttccacacagacatcataacaaaaaatttccaccaaaccccccctcccccccgcttctggccacagcacttaaacacatctctgccaaaccccaaaaacaaagaaccctaacaccagcctaaccagatttcaaattttatcttttggcggtatgcacttttaacagtcaccccccaactaacacattattttcccctcccactcccatactactaatctcatcaatacaacccccgcccatcctacccagcacacacacaccgctgctaaccccataccccgaaccaaccaaaccccaaagacaccccccacagtttatgtagcttacctcctcaaagcaatacactgaaaatgtttagacgggctcacatcaccccataaacaaataggtttggtcctagcctttctattagctcttagtaagattacacatgcaagcatccccgttccagtgagttcaccctctaaatcaccacgatcaaaagggacaagcatcaagcacgcaacaatgcagctcaaaacgcttagcctagccacacccccacgggaaacagcagtgattaacctttagcaataaacgaaagtttaactaagctatactaaccccagggttggtcaatttcgtgccagccaccgcggtcacacgattaacccaagtcaatagaagccggcgtaaagagtgttttagatcaccccctccccaataaagctaaaactcacctgagttgtaaaaaactccagttgacacaaaataaactacgaaagtggctttaacatatctgaacacacaatagctaagacccaaactgggattagataccccactatgcttagccctaaacctcaacagttaaatcaacaaaactgctcgccagaacactacgagccacagcttaaaactcaaaggacctggcggtgcttcatatccctctagaggagcctgttctgtaatcgataaaccccgatcaacctcaccacctcttgctcagcctatataccgccatcttcagcaaaccctgatgaaggctacaaagtaagcgcaagtacccacgtaaagacgttaggtcaaggtgtagcccatgaggtggcaagaaatgggctacattttctaccccagaaaactacgatagcccttatgaaacttaagggtcgaaggtggatttagcagtaaactgagagtagagtgcttagttgaacagggccctgaagcgcgtacacaccgcccgtcaccctcctcaagtatacttcaaaggacatttaactaaaacccctacgcatttatatagaggagacaagtcgtaacatggtaagtgtactggaaagtgcacttggacgaaccagagtgtagcttaacacaaagcacccaacttacacttaggagatttcaacttaacttgaccgctctgagctaaacctagccccaaacccactccaccttactaccagacaaccttagccaaaccatttacccaaataaagtataggcgatagaaattgaaacctggcgcaatagatatagtaccgcaagggaaagatgaaaaattataaccaagcataatatagcaaggactaacccctataccttctgcataatgaattaactagaaataactttgcaaggagagccaaagctaagacccccgaaaccagacgagctacctaagaacagctaaaagagcacacccgtctatgtagcaaaatagtgggaagatttataggtagaggcgacaaacctaccgagcctggtgatagctggttgtccaagatagaatcttagttcaactttaaatttgcccacagaaccctctaaatccccttgtaaatttaactgttagtccaaagaggaacagctctttggacactaggaaaaaaccttgtagagagagtaaaaaatttaacacccatagtaggcctaaaagcagccaccaattaagaaagcgttcaagctcaacacccactacctaaaaaatcccaaacatataactgaactcctcacacccaattggaccaatctatcaccctatagaagaactaatgttagtataagtaacatgaaaacattctcctccgcataagcctgcgtcagattaaaacactgaactgacaattaacagcccaatatctacaatcaaccaacaagtcattattacccccactgtcaacccaacacaggcatgctcataaggaaaggttaaaaaaagtaaaaggaactcggcaaatcttaccccgcctgtttaccaaaaacatcacctctagcatcaccagtattagaggcaccgcctgcccagtgacacatgtttaacggccgcggtaccctaaccgtgcaaaggtagcataatcacttgttccttaaatagggacctgtatgaatggctccacgagggttcagctgtctcttacttttaaccagtgaaattgacctgcccgtgaagaggcgggcatgacacagcaagacgagaagaccctatggagctttaatttattaatgcaaacagtacctaacaaacccacaggtcctaaactactaaacctgcattaaaaatttcggttggggcgacctcggagcagaacccaacctccgagcagtacatgctaagacttcaccagtcaaagcgaactactatactcaattgatccaataacttgaccaacggaacaagttaccctagggataacagcgcaatcctattctagagtccatatcaacaatagggtttacgacctcgatgttggatcaggacatcccgatggtgcagccgctattaaaggttcgtttgttcaacgattaaagtcctacgtgatctgagttcagaccggagtaatccaggtcggtttctatctacnttcaaattcctccctgtacgaaaggacaagagaaataaggcctacttcacaaagcgccttcccccgtaaatgatatcatctcaacttagtattatacccacacccacccaagaacagggtttgttaagatggcagagcccggtaatcgcataaaacttaaaactttacagtcagaggttcaattcctcttcttaacaacatacccatggccaacctcctactcctcatcgtacccattctaatcgcaatggcattcctaatgcttaccgaacgaaaaattctaggctatatacaactacgcaaaggccccaacgttgtaggcccctacggactactacaacccttcgctgacgccataaaactcttcaccaaagagcccctaaaacccgccacatctaccatcaccctctacatcaccgccccgaccttagctctcaccatcgctcttctactatgaacccccctccccatacccaaccccctggttaacctcaacctaggcctcctatttattctagccacctctagcctagccgtttactcaatcctctgatcagggtgagcatcaaactcaaactacgccctgatcggcgcactgcgagcagtagcccaaacaatctcatatgaagtcaccctagccatcattctactatcaacattactaataagtggctcctttaacctctccacccttatcacaacacaagaacacctctgattactcctgccatcatgacccttggccataatatgatttatctccacactagcagagaccaaccgaacccccttcgaccttgccgaaggggaatccgaactagtctcaggcttcaacatcgaatacgccgcaggccccttcgccctattcttcatagccgaatacacaaacattattataataaacaccctcaccactacaatcttcctaggaacaacatatgacgcactctcccctgaactctacacaacatattttgtcaccaagaccctacttctgacctccctgttcttatgaattcgaacagcatacccccgattccgctacgaccaactcatacacctcctatgaaaaaacttcctaccactcaccctagcattacttatatgatatgtctccatacccattacaatctccagcattccccctcaaacctaagaaatatgtctgataaaagagttactttgatagagtaaataataggagcttaaacccccttatttctaggactatgagaatcgaacccatccctgagaatccaaaattctccgtgccacctatcacaccccatcctaaagtaaggtcagctaaataagctatcgggcccataccccgaaaatgttggttatacccttcccgtactaattaatcccctggcccaacccgtcatctactctaccatctttgcaggcacactcatcacagcgctaagctcgcactgattttttacctgagtaggcctagaaataaacatgctagcttttattccagttctaaccaaaaaaataaaccctcgttccacagaagctgccatcaagtatttcctcacgcaagcaaccgcatccataatccttctaatagctatcctcttcaacaatatactctccggacaatgaaccataaccaatactaccaatcaatactcatcattaataatcataatggctatagcaataaaactaggaatagccccctttcacttctgagtcccagaggttacccaaggcacccctctgacatccggcctgcttcttctcacatgacaaaaactagcccccatctcaatcatataccaaatctctccctcactaaacgtaagccttctcctcactctctcaatcttatccatcatagcaggcagttgaggtggattaaaccaaacccagctacgcaaaatcttagcatactcctcaattacccacataggatgaataatagcagtcctaccgtacaaccctaacataaccattcttaatttaactatttatattatcctaactactaccgcattcctactactcaacttaaactccagcaccacgaccctactactatctcgcacctgaaacaagctaacatgactaacacccttaattccatccaccctcctctccctaggaggcctgcccccgctaaccggctttttgcccaaatgggccattatcgaagaattcacaaagaacaatagcctcatcatccccaccatcatagccaccatcaccctccttaacctctacttctacctacgcctaatctactccacctcaatcacactactccccatatctaacaacgtaaaaataaaatgacagtttgaacatacaaaacccaccccattcctccccacactcatcgcccttaccacgctactcctacctatctccccttttatactaataatcttatagaaatttaggttaaatacagaccaagagccttcaaagccctcagtaagttgcaatacttaatttctgtaacagctaaggactgcaaaaccccactctgcatcaactgaacgcaaatcagccactttaattaagctaagcccttactagaccaatgggacttaaacccacaaacacttagttaacagctaagcaccctaatcaactggcttcaatctacttctcccgccgccgggaaaaaaggcgggagaagccccggcaggtttgaagctgcttcttcgaatttgcaattcaatatgaaaatcacctcggagctggtaaaaagaggcctaacccctgtctttagatttacagtccaatgcttcactcagccattttacctcacccccactgatgttcgccgaccgttgactattctctacaaaccacaaagacattggaacactatacctattattcggcgcatgagctggagtcctaggcacagctctaagcctccttattcgagccgagctgggccagccaggcaaccttctaggtaacgaccacatctacaacgttatcgtcacagcccatgcatttgtaataatcttcttcatagtaatacccatcataatcggaggctttggcaactgactagttcccctaataatcggtgcccccgatatggcgtttccccgcataaacaacataagcttctgactcttacctccctctctcctactcctgctcgcatctgctatagtggaggccggagcaggaacaggttgaacagtctaccctcccttagcagggaactactcccaccctggagcctccgtagacctaaccatcttctccttacacctagcaggtgtctcctctatcttaggggccatcaatttcatcacaacaattatcaatataaaaccccctgccataacccaataccaaacgcccctcttcgtctgatccgtcctaatcacagcagtcctacttctcctatctctcccagtcctagctgctggcatcactatactactaacagaccgcaacctcaacaccaccttcttcgaccccgccggaggaggagaccccattctataccaacacctattctgatttttcggtcaccctgaagtttatattcttatcctaccaggcttcggaataatctcccatattgtaacttactactccggaaaaaaagaaccatttggatacataggtatggtctgagctatgatatcaattggcttcctagggtttatcgtgtgagcacaccatatatttacagtaggaatagacgtagacacacgagcatatttcacctccgctaccataatcatcgctatccccaccggcgtcaaagtatttagctgactcgccacactccacggaagcaatatgaaatgatctgctgcagtgctctgagccctaggattcatctttcttttcaccgtaggtggcctgactggcattgtattagcaaactcatcactagacatcgtactacacgacacgtactacgttgtagctcacttccactatgtcctatcaataggagctgtatttgccatcataggaggcttcattcactgatttcccctattctcaggctacaccctagaccaaacctacgccaaaatccatttcactatcatattcatcggcgtaaatctaaccttcttcccacaacactttctcggcctatccggaatgccccgacgttactcggactaccccgatgcatacaccacatgaaatatcctatcatctgtaggttcattcatttctctaacagcagtaatattaataattttcatgatttgagaagccttcgcttcgaagcgaaaagtcctaatagtagaagaaccctccataaacctggagtgactatatggatgccccccaccctaccacacattcgaagaacccgtatacataaaatctagacaaaaaaggaaggaatcgaaccccccaaagctggtttcaagccaaccccatggcctccatgactttttcaaaaagatattagaaaaaccatttcataactttgtcaaagttaaattataggctaaatcctatatatcttaatggcacatgcagcgcaagtaggtctacaagacgctacttcccctatcatagaagagcttatcacctttcatgatcacgccctcataatcattttccttatctgcttcctagtcctgtatgcccttttcctaacactcacaacaaaactaactaatactaacatctcagacgctcaggaaatagagaccgtctgaactatcctgcccgccatcatcctagtcctcatcgccctcccatccctacgcatcctttacataacagacgaggtcaacgatccctcccttaccatcaaatcaattggccaccaatggtactgaacctacgagtacaccgactacggcggactaatcttcaactcctacatacttcccccattattcctagaaccaggcgacctgcgactccttgacgttgacaatcgagtagtactcccgattgaagcccccattcgtataataattacatcacaagacgtcttgcactcatgagctgtccccacattaggcttaaaaacagatgcaattcccggacgtctaaaccaaaccactttcaccgctacacgaccgggggtatactacggtcaatgctctgaaatctgtggagcaaaccacagtttcatacccatcgtcctagaattaattcccctaaaaatctttgaaatagggcccgtatttaccctatagcaccccctctaccccctctagagcccactgtaaagctaacttagcattaaccttttaagttaaagattaagagaaccaacacctctttacagtgaaatgccccaactaaatactaccgtatggcccaccataattacccccatactccttacactattcctcatcacccaactaaaaatattaaacacaaactaccacctacctccctcaccaaagcccataaaaataaaaaattataacaaaccctgagaaccaaaatgaacgaaaatctgttcgcttcattcattgcccccacaatcctaggcctacccgccgcagtactgatcattctatttccccctctattgatccccacctccaaatatctcatcaacaaccgactaatcaccacccaacaatgactaatcaaactaacctcaaaacaaatgatagccatacacaacactaaaggacgaacctgatctcttatactagtatccttaatcatttttattgccacaactaacctcctcggactcctgcctcactcatttacaccaaccacccaactatctataaacctagccatggccatccccttatgagcgggcgcagtgattataggctttcgctctaagattaaaaatgccctagcccacttcttaccacaaggcacacctacaccccttatccccatactagttattatcgaaaccatcagcctactcattcaaccaatagccctggccgtacgcctaaccgctaacattactgcaggccacctactcatgcacctaattggaagcgccaccctagcaatatcaaccattaaccttccctctacacttatcatcttcacaattctaattctactgactatcctagaaatcgctgtcgccttaatccaagcctacgttttcacacttctagtaagcctctacctgcacgacaacacataatgacccaccaatcgcatgcctatcatatagtaaaacccagcccatgacccctaacaggggccctctcagccctcctaatgacctccggcctagccatgtgatttcacttccactccataacgctcctcatactaggcctactaaccaacacactaaccatataccaatgatggcgcgatgtaacacgagaaagcacataccaaggccaccacacaccacctgtccaaaaaggccttcgatacgggataatcctatttattacctcagaagtttttttcttcgcaggatttttctgagccttttaccactccagcctagcccctaccccccaactaggagggcactggcccccaacaggcatcaccccgctaaatcccctagaagtcccactcctaaacacatccgtattactcgcatcaggagtatcaatcacctgagctcaccatagtctaatagaaaacaaccgaaaccaaataattcaagcactgcttattacaattttactgggtctctattttaccctcctacaagcctcagagtacttcgagtctcccttcaccatttccgacggcatctacggctcaacattttttgtagccacaggcttccacggacttcacgtcattattggctcaactttcctcactatctgcttcatccgccaactaatatttcactttacatccaaacatcactttggcttcgaagccgccgcctgatactggcattttgtagatgtggtttgactatttctgtatgtctccatctattgatgagggtcttactcttttagtataaatagtaccgttaacttccaattaactagttttgacaacattcaaaaaagagtaataaacttcgccttaattttaataatcaacaccctcctagccttactactaataatcattacattttgactaccacaactcaacggctacatagaaaaatccaccccttacgagtgcggcttcgaccctatatcccccgcccgcgtccctttctccataaaattcttcttagtagctattaccttcttattatttgatctagaaattgccctccttttacccctaccatgagccctacaaacaactaacctgccactaatagttatgtcatccctcttattaatcatcatcctagccctaagtctggcctatgagtgactacaaaaaggattagactgagccgaattggtatatagtttaaacaaaacgaatgatttcgactcattaaattatgataatcatatttaccaaatgcccctcatttacataaatattatactagcatttaccatctcacttctaggaatactagtatatcgctcacacctcatatcctccctactatgcctagaaggaataatactatcgctgttcattatagctactctcataaccctcaacacccactccctcttagccaatattgtgcctattgccatactagtctttgccgcctgcgaagcagcggtgggcctagccctactagtctcaatctccaacacatatggcctagactacgtacataacctaaacctactccaatgctaaaactaatcgtcccaacaattatattactaccactgacatgactttccaaaaaacacataatttgaatcaacacaaccacccacagcctaattattagcatcatccccctactattttttaaccaaatcaacaacaacctatttagctgttccccaaccttttcctccgaccccctaacaacccccctcctaatactaactacctgactcctacccctcacaatcatggcaagccaacgccacttatccagtgaaccactatcacgaaaaaaactctacctctctatactaatctccctacaaatctccttaattataacattcacagccacagaactaatcatattttatatcttcttcgaaaccacacttatccccaccttggctatcatcacccgatgaggcaaccagccagaacgcctgaacgcaggcacatacttcctattctacaccctagtaggctcccttcccctactcatcgcactaatttacactcacaacaccctaggctcactaaacattctactactcactctcactgcccaagaactatcaaactcctgagccaacaacttaatatgactagcttacacaatagcttttatagtaaagatacctctttacggactccacttatgactccctaaagcccatgtcgaagcccccatcgctgggtcaatagtacttgccgcagtactcttaaaactaggcggctatggtataatacgcctcacactcattctcaaccccctgacaaaacacatagcctaccccttccttgtactatccctatgaggcataattataacaagctccatctgcctacgacaaacagacctaaaatcgctcattgcatactcttcaatcagccacatagccctcgtagtaacagccattctcatccaaaccccctgaagcttcaccggcgcagtcattctcataatcgcccacggacttacatcctcattactattctgcctagcaaactcaaactacgaacgcactcacagtcgcatcataatcctctctcaaggacttcaaactctactcccactaatagctttttgatgacttctagcaagcctcgctaacctcgccttaccccccactattaacctactgggagaactctctgtgctagtaaccacattctcctgatcaaatatcactctcctactcacaggactcaacatactagtcacagccctatactccctctacatatttaccacaacacaatggggctcactcacccaccacattaacaacataaaaccctcattcacacgagaaaacaccctcatgttcatacacctatcccccattctcctcctatccctcaaccccgacatcattaccgggttttcctcttgtaaatatagtttaaccaaaacatcagattgtgaatctgacaacagaggcttacgaccccttatttaccgagaaagctcacaagaactgctaactcatgcccccatgtctaacaacatggctttctcaacttttaaaggataacagctatccattggtcttaggccccaaaaattttggtgcaactccaaataaaagtaataaccatgcacactactataaccaccctaaccctgacttccctaattccccccatccttaccaccctcgttaaccctaacaaaaaaaactcatacccccattatgtaaaatccattgtcgcatccacctttattatcagtctcttccccacaacaatattcatgtgcctagaccaagaagttattatctcgaactgacactgagccacaacccaaacaacccagctctccctaagcttcaaactagactacttctccataatattcatccctgtagcattgttcgttacatggtccatcatagaattctcactgtgatatataaactcagacccaaacattaatcagttcttcaagtatctactcattttcctaattaccatactaatcttagttaccgctaacaacctattccaactgttcatcggctgagagggcgtaggaattatatccttcttgctcatcagttgatgatacgcccgagcagatgccaacacagcagccattcaagcaatcctatacaaccgtatcggcgatatcggtttcatcctcgccttagcatgatttatcctacactccaactcatgagacccacaacaaatagcccttctaaacgctaatccaagcctcaccccactactaggcctcctcctagcagcagcaggcaaatcagcccaattaggtctccacccctgactcccctcagccatagaaggccccaccccagtctcagccctactccactcaagcactatagttgtagcaggaatcttcttactcatccgcttccaccccctagcagaaaatagcccactaatccaaactctaacactatgcttaggcgctatcaccactctgttcgcagcagtctgcgcccttacacaaaatgacatcaaaaaaatcgtagccttctccacttcaagtcaactaggactcataatagttacaatcggcatcaaccaaccacacctagcattcctgcacatctgtacccacgccttcttcaaagccatactatttatgtgctccgggtccatcatccacaaccttaacaatgaacaagatattcgaaaaataggaggactactcaaaaccatacctctcacttcaacctccctcaccattggcagcctagcattagcaggaatacctttcctcacaggtttctactccaaagaccacatcatcgaaaccgcaaacatatcatacacaaacgcctgagccctatctattactctcatcgctacctccctaacaagcgcctatagcactcgaataattcttctcaccctaacaggtcaacctcgcttccctacccttactaacattaacgaaaataaccccaccctactaaaccccattaaacgcctggcagccggaagcctattcgcaggatttctcattactaacaacatttcccccgcatcccccttccaaacaacaatccccctctacctaaaactcacggccctcgctgtcactttcctaggacttctaacagccctagacctcaactacctaaccaacaaacttaaaataaaatccccactatgcacattttatttctccaacatactcggattctaccctagcatcacacaccgcacaatcccctatctaggccttcttacgagccaaaacctgcccctactcctcctagacctaacctgactagaaaagctattacctaaaacaatttcacagcaccaaatctccacctccatcatcacctcaacccaaaaaggcataattaaactttacttcctctctttcttcttcccactcatcctaaccctactcctaatcacataacctattcccccgagcaatctcaattacaatatatacaccaacaaacaatgttcaaccagtaactactactaatcaacgcccataatcatacaaagcccccgcaccaataggatcctcccgaatcaaccctgacccctctccttcataaattattcagcttcctacactattaaagtttaccacaaccaccaccccatcatactctttcacccacagcaccaatcctacctccatcgctaaccccactaaaacactcaccaagacctcaacccctgacccccatgcctcaggatactcctcaatagccatcgctgtagtatatccaaagacaaccatcattccccctaaataaattaaaaaaactattaaacccatataacctcccccaaaattcagaataataacacacccgaccacgccgctaacaatcaatactaaacccccataaataggagaaggcttagaagaaaaccccacaaaccccattactaaacccacactcaacagaaacaaagcatacatcattattctcgcacggactacaaccacgaccaatgatatgaaaaaccatcgttgtatttcaactacaagaacaccaatgaccccaatacgcaaaattaaccccctaataaaattaattaaccactcattcatcgacctccccaccccatccaacatctccgcatgatgaaacttcggctcactccttggcgcctgcctgatcctccaaatcaccacaggactattcctagccatgcactactcaccagacgcctcaaccgccttttcatcaatcgcccacatcactcgagacgtaaattatggctgaatcatccgctaccttcacgccaatggcgcctcaatattctttatctgcctcttcctacacatcgggcgaggcctatattacggatcatttctctactcagaaacctgaaacatcggcattatcctcctgcttgcaactatagcaacagccttcataggctatgtcctcccgtgaggccaaatatcattctgaggggccacagtaattacaaacttactatccgccatcccatacattgggacagacctagttcaatgaatctgagggggctactcagtagacagtcccaccctcacacgattctttacctttcacttcatcttacccttcattattgcagccctagcagcactccacctcctattcttgcacgaaacgggatcaaacaaccccctaggaatcacctcccattccgataaaatcaccttccacccttactacacaatcaaagacgccctcggcttacttctcttccttctctccttaatgacattaacactattctcaccagacctcctaggcgacccagacaattataccctagccaaccccttaaacacccctccccacatcaagcccgaatgatatttcctattcgcctacacaattctccgatccgtccctaacaaactaggaggcgtccttgccctactactatccatcctcatcctagcaataatccccatcctccatatatccaaacaacaaagcataatatttcgcccactaagccaatcactttattgactcctagccgcagacctcctcattctaacctgaatcggaggacaaccagtaagctacccctttaccatcattggacaagtagcatccgtactatacttcacaacaatcctaatcctaataccaactatctccctaattgaaaacaaaatactcaaatgggcctgtccttgtagtataaactaatacaccagtcttgtaaaccggagatgaaaacctttttccaaggacaaatcagagaaaaagtctttaactccaccattagcacccaaagctaagattctaatttaaactattctctgttctttcatggggaagcagatttgggtaccacccaagtattgactcacccatcaacaaccgccatgtatttcgtacattactgccagccaccatgaatattgtacggtaccataaatacttgaccacctgtagtacataaaaacccaatccacatcaaaaccccctccccatgcttacaagcaagtacagcaatcaaccttcaactatcacacatcaactgcaactccaaagccacccctcacccactaggatatcaacaaatctacccatccttaacagtacatggtacataaagccatttaccgtacatagcacattacagtcaaatcccttctcgtccccatggatgacccccctcagataggagtcccttgaccaccatcctccgtgaaatcaatatcccgcacaagagtgctactctcctcgctccgggcccataacacttgggggtagctaaagtgaactgtatccgacatctggttcctacttcagggccataaagcctaaatagcccacacgttccccttaaataagacatcacgatg

SEQ ID NO: 201 - DNA, 16568 bp, Homo sapiens mitochondrial
  3106: "n" refers to a nucleotide at position 3107 of the Cambridge Reference Sequence (CRS, Anderson et al. 1981 Nature 290:457-465), later determined to be absent from the human mtDNA sequence according to the revised CRS (rCRS, Andrews et al. 1999 Nature Genetics 23:147); "n" therefore represents a single nucleotide deletion at a position corresponding to nucleotide 3107 of SEQ ID NO:1 as provided herein.
gatcacaggtctatcaccctattaaccactcacgggagctctccatgcatttggtattttcgtctggggggtgtgcacgcgatagcattgcgaaacgctggagccggagcaccctatgtcgcagtatctgtctttgattcctgccccatcctgttatttatcgcacctacgttcaatattacaggcgaacatacttactaaagtgtgttaattaattaatgcttgtaggacatagtaataacaattgaatgtctgcacagccgctttccacacagacatcataacaaaaaatttccaccaaaccccccctcccccgccttctggccacagcacttaaacacatctctgccaaaccccaaaaacaaagaaccctaacaccagcctaaccagatttcaaattttatcttttggcggtatgcacttttaacagtcaccccccaactaacacattattttcccctcccactcccatactactaatctcatcaatacaacccccgcccatcctacccagcacacacaccgctgctaaccccataccccgaaccaaccaaaccccaaagacaccccccacagtttatgtagcttacctcctcaaagcaatacactgaaaatgtttagacgggctcacatcaccccataaacaaataggtttggtcctggcctttctattagctcttagtaagattacacatgcaagcatccccgttccagtgagttcaccctctaaatcaccacgatcaaaagggacaagcatcaagcacgcagcaatgcagctcaaaacgcttagcctagccacacccccacgggaaacagcagtgattaacctttagcaataaacgaaagtttaactaagctatactaaccccagggttggtcaatttcgtgccagccaccgcggtcacacgattaacccaagtcaatagaagccggcgtaaagagtgttttagatcaccccctccccaataaagctaaaactcacctgagttgtaaaaaactccagttgacacaaaatagactacgaaagtggctttaacatatctgaacacacaatagctaagacccaaactgggattagataccccactatgcttagccctaaacctcaacagttaaatcaacaaaactgctcgccagaacactacgagccacagcttaaaactcaaaggacctggcggtgcttcatatccctctagaggagcctgttctgtaatcgataaaccccgatcaacctcaccacctcttgctcagcctatataccgccatcttcagcaaaccctgatgaaggctacaaagtaagcgcaagtacccacgtaaagacgttaggtcaaggtgtagcccatgaggtggcaagaaatgggctacattttctaccccagaaaactacgatagcccttatgaaacttaagggtcgaaggtggatttagcagtaaactgagagtagagtgcttagttgaacagggccctgaagcgcgtacacaccgcccgtcaccctcctcaagtatacttcaaaggacatttaactaaaacccctacgcatttatatagaggagacaagtcgtaacatggtaagtgtactggaaagtgcacttggacgaaccagagtgtagcttaacacaaagcacccaacttacacttaggagatttcaacttaacttgaccgctctgagctaaacctagccccaaacccactccaccttactaccagacaaccttagccaaaccatttacccagataaagtataggcgatagaaattgaaacctggcgcaatagatatagtaccgcaagggaaagatgaaaaattataaccaagcataatatagcaaggactaacccctataccttctgcataatgaattaactagaaataactttgcaaggagagccaaagctaagacccccgaaaccagacgagctacctaagaacagctaaaagagcacacccgtctatgtagcaaaatagtgggaagatttataggtagaggcgacaaacctaccgagcctggtgatagctggttgtccaagatagaatcttagttcaactttaaatttgcccacagaaccctctaaatccccttgtaaatttaactgttagtccaaagaggaacagctctttggacactaggaaaaaaccttgtagagagagtaaaaaatttaacacccatagtaggcctaaaagcagccaccaattaagaaagcgttcaagctcaacacccactacctaaaaaatcccaaacatataactgaactcctcacacccaattggaccaatctatcaccctatagaagaactaatgttagtataagtaacatgaaaacattctcctccgcataagcctgcgtcagattaaaacactgaactgacaattaacagcccaatatctacaatcaaccaacaagtcattattaccctcactgtcaacccaacacaggcatgctcataaggaaaggttaaaaaaagtaaaaggaactcggcaaatcttaccccgcctgtttaccaaaaacatcacctctagcatcaccagtattagaggcaccgcctgcccagtgacacatgtttaacggccgcggtaccctaaccgtgcaaaggtagcataatcacttgttccttaaatagggacctgtatgaatggctccacgagggttcagctgtctcttacttttaaccagtgaaattgacctgcccgtgaagaggcgggcatgacacagcaagacgagaagaccctatggagctttaatttattaatgcaaacagtacctaacaaacccacaggtcctaaactaccaaacctgcattaaaaatttcggttggggcgacctcggagcagaacccaacctccgagcagtacatgctaagacttcaccagtcaaagcgaactactatactcaattgatccaataacttgaccaacggaacaagttaccctagggataacagcgcaatcctattctagagtccatatcaacaatagggtttacgacctcgatgttggatcaggacatcccgatggtgcagccgctattaaaggttcgtttgttcaacgattaaagtcctacgtgatctgagttcagaccggagtaatccaggtcggtttctatctacnttcaaattcctccctgtacgaaaggacaagagaaataaggcctacttcacaaagcgccttcccccgtaaatgatatcatctcaacttagtattatacccacacccacccaagaacagggtttgttaagatggcagagcccggtaatcgcataaaacttaaaactttacagtcagaggttcaattcctcttcttaacaacatacccatggccaacctcctactcctcattgtacccattctaatcgcaatggcattcctaatgcttaccgaacgaaaaattctaggctatatacaactacgcaaaggccccaacgttgtaggcccctacgggctactacaacccttcgctgacgccataaaactcttcaccaaagagcccctaaaacccgccacatctaccatcaccctctacatcaccgccccgaccttagctctcaccatcgctcttctactatgaacccccctccccatacccaaccccctggtcaacctcaacctaggcctcctatttattctagccacctctagcctagccgtttactcaatcctctgatcagggtgagcatcaaactcaaactacgccctgatcggcgcactgcgagcagtagcccaaacaatctcatatgaagtcaccctagccatcattctactatcaacattactaataagtggctcctttaacctctccacccttatcacaacacaagaacacctctgattactcctgccatcatgacccttggccataatatgatttatctccacactagcagagaccaaccgaacccccttcgaccttgccgaaggggagtccgaactagtctcaggcttcaacatcgaatacgccgcaggccccttcgccctattcttcatagccgaatacacaaacattattataataaacaccctcaccactacaatcttcctaggaacaacatatgacgcactctcccctgaactctacacaacatattttgtcaccaagaccctacttctaacctccctgttcttatgaattcgaacagcatacccccgattccgctacgaccaactcatacacctcctatgaaaaaacttcctaccactcaccctagcattacttatatgatatgtctccatacccattacaatctccagcatcccccctcaaacctaagaaatatgtctgataaaagagttactttgatagagtaaataataggagcttaaacccccttatttctaggactatgagaatcgaacccatccctgagaatccaaaattctccgtgccacctatcacaccccatcctaaagtaaggtcagctaaataagctatcgggcccataccccgaaaatgttggttatacccttcccgtactaattaatcccctggcccaacccgtcatctactctaccatctttgcaggcacactcatcacagcgctaagctcgcactgattttttacctgagtaggcctagaaataaacatgctagcttttattccagttctaaccaaaaaaataaaccctcgttccacagaagctgccatcaagtatttcctcacgcaagcaaccgcatccataatccttctaatagctatcctcttcaacaatatactctccggacaatgaaccataaccaatactaccaatcaatactcatcattaataatcataatggctatagcaataaaactaggaatagccccctttcacttctgagtcccagaggttgcccaaggcacccctctgacatccggcctgcttcttctcacatgacaaaaactagcccccatctcaatcatataccaaatctctccctcactaaacgtaagccttctcctcactctctcaatcttatccatcatagcaggcagttgaggtggattaaaccaaacccagctacgcaaaatcttagcatactcctcaattacccacataggatgaataatagcagttctaccgtacaaccctaacataaccattcttaatttaactatttatattatcctaactactaccgcattcctactactcaacttaaactccagcaccacgaccctactactatctcgcacctgaaacaagctaacatgactaacacccttaattccatccaccctcctctccctaggaggcctgcccccgctaaccggctttttgcccaaatgggccattatcgaagaattcacaaaaaacaatagcctcatcatccccaccatcatagccaccatcaccctccttaacctctacttctacctacgcctaatctactccacctcaatcacactactccccatatctaacaacgtaaaaataaaatgacagtttgaacatacaaaacccaccccattcctccccacactcatcgcccttaccacgctactcctacctatctccccttttatactaataatcttatagaaatttaggttaaatacagaccaagagccttcaaagccctcagtaagttgcaatacttaatttctgtaacagctaaggactgcaaaaccccactctgcatcaactgaacgcaaatcagccactttaattaagctaagcccttactagaccaatgggacttaaacccacaaacacttagttaacagctaagcaccctaatcaactggcttcaatctacttctcccgccgccgggaaaaaaggcgggagaagccccggcaggtttgaagctgcttcttcgaatttgcaattcaatatgaaaatcacctcggagctggtaaaaagaggcctaacccctgtctttagatttacagtccaatgcttcactcagccattttacctcacccccactgatgttcgccgaccgttgactattctctacaaaccacaaagacattggaacactatacctattattcggcgcatgagctggagtcctaggcacagctctaagcctccttattcgagccgagctgggccagccaggcaaccttctaggtaacgaccacatctacaacgttatcgtcacagcccatgcatttgtaataatcttcttcatagtaatacccatcataatcggaggctttggcaactgactagttcccctaataatcggtgcccccgatatggcgtttccccgcataaacaacataagcttctgactcttacctccctctctcctactcctgctcgcatctgctatagtggaggccggagcaggaacaggttgaacagtctaccctcccttagcagggaactactcccaccctggagcctccgtagacctaaccatcttctccttacacctagcaggtgtctcctctatcttaggggccatcaatttcatcacaacaattatcaatataaaaccccctgccataacccaataccaaacgcccctcttcgtctgatccgtcctaatcacagcagtcctacttctcctatctctcccagtcctagctgctggcatcactatactactaacagaccgcaacctcaacaccaccttcttcgaccccgccggaggaggagaccccattctataccaacacctattctgatttttcggtcaccctgaagtttatattcttatcctaccaggcttcggaataatctcccatattgtaacttactactccggaaaaaaagaaccatttggatacataggtatggtctgagctatgatatcaattggcttcctagggtttatcgtgtgagcacaccatatatttacagtaggaatagacgtagacacacgagcatatttcacctccgctaccataatcatcgctatccccaccggcgtcaaagtatttagctgactcgccacactccacggaagcaatatgaaatgatctgctgcagtgctctgagccctaggattcatctttcttttcaccgtaggtggcctgactggcattgtattagcaaactcatcactagacatcgtactacacgacacgtactacgttgtagctcacttccactatgtcctatcaataggagctgtatttgccatcataggaggcttcattcactgatttcccctattctcaggctacaccctagaccaaacctacgccaaaatccatttcactatcatattcatcggcgtaaatctaactttcttcccacaacactttctcggcctatccggaatgccccgacgttactcggactaccccgatgcatacaccacatgaaacatcctatcatctgtaggctcattcatttctctaacagcagtaatattaataattttcatgatttgagaagccttcgcttcgaagcgaaaagtcctaatagtagaagaaccctccataaacctggagtgactatatggatgccccccaccctaccacacattcgaagaacccgtatacataaaatctagacaaaaaaggaaggaatcgaaccccccaaagctggtttcaagccaaccccatggcctccatgactttttcaaaaaggtattagaaaaaccatttcataactttgtcaaagttaaattataggctaaatcctatatatcttaatggcacatgcagcgcaagtaggtctacaagacgctacttcccctatcatagaagagcttatcacctttcatgatcacgccctcataatcattttccttatctgcttcctagtcctgtatgcccttttcctaacactcacaacaaaactaactaatactaacatctcagacgctcaggaaatagaaaccgtctgaactatcctgcccgccatcatcctagtcctcatcgccctcccatccctacgcatcctttacataacagacgaggtcaacgatccctcccttaccatcaaatcaattggccaccaatggtactgaacctacgagtacaccgactacggcggactaatcttcaactcctacatacttcccccattattcctagaaccaggcgacctgcgactccttgacgttgacaatcgagtagtactcccgattgaaacccccattcgtataataattacatcacaagacgtcttgcactcatgagctgtccccacattaggcttaaaaacagatgcaattcccggacgtctaaaccaaaccactttcaccgctacacgaccgggggtatactacggtcaatgctctgaaatctgtggagcaaaccacagtttcatgcccatcgtcctagaattaattcccctaaaaatctttgaaatagggcccgtatttaccctatagcaccccctctaccccctctagagcccactgtaaagctaacttagcattaaccttttaagttaaagattaagagaaccaacacctctttacagtgaaatgccccaactaaatactaccgtatggcccaccataattacccccatactccttacactattcctcatcacccaactaaaaatattaaacacaaactaccacctacctccctcaccaaagcccataaaaataaaaaattataacaaaccctgagaaccaaaatgaacgaaaatctgttcgcttcattcattgcccccacaatcctaggcctacccgccgcagtactgatcattctatttccccctctattgatccccacctccaaatatctcatcaacaaccgactaatcaccacccaacaatgactaatcaaactaacctcaaaacaaatgataaccatacacaacactaaaggacgaacctgatctcttatactagtatccttaatcatttttattgccacaactaacctcctcggactcctgccttactcatttacaccaaccacccaactatctataaacctagccatggccatccccttatgagcgggcgcagtgattataggctttcgctctaagattaaaaatgccctagcccacttcttaccacaaggcacacctacaccccttatccccatactagttattatcgaaaccatcagcctactcattcaaccaatagccctggccgtacgcctaaccgctaacattactgcaggccacctactcatgcacctaattggaagcgccaccctagcaatatcaaccattaaccttccctctacacttatcatcttcacaattctaattctactgactatcctagaaatcgctgtcgccttaatccaagcctacgttttcacacttctagtaagcctctacctgcacgacaacacataatgacccaccaatcacatgcctatcatatagtaaaacccagcccatgacccctaacaggggccctctcagccctcctaatgacctccggcctagccatgtgatttcacttccactccataacgctcctcatactaggcctactaaccaacacactaaccatataccaatgatggcgcgatgtaacacgagaaagcacataccaaggccaccacacaccacctgtccaaaaaggccttcgatacgggataatcctatttattacctcagaagtttttttcttcgcaggatttttctgagccttttaccactccagcctagcccctaccccccaattaggagggcactggcccccaacaggcatcaccccgctaaatcccctagaagtcccactcctaaacacatccgtattactcgcatcaggagtatcaatcacctgagctcaccatagtctaatagaaaacaaccgaaaccaaataattcaagcactgcttattacaattttactgggtctctattttaccctcctacaagcctcagagtacttcgagtctcccttcaccatttccgacggcatctacggctcaacattttttgtagccacaggcttccacggacttcacgtcattattggctcaactttcctcactatctgcttcatccgccaactaatatttcactttacatccaaacatcactttggcttcgaagccgccgcctgatactggcattttgtagatgtggtttgactatttctgtatgtctccatctattgatgagggtcttactcttttagtataaatagtaccgttaacttccaattaactagttttgacaacattcaaaaaagagtaataaacttcgccttaattttaataatcaacaccctcctagccttactactaataattattacattttgactaccacaactcaacggctacatagaaaaatccaccccttacgagtgcggcttcgaccctatatcccccgcccgcgtccctttctccataaaattcttcttagtagctattaccttcttattatttgatctagaaattgccctccttttacccctaccatgagccctacaaacaactaacctgccactaatagttatgtcatccctcttattaatcatcatcctagccctaagtctggcctatgagtgactacaaaaaggattagactgaaccgaattggtatatagtttaaacaaaacgaatgatttcgactcattaaattatgataatcatatttaccaaatgcccctcatttacataaatattatactagcatttaccatctcacttctaggaatactagtatatcgctcacacctcatatcctccctactatgcctagaaggaataatactatcgctgttcattatagctactctcataaccctcaacacccactccctcttagccaatattgtgcctattgccatactagtctttgccgcctgcgaagcagcggtgggcctagccctactagtctcaatctccaacacatatggcctagactacgtacataacctaaacctactccaatgctaaaactaatcgtcccaacaattatattactaccactgacatgactttccaaaaaacacataatttgaatcaacacaaccacccacagcctaattattagcatcatccctctactattttttaaccaaatcaacaacaacctatttagctgttccccaaccttttcctccgaccccctaacaacccccctcctaatactaactacctgactcctacccctcacaatcatggcaagccaacgccacttatccagtgaaccactatcacgaaaaaaactctacctctctatactaatctccctacaaatctccttaattataacattcacagccacagaactaatcatattttatatcttcttcgaaaccacacttatccccaccttggctatcatcacccgatgaggcaaccagccagaacgcctgaacgcaggcacatacttcctattctacaccctagtaggctcccttcccctactcatcgcactaatttacactcacaacaccctaggctcactaaacattctactactcactctcactgcccaagaactatcaaactcctgagccaacaacttaatatgactagcttacacaatagcttttatagtaaagatacctctttacggactccacttatgactccctaaagcccatgtcgaagcccccatcgctgggtcaatagtacttgccgcagtactcttaaaactaggcggctatggtataatacgcctcacactcattctcaaccccctgacaaaacacatagcctaccccttccttgtactatccctatgaggcataattataacaagctccatctgcctacgacaaacagacctaaaatcgctcattgcatactcttcaatcagccacatagccctcgtagtaacagccattctcatccaaaccccctgaagcttcaccggcgcagtcattctcataatcgcccacggacttacatcctcattactattctgcctagcaaactcaaactacgaacgcactcacagtcgcatcataatcctctctcaaggacttcaaactctactcccactaatagctttttgatgacttctagcaagcctcgctaacctcgccttaccccccactattaacctactgggagaactctctgtgctagtaaccacgttctcctgatcaaatatcactctcctacttacaggactcaacatactagtcacagccctatactccctctacatatttaccacaacacaatgaggctcactcacccaccacattaacaacataaaaccctcattcacacgagaaaacaccctcatgttcatacacctatcccccattctcctcctatccctcaaccccgacatcattaccgggttttcctcttgtaaatatagtttaaccaaaacatcagattgtgaatctgacaacagaggcttacgaccccttatttaccgagaaagctcacaagaactgctaactcatgcccccatgtctaacaacatggctttctcaacttttaaaggataacagctatccattggtcttaggccccaaaaattttggtgcaactccaaataaaagtaataaccatgcacactactataaccaccctaaccctgacttccctaattccccccatccttaccaccctcgttaaccctaacaaaaaaaactcatacccccattatgtaaaatccattgtcgcatccaccttcattatcagtctcttccccacaacaatattcatgtgcctagaccaagaagttattatctcgaactgacactgagccacaacccaaacaacccagctctccctaagcttcaaactagactacttctccataatattcatccctgtagcattgttcgttacatggtccatcatagaattctcactgtgatatataaactcagacccaaacattaatcagttcttcaaatatctactcattttcctaattaccatactaatcttagttaccgctaacaacctattccaactgttcatcggctgagagggcgtaggaattatatccttcttgctcatcagttgatgatacgcccgagcagatgccaacacagcagccattcaagcaatcctatacaaccgtatcggcgatatcggtttcatcctcgccttagcatgatttatcctacactccaactcatgagacccacaacaaatagcccttctaaacgctaatccaagcctcaccccactactaggcctcctcctagcagcagcaggcaaatcagcccaattaggtctccacccctgactcccctcagccatagaaggccccaccccagtctcagccctactccactcaagcactatagttgtagcaggaatcttcttactcatccgcttccaccccctagcagaaaatagcccactaatccaaactctaacactatgcttaggcgctatcaccactctgttcgcagcagtctgcgcccttacacaaaatgacatcaaaaaaatcgtagccttctccacttcaagtcaactaggactcataatagttacaatcggcatcaaccaaccacacctagcattcctgcacatctgtacccacgccttcttcaaagccatactatttatgtgctccgggtccatcatccacaaccttaacaatgaacaagatattcgaaaaataggaggactactcaaaaccatacctctcacttcaacctccctcaccattggcagcctagcattagcaggaatacctttcctcacaggtttctactccaaagaccacatcatcgaaaccgcaaacatatcatacacaaacgcctgagccctatctattactctcatcgctacctccctgacaagcgcctatagcactcgaataattcttctcaccctaacaggtcaacctcgcttccccacccttactaacattaacgaaaataaccccaccctactaaaccccattaaacgcctggcagccggaagcctattcgcaggatttctcattactaacaacatttcccccgcatcccccttccaaacaacaatccccctctacctaaaactcacagccctcgctgtcactttcctaggacttctaacagccctagacctcaactacctaaccaacaaacttaaaataaaatccccactatgcacattttatttctccaacatactcggattctaccctagcatcacacaccgcacaatcccctatctaggccttcttacgagccaaaacctgcccctactcctcctagacctaacctgactagaaaagctattacctaaaacaatttcacagcaccaaatctccacctccatcatcacctcaacccaaaaaggcataattaaactttacttcctctctttcttcttcccactcatcctaaccctactcctaatcacataacctattcccccgagcaatctcaattacaatatatacaccaacaaacaatgttcaaccagtaactactactaatcaacgcccataatcatacaaagcccccgcaccaataggatcctcccgaatcaaccctgacccctctccttcataaattattcagcttcctacactattaaagtttaccacaaccaccaccccatcatactctttcacccacaacaccaatcctacctccatcgctaaccccactaaaacactcaccaagacctcaacccctgacccccatgcctcaggatactcctcaatagccatcggtgtagtatatccaaagacaaccatcattccccctaaataaattaaaaaaactattaaacccatataacctcccccaaaattcagaataataacacacccgaccacaccgctaacaatcaatactaaacccccataaataggagaaggcttagaagaaaaccccacaaaccccattactaaacccacactcaacagaaacaaagcatacatcattattctcgcacggactacaaccacgaccaatgatatgaaaaaccatcgttgtatttcaactacaagaacaccaatgaccccaatacgcaaaattaaccccctaataaaattaattaaccactcattcatcgacctccccaccccatccaacatctccgcatgatgaaacttcggctcactccttggcgcctgcctgatcctccaaatcaccacaggactattcctagccatgcactactcaccagacgcctcaaccgccttttcatcaatcgcccacatcactcgagacgtaaattatggctgaatcatccgctaccttcacgccaatggcgcctcaatattctttatctgcctcttcctacacatcgggcgaggcctatattacggatcatttctctactcagaaacctgaaacatcggcattatcctcctgcttgcaactatagcaacagccttcataggctatgtcctcccgtgaggccaaatatcattctgaggggccacagtaattacaaacttactatccgccatcccatacattgggacagacctagttcaatgaatctgaggaggctactcagtagacagtcccaccctcacacgattctttacctttcacttcatcttgcccttcattattgcagccctagcagcactccacctcctattcttgcacgaaacgggatcaaacaaccccctaggaatcacctcccattccgataaaatcaccttccacccttactacacaatcaaagacgccctcggcttacttctcttccttctctccttaatgacattaacactattctcaccagacctcctaggcgacccagacaattataccctagccaaccccttaaacacccctccccacatcaagcccgaatgatatttcctattcgcctacacaattctccgatccgtccctaacaaactaggaggcgtccttgccctattactatccatcctcatcctagcaataatccccatcctccatatatccaaacaacaaagcataatatttcgcccactaagccaatcactttattgactcctagccgcagacctcctcattctaacctgaatcggaggacaaccagtaagctacccttttaccatcattggacaagtagcatccgtactatacttcacaacaatcctaatcctaataccaactatctccctaattgaaaacaaaatactcaaatgggcctgtccttgtagtataaactaatacaccagtcttgtaaaccggagatgaaaacctttttccaaggacaaatcagagaaaaagtctttaactccaccattagcacccaaagctaagattctaatttaaactattctctgttctttcatggggaagcagatttgggtaccacccaagtattgactcacccatcaacaaccgctatgtacttcgtacattactgccagtcaccatgaatattgtacggtaccataaatacttgaccacctgtagtacataaaaacccaatccacatcaaaaccccctccccatgcttacaagcaagtacagcaatcaaccttcaactatcacacatcaactgcaactccaaagccacccctcacccactaggataccaacaaacctatccacccttaacagtacatagtacataaaaccatttaccgtacatagcacattacagtcaaatcccttctcgcccccatggatgacccccctcagataggggtcccttgaccaccatcctccgtgaaatcaatatcccgcacaagagtgctactctcctcgctccgggcccataacacttgggggtagctaaagtgaactgtatccgacatctggttcctacttcagggtcataaagcctaaatagcccacacgttccccttaaataagacatcacgatg

SEQ ID NO: 202 - DNA, 16570 bp, Homo sapiens mitochondrial
  3108: "n" refers to a nucleotide at position 3107 of the Cambridge Reference Sequence (CRS, Anderson et al. 1981 Nature 290:457-465), later determined to be absent from the human mtDNA sequence according to the revised CRS (rCRS, Andrews et al. 1999 Nature Genetics 23:147); "n" therefore represents a single nucleotide deletion at a position corresponding to nucleotide 3107 of SEQ ID NO:1 as provided herein.
gatcacaggtctatcaccctattaaccactcacgggagctctccatgcatttggtattttcgtctggggggtgtgcacgcgatagcattgcgagacgctggagccggagcaccctatgtcgcagtatctgtctttgattcctgcctcatcctattatttatcgcacctacgttcaatattacaggcgaacatacttactaaagtgtgttaattaattaatgcttgtaggacataataataacaattgaatgtctgcacagccgctttccacacagacatcataacaaaaaatttccaccaaaccccccctcccccgccttctggccacagcacttaaacacatctctgccaaaccccaaaaacaaagaaccctaacaccagcctaaccagatttcaaattttatcttttggcggtatgcacttttaacagtcaccccccaactaacacattattttcccctcccactcccatactactaatctcatcaatacaacccccgcccatcctacccagcacacacacaccgctgctaaccccataccccgaaccaaccaaaccccaaagacaccccccacagtttatgtagcttacctcctcaaagcaatacactgaaaatgtttagacgggctcacatcaccccataaacaaataggtttggtcctagcctttctattagctcttagtaagattacacatgcaagcatccccattccagtgagttcaccctctaaatcaccacgatcaaaagggacaagcatcaagcacgcagcaatgcagctcaaaacgcttagcctagccacacccccacgggaaacagcagtgattaacctttagcaataaacgaaagtttaactaagctatactaaccccagggttggtcaatttcgtgccagccaccgcggtcacacgattaacccaagtcaatagaagccggcgtaaagagtgttttagatcaccccctccccaataaagctaaaactcacctgagttgtaaaaaactccagttgacacaaaatagactacgaaagtggctttaacatatctgaacacacaatagctaagacccaaactgggattagataccccactatgcttagccctaaacctcaacagttaaatcaacaaaactgctcgccagaacactacgagccacagcttaaaactcaaaggacctggcggtgcttcatatccctctagaggagcctgttctgtaatcgataaaccccgatcaacctcaccacctcttgctcagcctatataccgccatcttcagcaaaccctgatgaaggctacaaagtaagcgcaagtacccacgtaaagacgttaggtcaaggtgtagcccatgaggtggcaagaaatgggctacattttctaccccagaaaactacgatagcccttatgaaacttaagggtcgaaggtggatttagcagtaaactgagagtagagtgcttagttgaacagggccctgaagcgcgtacacaccgcccgtcaccctcctcaagtatacttcaaaggacatttaactaaaacccctacgcatttatatagaggagacaagtcgtaacatggtaagtgtactggaaagtgcacttggacgaaccagagtgtagcttaacacaaagcacccaacttacacttaggagatttcaacttaacttgaccgctctgagctaaacctagccccaaacccactccaccttactaccagacaaccttagccaaaccatttacccaaataaagtataggcgatagaaattgaaacctggcgcaatagatatagtaccgcaagggaaagatgaaaaattataaccaagcataatatagcaaggactaacccctataccttctgcataatgaattaactagaaataactttgcaaggagaaccaaagctaagacccccgaaaccagacgagctacctaagaacagctaaaagagcacacccgtctatgtagcaaaatagtgggaagatttataggtagaggcgacaaacctaccgagcctggtgatagctggttgtccaagatagaatcttagttcaactttaaatttgcccacagaaccctctaaatccccttgtaaatttaactgttagtccaaagaggaacagctctttggacactaggaaaaaaccttgtagagagagtaaaaaatttaacacccatagtaggcctaaaagcagccaccaattaagaaagcgttcaagctcaacacccactacctaaaaaatcccaaacatataactgaactcctcacacccaattggaccaatctatcaccctatagaagaactaatgttagtataagtaacatgaaaacattctcctccgcataagcctgcgtcagattaaaacactgaactgacaattaacagcccaatatctacaatcaaccaacaagtcattattaccctcactgtcaacccaacacaggcatgctcataaggaaaggttaaaaaaagtaaaaggaactcggcaaatcttaccccgcctgtttaccaaaaacatcacctctagcatcaccagtattagaggcaccgcctgcccagtgacacatgtttaacggccgcggtaccctaaccgtgcaaaggtagcataatcacttgttccttaaatagggacctgtatgaatggctccacgagggttcagctgtctcttacttttaaccagtgaaattgacctgcccgtgaagaggcgggcatgacacagcaagacgagaagaccctatggagctttaatttattaatgcaaacagtacctaacaaacccacaggtcctaaactaccaaacctgcattaaaaatttcggttggggcgacctcggagcagaacccaacctccgagcagtacatgctaagacttcaccagtcaaagcgaactactatactcaattgatccaataacttgaccaacggaacaagttaccctagggataacagcgcaatcctattctagagtccatatcaacaatagggtttacgacctcgatgttggatcaggacatcccgatggtgcagccgctattaaaggttcgtttgttcaacgattaaagtcctacgtgatctgagttcagaccggagtaatccaggtcggtttctatctacnttcaaattcctccctgtacgaaaggacaagagaaataaggcctacttcacaaagcgccttcccccgtaaatgatatcatctcaacttagtattatacccacacccacccaagaacagggtttgttaagatggcagagcccggtaatcgcataaaacttaaaactttacagtcagaggttcaattcctcttcttaacaacatacccatggccaacctcctactcctcattgtacccattctaatcgcaatggcattcctaatgcttaccgaacgaaaaattctaggctatatacaactacgcaaaggccccaacgttgtaggcccctacgggctactacaacccttcgctgacgccataaaactcttcaccaaagagcccctaaaacccgccacatctaccatcaccctctacatcaccgccccgaccttagctctcaccatcgctcttctactatgaacccccctccccatacccaaccccctggtcaacctcaacctaggcctcctatttattctagccacctctagcctagccgtttactcaatcctctgatcagggtgagcatcaaactcaaactacgccctgatcggcgcactgcgagcagtagcccaaacaatctcatatgaagtcaccctagccatcattctactatcaacattactaataagtggctcctttaacctctccacccttatcacaacacaagaacacctctgattactcctgccatcatgacccttggccataatatgatttatctccacactagcagagaccaaccgaacccccttcgaccttgccgaaggggagtccgaactagtctcaggcttcaacatcgaatacgccgcaggccccttcgccctattcttcatagccgaatacacaaacattattataataaacaccctcaccactacaatcttcctaggaacaacatatgacgcactctcccctgaactctacacaacatattttgtcaccaagaccctacttctaacctccctgttcttatgaattcgaacagcatacccccgattccgctacgaccaactcatacacctcctatgaaaaaacttcctaccactcaccctagcattacttatatgacatgtctccatacccattacaatctccagcattccccctcaaacctaagaaatatgtctgataaaagagttactttgatagagtaaataataggagcttaaacccccttatttctaggactatgagaatcgaacccatccctgagaatccaaaattctccgtgccacctatcacaccccatcctaaagtaaggtcagctaaataagctatcgggcccataccccgaaaatgttggttatacccttcccgtactaattaatcccctggcccaacccgtcatctactctaccatctttgcaggcacactcatcacagcgctaagctcgcactgattttttacctgagtaggcctagaaataaacatgctagcttttattccagttctaaccaaaaaaataaaccctcgttccacagaagctgccatcaagtatttcctcacgcaagcaaccgcatccataatccttctaatagctatcctcttcaacaatatactctccggacaatgaaccataaccaatactaccaatcaatactcatcattaataatcataatggctatagcaataaaactaggaatagccccctttcacttctgagtcccagaggttacccaaggcacccctctgacatccggcctgcttcttctcacatgacaaaaactagcccccatctcaatcatataccaaatctctccctcactagacgtaagccttctcctcactctctcaatcttatccatcatagcaggcagttgaggtggattaaaccaaacccagctacgcaaaatcttagcatactcctcaattacccacataggatgaataatagcagttctaccgtacaaccctaacataaccattcttaatttaactatttatattatcctaactactaccgcattcctactactcaacttaaactccagcaccacgaccctactactatctcgcacctgaaacaagctaacatgactaacacccttaattccatccaccctcctctccctaggaggcctgcccccgctaaccggctttttgcccaaatgggccattatcgaagaattcacaaaaaacaatagcctcatcatccccaccatcatagccaccatcaccctccttaacctctacttctacctacgcctaatctactccacctcaatcacactactccccatatctaacaacgtaaaaataaaatgacagtttgaacatacaaaacccaccccattcctccccacactcatcgcccttaccacgctactcctacctatctccccttttatactaataatcttatagaaatttaggttaaatacagaccaagagccttcaaagccctcagtaagttgcaatacttaatttctgtaacagctaaggactgcaaaaccccactctgcatcaactgaacgcaaatcagccactttaattaagctaagcccttactagaccaatgggacttaaacccacaaacacttagttaacagctaagcaccctaatcaactggcttcaatctacttctcccgccgccgggaaaaaaggcgggagaagccccggcaggtttgaagctgcttcttcgaatttgcaattcaatatgaaaatcacctcggagctggtaaaaagaggcctaacccctgtctttagatttacagtccaatgcttcactcagccattttacctcacccccactgatgttcgccgaccgttgactattctctacaaaccacaaagacattggaacactatacctattattcggcgcatgagctggagtcctaggcacagctctaagcctccttattcgagccgagctgggccagccaggcaaccttctaggtaacgaccacatctacaacgttatcgtcacagcccatgcatttgtaataatcttcttcatagtaatacccatcataatcggaggctttggcaactgactagttcccctaataatcggtgcccccgatatggcgtttccccgcataaacaacataagcttctgactcttacctccctctctcctactcctgctcgcatctgctatagtggaggccggagcaggaacaggttgaacagtctaccctcccttagcagggaactactcccaccctggagcctccgtagacctaaccatcttctccttacacctagcaggtgtctcctctatcttaggggccatcaatttcatcacaacaattatcaatataaaaccccctgccataacccaataccaaacgcccctcttcgtctgatccgtcctaatcacagcagtcctacttctcctatctctcccagtcctagctgctggcatcactatactactaacagaccgcaacctcaacaccaccttcttcgaccccgccggaggaggagaccccattctataccaacacctattctgatttttcggtcaccctgaagtttatattcttatcctaccaggcttcggaataatctcccatattgtaacttactactccggaaaaaaagaaccatttggatacataggtatggtctgagctatgatatcaattggcttcctagggtttatcgtgtgagcacaccatatatttacagtaggaatagacgtagacacacgagcatatttcacctccgctaccataatcatcgctatccccaccggcgtcaaagtatttagctgactcgccacactccacggaagcaatatgaaatgatctgctgcagtgctctgagccctaggattcatctttcttttcaccgtaggtggcctgactggcattgtattagcaaactcatcactagacatcgtactacacgacacgtactacgttgtagctcacttccactatgtcctatcaataggagctgtatttgccatcataggaggcttcattcactgatttcccctattctcaggctacaccctagaccaaacctacgccaaaatccatttcactatcatattcatcggcgtaaatctaactttcttcccacaacactttctcggcctatccggaatgccccgacgttactcggactaccccgatgcatacaccacatgaaacatcctatcatctgtaggctcattcatttctctaacagcagtaatattaataattttcatgatttgagaagccttcgcttcgaagcgaaaagtcctaatagtagaagaaccctccataaacctggagtgactatatggatgccccccaccctaccacacattcgaagaacccgtatacataaaatctagacaaaaaaggaaggaatcgaaccccccaaagctggtttcaagccaaccccatggcctccatgactttttcaaaaaggtattagaaaaaccatttcataactttgtcaaagttaaattataggctaaatcctatatatcttaatggcacatgcagcgcaagtaggtctacaagacgctacttcccctatcatagaagagcttatcacctttcatgatcacgccctcataatcattttccttatctgcttcctagtcctgtatgcccttttcctaacactcacaacaaaactaactaatactaacatctcagacgctcaggaaatagaaaccgtctgaactatcctgcccgccatcatcctagtcctcatcgccctcccatccctacgcatcctttacataacagacgaggtcaacgatccctcccttaccatcaaatcaattggccaccaatggtactgaacctacgagtacaccgactacggcggactaatcttcaactcctacatacttcccccattattcctagaaccaggcgacctgcgactccttgacgttgacaatcgagtagtactcccgattgaagcccccattcgtataataattacatcacaagacgtcttgcactcatgagctgtccccacattaggcttaaaaacagatgcaattcccggacgtctaaaccaaaccactttcaccgctacacgaccgggggtatactacggtcaatgctctgaaatctgtggagcaaaccacagtttcatgcccatcgtcctagaattaattcccctaaaaatctttgaaatagggcccgtatttaccctatagcaccccctctaccccctctagagcccactgtaaagctaacttagcattaaccttttaagttaaagattaagagaaccaacacctctttacagtgaaatgccccaactaaatactaccgtatggcccaccataattacccccatactccttacactattcctcatcacccaactaaaaatattaaacacaaactaccacctacctccctcaccaaagcccataaaaataaaaaattataacaaaccctgagaaccaaaatgaacgaaaatctgttcgcttcattcattgcccccacaatcctaggcctacccgccgcagtactgatcattctatttccccctctattgatccccacctccaaatatctcatcaacaaccgactaatcaccacccaacaatgactaatcaaactaacctcaaaacaaataataaccatacacaacactaaaggacgaacctgatctcttatactagtatccttaatcatttttattgccacaactaacctcctcggactcctgcctcactcatttacaccaaccacccaactatctataaacctagccatggccatccccttatgagcgggcgcagtgattataggctttcgctctaagattaaaaatgccctagcccacttcttaccacaaggcacacctacaccccttatccccatactagttattatcgaaaccatcagcctactcattcaaccaatagccctggccgtacgcctaaccgctaacattactgcaggccacctactcatgcacctaattggaagcgccaccctagcaatatcaaccattaaccttccctctacacttatcatcttcacaattctaattctactgactatcctagaaatcgctgtcgccttaatccaagcctacgttttcacacttctagtaagcctctacctgcacgacaacacataatgacccaccaatcacatgcctatcatatagtaaaacccagcccatgacccctaacaggggccctctcagccctcctaatgacctccggcctagccatgtgatttcacttccactccataacgctcctcatactaggcctactaaccaacacactaaccatataccaatgatggcgcgatgtaacacgagaaagcacataccaaggccaccacacaccacctgtccaaaaaggccttcgatacgggataatcctatttattacctcagaagtttttttcttcgcaggatttttctgagccttttaccactccagcctagcccctaccccccaattaggagggcactggcccccaacaggcatcaccccgctaaatcccctagaagtcccactcctaaacacatccgtattactcgcatcaggagtatcaatcacctgagctcaccatagtctaatagaaaacaaccgaaaccaaataattcaagcactgcttattacaattttactgggtctctattttaccctcctacaagcctcagagtacttcgagtctcccttcaccatttccgacggcatctacggctcaacattttttgtagccacaggcttccacggacttcacgtcattattggctcaactttcctcactatctgcttcatccgccaactaatatttcactttacatccaaacatcactttggcttcgaagccgccgcctgatactggcattttgtagatgtggtttgactatttctgtatgtctccatctattgatgagggtcttactcttttagtataaatagtaccgttaacttccaattaactagttttgacaacattcaaaaaagagtaataaacttcgccttaattttaataatcaacaccctcctagccttactactaataattattacattttgactaccacaactcaacggctacatagaaaaatccaccccttacgagtgcggcttcgaccctatatcccccgcccgcgtccctttctccataaaattcttcttagtagctattaccttcttattatttgatctagaaattgccctccttttacccctaccatgagccctacaaacaactaacctgccactaatagttatgtcatccctcttattaatcatcatcctagccctaagtctggcctatgagtgactacaaaaaggattagactgaaccgaattggtatatagtttaaacaaaacgaatgatttcgactcattaaattatgataatcatatctaccaaatgcccctcatttacataaatattatactagcatttaccatctcacttctaggaatactagtatatcgctcacacctcatatcctccctactatgcctagaaggaataatactatcgctgttcattatagctactctcataaccctcaacacccactccctcttagccaatattgtgcctattgccatactagtctttgccgcctgcgaagcagcggtgggcctagccctactagtctcaatctccaacacatatggcctagactacgtacataacctaaacctactccaatgctaaaactaatcgtcccaacaattatattactaccactgacatgactttccaaaaaacacataatttgaatcaacacaaccacccacagcctaattattagcatcatccctctactattttttaaccaaatcaacaacaacctatttagctgttccccaaccttttcctccgaccccctaacaacccccctcctaatactaactacctgactcctacccctcacaatcatggcaagccaacgccacttatccagtgaaccactatcacgaaaaaaactctacctctctatactaatctccctacaaatctccttaattataacattcacagccacagaactaatcatattttatatcttcttcgaaaccacacttatccccaccttggctatcatcacccgatgaggcaaccagccagaacgcctgaacgcaggcacatacttcctattctacaccctagtaggctcccttcccctactcatcgcactgatttacactcacaacaccctaggctcactaaacattctactactcactctcactgcccaagaactatcaaactcctgagccaacaacttaatatgactagcttacacaatagcttttatagtaaagatacctctttacggactccacttatgactccctaaagcccatgtcgaagcccccatcgctgggtcaatagtacttgccgcagtactcttaaaactaggcggctatggtataatacgcctcacactcattctcaaccccctgacaaaacacatagcctaccccttccttgtactatccctatgaggcataattataacaagctccatctgcctacgacaaacagacctaaaatcgctcattgcatactcttcaatcagccacatagccctcgtagtaacagccattctcatccaaaccccctgaagcttcaccggcgcagtcattctcataatcgcccacggacttacatcctcattactattctgcctagcaaactcaaactacgaacgcactcacagtcgcatcataatcctctctcaaggacttcaaactctgctcccactaatagctttttgatgacttctagcaagcctcgctaacctcgccttaccccccactattaacctactgggagaactctctgtgctagtaaccacgttctcctgatcaaatatcactctcctacttacaggactcaacatactagtcacagccctatactccctctacatatttaccacaacacaatggggctcactcacccaccacattaacaacataaaaccctcattcacacgagaaaacaccctcatgttcatacacctatcccccattctcctcctatccctcaaccccgacatcattaccgggttttcctcttgtaaatatagtttaaccaaaacatcagattgtgaatctgacaacagaggcttacgaccccttatttaccgagaaagctcacaagaactgctaactcatgcccccatgtctaacaacatggctttctcaacttttaaaggataacagctatccattggtcttaggccccaaaaattttggtgcaactccaaataaaagtaataaccatgcacactactataaccaccctaaccctgacttccctaattccccccatccttaccaccctcgttaaccctaacaaaaaaaactcatacccccattatgtaaaatccattgtcgcatccacctttattatcagtctcttccccacaacaatattcatgtgcctagaccaagaagttattatctcgaactgacactgagccacaacccaaacaacccagctctccctaagcttcaaactagactacttctccataatattcatccctgtagcattgttcgttacatggtccatcatagaattctcactgtgatatataaactcagacccaaacattaatcagttcttcaaatatctactcatcttcctaattaccatactaatcttagttaccgctaacaacctattccaactgttcatcggctgagagggcgtaggaattatatccttcttgctcatcagttgatgatacgcccgagcagatgccaacacagcagccattcaagcaatcctatacaaccgtatcggcgatatcggtttcatcctcgccttagcatgatttatcctacactccaactcatgagacccacaacaaatagcccttctaaacgctaatccaagcctcaccccactactaggcctcctcctagcagcagcaggcaaatcagcccaattaggtctccacccctgactcccctcagccatagaaggccccaccccagtctcagccctactccactcaagcactatagttgtagcaggaatcttcttactcatccgcttccaccccctagcagaaaatagcccactaatccaaactctaacactatgcttaggcgctatcaccactctgttcgcagcagtctgcgcccttacacaaaatgacatcaaaaaaatcgtagccttctccacttcaagtcaactaggactcataatagttacaatcggcatcaaccaaccacacctagcattcctgcacatctgtacccacgccttcttcaaagccatactatttatgtgctccggatccatcatccacaaccttaacaatgaacaagatattcgaaaaataggaggactactcaaaaccatacctctcacttcaacctccctcaccattggcagcctagcattagcaggaatacctttcctcacaggtttctactccaaagaccacatcatcgaaaccgcaaacatatcatacacaaacgcctgagccctatctattactctcatcgctacctccctgacaagcgcctatagcactcgaataattcttctcaccctaacaggtcaacctcgcttccccacccttactaacattaacgaaaataaccccaccctactaaaccccattaaacgcctggcagccggaagcctattcgcaggattcctcattactaacaacatttccccagcatcccccttccaaacaacaatccccctctacctaaaactcacagccctcgctgtcactttcctaggacttctaacagccctagacctcaactacctaaccaacaaacttaaaataaaatccccactatgcacattttatttctccaacatactcggattctaccctagcatcacacaccgcacaatcccctatctaggccttctcacgagccaaaacctgcccctactcctcctagacctaacctgactagaaaagctattacctaaaacaatttcacagcaccaaatctccacctccatcatcacctcaacccaaaaaggcataattaaactttacttcctctctttcttcttcccactcatcctaaccctactcctaatcacataacctattcccccgagcaatctcaattacaatatatacaccaacaaacaatgttcaaccagtaactactactaatcaacgcccatagtcatacaaagcccccgcaccaataggatcctcccgaatcaaccctgacccctctccttcataaattattcagcttcctacactattaaagtttaccacaaccaccaccccatcatactctttcacccacagcaccaatcctacctccatcgctaaccccactaaaacactcaccaagacctcaacccctgacccccatgcctcaggatactcctcaatagccatcgctgtagtatatccaaagacaaccatcattccccctaaataaattaaaaaaactattaaacccatataacctcccccaaaattcagaataataacacacccgaccacaccgctaacaatcaatactaaacccccataaataggagaaggcttagaagaaaaccccacaaaccccattactaaacccacactcaacagaaacaaagcatacatcattattctcgcacgggctacaaccacgaccaatgatatgaaaaaccatcgttgtatttcaactacaagaacaccaatgaccccaatacgcaaaattaaccccctaataaaattaattaaccactcattcatcgacctccccaccccatccaacatctccgcatgatgaaacttcggctcactccttggcgcctgcctgatcctccaaatcaccacaggactattcctagccatacactactcaccagacgcctcaaccgccttttcatcaatcgcccacatcactcgagacgtaaattatggctgaatcatccgctaccttcacgccaatggcgcctcaatattctttatctgcctcttcctacacatcgggcgaggcctatattacggatcatttctctactcagaaacctgaaacatcggcattatcctcctgcttgcaactatagcaacagccttcataggctatgtcctcccgtgaggccaaatatcattctgaggggccacagtaattacaaacttactatccgccatcccatacattgggacagacctagttcaatgaatctgaggaggctactcagtagacagtcccaccctcacgcgattctttacctttcacttcatcttgcccttcattattgcagccctagcagcactccacctcctattcttgcacgaaacgggatcaaacaaccccctaggaatcacctcccattccgataaaatcaccttccacccttactacacaatcaaagacgccctcggcttacttctcttcattctctccttaatgacattaacactattctcaccagacctcctaggcgacccagacaattataccctagccaaccccttaaacacccctccccacatcaagcccgaatgatatttcctattcgcctacacaattctccgatccgtccctaacaagctaggaggcgtccttgccctattactatccatcctcatcctagcaataatccccatcctccatatatccaaacaacaaagcataatatttcgcccactaagccaatcactttattgactcctagccgcagacctcctcattctaacctgaatcggaggacaaccagtaagctacccttttaccatcattggacaagtagcatccgtactatacttcacaacaatcctaatcctaataccaactatctccctaattgaaaacaaaatactcaaatgggcctgtccttgtagtataaactaatacaccagtcttgtaaaccgaagatgaaaacctttttccaaggacaaatcagagaaaaagtctttaactccaccattagcacccaaagctaagattctaatttaaactattctctgttctttcatggggaagcagatttgggtaccacccaagtattgactcacccatcaacaaccgctatgtatttcgtacattactgccagccaccatgaatattgcacggtaccataaatacttgaccacctgtagtacataaaaacccaatccacatcaaaaccccctccccatgcttacaagcaagtacagcaatcaaccctcaactatcacacatcaactgcaactccaaagccacccctcacccactaggataccaacaaacctacccatctttaacagtacatagtacataaagccatctaccgtacatagcacattacagtcaaatcccttctcgtccccatggatgacccccctcagataggggtcccttggccaccatcctccgtgaaatcaatatcccgcacaagagtgctactctcctcgctccgggcccataacacttgggggtagctaaagtgaactgtatccgacatctggttcctacttcagggccataaagcctaaatagcccacacgttccccttaaataagacatcacgatg

SEQ ID NO: 203 - DNA, 16571 bp, Homo sapiens mitochondrial
  3109: "n" refers to a nucleotide at position 3107 of the Cambridge Reference Sequence (CRS, Anderson et al. 1981 Nature 290:457-465), later determined to be absent from the human mtDNA sequence according to the revised CRS (rCRS, Andrews et al. 1999 Nature Genetics 23:147); "n" therefore represents a single nucleotide deletion at a position corresponding to nucleotide 3107 of SEQ ID NO:1 as provided herein.
gatcacaggtctatcaccctattaaccactcacgggagctctccatgcatttggtattttcgtctggggggtgtgcacgcgatagcattgcgagacgctggagccggagcaccctatgtcgcagtatctgtctttgattcctgcctcatcctattatttatcgcacctacgttcaatattacaggcgaacatacttactaaagtgtgttaattaattaatgcttgtaggacataataataacaattgaatgtctgcacagccgcttcccacacagacatcataacaaaaaatttccaccaaaccccccctcccccccgcttctggccacagcacttaaacacatctctgccaaaccccaaaaacaaagaaccctaacaccagcctaaccagatttcaaattttatcttttggcggtatgcacttttaacagtcaccccccaactaacacattattttcccctcccactcccatactactaatctcatcaacacaacccccgcccatcctacccagcacacacacaccgctgctaaccccataccccgaaccaaccaaaccccaaagacaccccccacagtttatgtagcttacctcctcaaagcaatacactgaaaatgtttagacgggctcacatcaccccataaacaaataggtttggtcctagcctttctattagctcttagtaagattacacatgcaagcatccccgttccagtgagttcaccctctaaatcaccacgatcaaaagggacaagcatcaagcacgcagcaatgcagctcaaaacgcttagcctagccacacccccacgggaaacagcagtgattaacctttagcaataaacgaaagtttaactaagctatactaaccccagggttggtcaatttcgtgccagccaccgcggtcacacgattaacccaagtcaatagaagccggcgtaaagagtgttttagatcaccccctccccaataaagctaaaactcacctgagttgtaaaaaactccagttgacacaaaatagactacgaaagtggctttaacatatctgaacacacaatagctaagacccaaactgggattagataccccactatgcttagccctaaacctcaacagttaaatcaacaaaactgctcgccagaacactacgagccacagcttaaaactcaaaggacctggcggtgcttcatatccctctagaggagcctgttctgtaatcgataaaccccgatcaacctcaccacctcttgctcagcctatataccgccatcttcagcaaaccctgatgaaggctacaaagtaagcgcaagtacccacgtaaagacgttaggtcaaggtgtagcccatgaggtggcaagaaatgggctacattttctaccccagaaaactacgatagcccttatgaaacttaagggtcgaaggtggatttagcagtaaactgagagtagagtgcttagttgaacagggccctgaagcgcgtacacaccgcccgtcaccctcctcaagtatacttcaaaggacatttaactaaaacccctacgcatttatatagaggagacaagtcgtaacatggtaagtgtactggaaagtgcacttggacgaaccagagtgtagcttaacacaaagcacccaacttacacttaggagatttcaacttaacttgaccgctctgagctaaacctagccccaaacccactccaccttactaccagacaaccttagccaaaccatttacccaaataaagtataggcgatagaaattgaaacctggcgcaatagatatagtaccgcaagggaaagatgaaaaattataaccaagcataatatagcaaggactaacccctataccttctgcataatgaattaactagaaataactttgcaaggagagccaaagctaagacccccgaaaccagacgagctacctaagaacagctaaaagagcacacccgtctatgtagcaaaatagtgggaagatttataggtagaggcgacaaacctaccgagcctggtgatagctggttgtccaagatagaatcttagttcaactttaaatttgcccacagaaccctctaaatccccttgtaaatttaattgttagtccaaagaggaacagctctttggacactaggaaaaaaccttgtagagagagtaaaaaatttaacacccatagtaggcctaaaagcagccaccaattaagaaagcgttcaagctcaacacccactacctaaaaaatcccaaacatataactgaactcctcacacccaattggaccaatctatcaccctatagaagaactaatgttagtataagtaacatgaaaacattctcctccgcataagcctgcgtcagattaaaacactgaactgacaattaacagcccaatatctacaatcaaccaacaagtcattattaccctcactgtcaacccaacacaggcatgctcataaggaaaggttaaaaaaagtaaaaggaactcggcaaatcttaccccgcctgtttaccaaaaacatcacctctagcatcaccagtattagaggcaccgcctgcccagtgacacatgtttaacggccgcggtaccctaaccgtgcaaaggtagcataatcacttgttccttaaatagggacctgtatgaatggctccacgagggttcagctgtctcttacttttaaccagtgaaattgacctgcccgtgaagaggcgggcatgacacagcaagacgagaagaccctatggagctttaatttattaatgcaaacagtacctaacaaacccacaggtcctaaactaccaaacctgcattaaaaatttcggttggggcgacctcggagcagaacccaacctccgagcagtacatgctaagacttcaccagtcaaagcgaactactatactcaattgatccaataacttgaccaacggaacaagttaccctagggataacagcgcaatcctattctagagtccatatcaacaatagggtttacgacctcgatgttggatcaggacatcccaatggtgcagccgctattaaaggttcgtttgttcaacgattaaagtcctacgtgatctgagttcagaccggagtaatccaggtcggtttctatctacnttcaaattcctccctgtacgaaaggacaagagaaataaggcctacttcacaaagcgccttcccccgtaaatgatatcatctcaacttagtattatacccacacccacccaagaacagggtttgttaagatggcagagcccggtaatcgcataaaacttaaaactttacagtcagaggttcaattcctcttcttaacaacatacccatggccaacctcctactcctcattgtacccattctaatcgcaatggcattcctaatgcttaccgaacgaaaaattctaggctatatacaactacgcaaaggccccaacgttgtaggcccctacgggctactacaacccttcgctgacgccataaaactcttcaccaaagagcccctaaaacccgccacatctaccatcaccctctacatcaccgccccgaccttagctctcaccatcgctcttctactatgaacccccctccccatacccaaccccctggtcaacctcaacctaggcctcctatttattctagccacctctagcctagccgtttactcaatcctctgatcagggtgagcatcaaactcaaactacgccctgatcggcgcactgcgagcagtagcccaaacaatctcatatgaagtcaccctagccatcattctactatcaacattactaataagtggctcctttaacctctccacccttatcacaacacaagaacacctctgattactcctgccatcatgacccttggccataatatgatttatctccacactagcagagaccaaccgaacccccttcgaccttgccgaaggggagtccgaactagtctcaggcttcaacatcgaatacgccgcaggccccttcgccctattcttcatagccgaatacacaaacattattataataaacaccctcaccactacaatcttcctaggaacaacatatgacgcactctcccctgaactctacacaacatattttgtcaccaagaccctacttctaacctccctgttcttatgaattcgaacagcatacccccgattccgctacgaccaactcatacacctcctatgaaaaaacttcctaccactcaccctagcattacttatatgatatgtctccatacccattacaatctccagcattccccctcaaacctaagaaatatgtctgataaaagagttactttgatagagtaaataataggagcttaaacccccttatttctaggactatgagaatcgaacccatccctgagaatccaaaattctccgtgccacctatcacaccccatcctaaagtaaggtcagctaaataagctatcgggcccataccccgaaaatgttggttatacccttcccgtactaattaatcccctggcccaacccgtcatctactctaccatctttgcaggcacactcatcacagcgctaagctcgcactgattttttacctgagtaggcctagaaataaacatgctagcttttattccagttctaaccaaaaaaataaaccctcgttccacagaagctgccatcaagtatttcctcacgcaagcaaccgcatccataatccttctaatagctatcctcttcaacaatatactctccggacaatgaaccataaccaatactaccaatcaatactcatcattaataatcataatggctatagcaataaaactaggaatagccccctttcacttctgagtcccagaggttacccaaggcacccctctgacatccggcctgcttcttctcacatgacaaaaactagcccctatctcaatcatataccaaatctctccctcactaaacgtaagccttctcctcactctctcaatcttatccatcatagcaggcagttgaggtggattaaaccaaacccagctacgcaaaatcttagcatactcctcaattacccacataggatgaataatagcagttctaccgtacaaccctaacataaccattcttaatttaactatttatattatcctaactactaccgcattcctactactcaacttaaactccagcaccacgaccctactactatctcgcacctgaaacaagataacatgactaacacccttaattccatccaccctcctctccctaggaggcctgcccccgctaaccggctttttgcccaaatgggccattatcgaagaattcacaaaaaacaatagcctcatcatccccaccatcatagccaccatcaccctccttaacctctacttctacctacgcctaatctactccacctcaatcacactactccccatatctaacaacgtaaaaataaaatgacagtttgaacatacaaaacccaccccattcctccccacactcatcgcccttaccacgctactcctacctatctccccttttatactaataatcttatagaaatttaggttaaatacagaccaagagccttcaaagccctcagtaagttgcaatacttaatttctgtaacagctaaggactgcaaaaccccactctgcatcaactgaacgcaaatcagccactttaattaagctaagcccttactagaccaatgggacttaaacccacaaacacttagttaacagctaagcaccctaatcaactggcttcaatctacttctcccgccgccgggaaaaaaggcgggagaagccccggcaggtttgaagctgcttcttcgaatttgcaattcaatatgaaaatcacctcggagctggtaaaaagaggcctaacccctgtctttagatttacagtccaatgcttcactcagccattttacctcacccccactgatgttcgccgaccgttgactattctctacaaaccacaaagacattggaacactatacctattattcggcgcatgagctggagtcctaggcacagctctaagcctccttattcgagccgagctgggccagccaggcaaccttctaggtaacgaccacatctacaacgttatcgtcacagcccatgcatttgtaataatcttcttcatagtaatacccatcataatcggaggctttggcaactgactagttcccctaataatcggtgcccccgatatggcgtttccccgcataaacaacataagcttctgactcttacctccctctctcctactcctgctcgcatctgctatagtggaggccggagcaggaacaggttgaacagtctaccctcccttagcagggaactactcccaccctggagcctccgtagacctaaccatcttctccttacacctagcaggtgtctcctctatcttaggggccatcaatttcatcacaacaattatcaatataaaaccccctgccataacccaataccaaacgcccctcttcgtctgatccgtcctaatcacagcagtcctacttctcctatctctcccagtcctagctgctggcatcactatactactaacagaccgcaacctcaacaccaccttcttcgaccccgccggaggaggagaccccattctataccaacacctattctgatttttcggtcaccctgaagtttatattcttatcctaccaggcttcggaataatctcccatattgtaacttactactccggaaaaaaagaaccatttggatacataggtatggtctgagctatgatatcaattggcttcctagggtttatcgtgtgagcacaccatatatttacagtaggaatagacgtagacacacgagcatatttcacctccgctaccataatcatcgctatccccaccggcgtcaaagtatttagctgactcgccacactccacggaagcaatatgaaatgatctgctgcagtgctctgagccctaggattcatctttcttttcaccgtaggtggcctgactggcattgtattagcaaactcatcactagacatcgtactacacgacacgtactacgttgtagctcacttccactatgtcctatcaataggagctgtatttgccatcataggaggcttcattcactgatttcccctattctcaggctacaccctagaccaaacctacgccaaaatccatttcactatcatattcatcggcgtaaatctaactttcttcccacaacactttctcggcctatccggaatgccccgacgttactcggactaccccgatgcatacaccacatgaaacatcctatcatctgtaggctcattcatttctctaacagcagtaatattaataattttcatgatttgagaagccttcgcttcgaagcgaaaagtcctaatagtagaagaaccctccataaacctggagtgactatatggatgccccccaccctaccacacattcgaagaacccgtatacataaaatctagacaaaaaaggaaggaatcgaaccccccaaagctggtttcaagccaaccccatggcctccatgactttttcaaaaaggtattagaaaaaccatttcataactttgtcaaagttaaattataggctaaatcctatatatcttaatggcacatgcagcgcaagtaggtctacaagacgctacttcccctatcatagaagagcttatcacctttcatgatcacgccctcataatcattttccttatctgcttcctagtcctgtatgcccttttcctaacactcacaacaaaactaactaatactaacatctcagacgctcaggaaatagaaaccgtctgaactatcctgcccgccatcatcctagtcctcatcgccctcccatccctacgcatcctttacataacagacgaggtcaacgatccctcccttaccatcaaatcaattggccaccaatggtactgaacctacgagtacaccgactacggcggactaatcttcaactcctacatacttcccccattattcctagaaccaggcgacctgcgactccttgacgttgacaatcgagtagtactcccgattgaagcccccattcgtataataattacatcacaagacgtcttgcactcatgagctgtccccacattaggcttaaaaacagatgcaattcccggacgtctaaaccaaaccactttcaccgctacacgaccgggggtatactacggtcaatgctctgaaatctgtggagcaaaccacagtttcatgcccatcgtcctagaattaattcccctaaaaatctttgaaatagggcccgtatttaccctatagcaccccctctaccccctctagagcccactgtaaagctaacttagcattaaccttttaagttaaagattaagagaaccaacacctctttacagtgaaatgccccaactaaatactaccgtatggcccaccataattacccccatattccttacactattcctcatcacccaactaaaaatattaaacacaaactaccacctacctccctcaccaaagcccataaaaataaaaaattataacaaaccctgagaaccaaaatgaacgaaaatctgttcgcttcattcattgcccccacaatcctaggcctacccgccgcagtactgatcattctatttccccctctattgatccccacctccaaatatctcatcaacaaccgactaatcaccacccaacaatgactaatcaaactaacctcaaaacaaatgatagccatacacaacactaaaggacgaacctgatctcttatactagtatccttaatcatttttattgccacaactaacctcctcggactcctgcctcactcatttacaccaaccacccaactatctataaacctagccatggccatccccttatgagcgggcgcagtgattataggctttcgctctaagattaaaaatgccctagcccacttcttaccacaaggcacacctacaccccttatccccatactagttattatcgaaaccatcagcctactcattcaaccaatagccctggccgtacgcctaaccgctaacattactgcaggccacctactcatgcacctaattggaagcgccaccctagcaatatcaaccattaaccttccctctacacttatcatcttcacaattctaattctactgactatcctagaaatcgctgtcgccttaatccaagcctacgttttcacacttctagtaagcctctacctgcacgacaacacataatgacccaccaatcacatgcctatcatatagtaaaacccagcccatgacccctaacaggggccctctcagccctcctaatgacctccggcctagccatgtgatttcacttccactccataacgctcctcatactaggcctactaaccaacacactaaccatataccaatgatggcgcgatgtaacacgagaaagcacataccaaggccaccacacaccacctgtccaaaaaggccttcgatacgggataatcctatttattacctcagaagtttttttcttcgcaggatttttctgagccttttaccactccagcctagcccctaccccccaactaggagggcactggcccccaacaggcatcaccccgctaaatcccctagaagtcccactcctaaacacatccgtattactcgcatcaggagtatcaatcacctgagctcaccatagtctaatagaaaacaaccgaaaccaaataattcaagcactgcttattacaattttactgggtctctattttaccctcctacaagcctcagagtacttcgagtctcccttcaccatttccgacggcatctacggctcaacattttttgtagccacaggcttccacggacttcacgtcattattggctcaactttcctcactatctgcttcatccgccaactaatatttcactttacatccaaacatcactttggcttcgaagccgccgcctgatactggcattttgtagatgtggtttgactatttctgtatgtctccatctattgatgagggtcttactcttttagtataaatagtaccgttaacttccaattaactagttttgacaacattcaaaaaagagtaataaacttcgccttaattttaataatcaacaccctcctagccttactactaataattattacattttgactaccacaactcaacggctacatagaaaaatccaccccttacgagtgcggcttcgaccctatatcccccgcccgcgtccctttctccataaaattcttcttagtagctattaccttcttattatttgatctagaaattgccctccttttacccctaccatgagccctacaaacaactaacctgccactaatagttatgtcatccctcttattaatcatcatcctagccctaagtctggcctatgagtgactacaaaaaggattagactgagctgaattggtatatagtttaaacaaaacgaatgatttcgactcattaaattatgataatcatatttaccaaatgcccctcatttacataaatattatactagcatttaccatctcacttctaggaatactagtatatcgctcacacctcatatcctccctactatgcctagaaggaataatactatcgctgttcattatagctactctcataaccctcaacacccactccctcttagccaatattgtgcctattgccatactagtctttgccgcctgcgaagcagcggtgggcctagccctactagtctcaatctccaacacatatggcctagactacgtacataacctaaacctactccaatgctaaaactaatcgtcccaacaattatattactaccactgacatgactttccaaaaaacacataatttgaatcaacacaaccacccacagcctaattattagcatcatccccctactattttttaaccaaatcaacaacaacctatttagctgttccccaaccttttcctccgaccccctaacaacccccctcctaatactaactacctgactcctacccctcacaatcatggcaagccaacgccacttatccagtgaaccactatcacgaaaaaaactctacctctctatactaatctccctacaaatctccttaattataacattcacagccacagaactaatcatattttatatcttcttcgaaaccacacttatccccaccttggctatcatcacccgatgaggcaaccagccagaacgcctgaacgcaggcacatacttcctattctacaccctagtaggctcccttcccctactcatcgcactaatttacactcacaacaccctaggctcactaaacattctactactcactctcactgcccaagaactatcaaactcctgagccaacaacttaatatgactagcttacacaatagcttttatagtaaagatacctctttacggactccacttatgactccctaaagcccatgtcgaagcccccatcgctgggtcaatagtacttgccgcagtactcttaaaactaggcggctatggtataatacgcctcacactcattctcaaccccctgacaaaacacatagcctaccccttccttgtactatccctatgaggcataattataacaagctccatctgcctacgtcaaacagacctaaaatcgctcattgcatactcttcaatcagccacatagccctcgtagtaacagccattctcatccaaaccccctgaagcttcaccggcgcagtcattctcataatcgcccacggacttacatcctcattactattctgcctagcaaactcaaactacgaacgcactcacagtcgcatcataatcctctctcaaggacttcaaactctactcccactaatagctttttgatgacttctagcaagcctcgctaacctcgccttaccccccactattaacctactgggagaactctctgtgctagtaaccacgttctcctgatcaaatatcactctcctacttacaggactcaacatactagtcacagccctatactccctctacatatttaccacaacacaatggggctcactcacccaccacattaacaacataaaaccctcattcacacgagaaaacaccctcatgttcatacacctatcccccattctcctcctatccctcaaccccgacatcattaccgggttttcctcttgtaaatatagtttaaccaaaacatcagattgtgaatctgacaacagaggcttacgaccccttatttaccgagaaagctcacaagaactgctaactcatgcccccatgtctaacaacatggctttctcaacttttaaaggataacagctatccattggtcttaggccccaaaaattttggggcaactccaaataaaagtaataaccatgcacactactataaccaccctaaccctgacttccctaattccccccatccttaccaccctcgttaaccctaacaaaaaaaactcatacccccattatgtaaaatccattgtcgcatccacctttattatcagtctcttccccacaacaatattcatgtgcctagaccaagaagttattatctcgaactgacactgagccacaacccaaacaacccagctctccctaagcttcaaactagactacttctccataatattcatccctgtagcattgttcgttacatggtccatcatagaattctcactgtgatatataaactcagacccaaacattaatcagttcttcaaatatctactcattttcctaattaccatactaatcttagttaccgctaacaacctattccaactgttcatcggctgagagggcgtaggaattatatccttcttgctcatcagttgatgatacgcccgagcagatgccaacacagcagccattcaagcaatcctatacaaccgtatcggcgatatcggtttcatcctcgccttagcatgatttatcctacactccaactcatgagacccacaacaaatagcccttctaaacgctaatccaagcctcaccccactactaggcctcctcctagcagcagcaggcaaatcagcccaattaggtctccacccctgactcccctcagccatagaaggccccaccccagtctcagccctactccactcaagcactatagttgtagcaggaatcttcttactcatccgcttccaccccctagcagaaaatagcccactaatccaaactctaacactatgcttaggcgctatcaccactctgttcgcagcagtctgcgcccttacacaaaatgacatcaaaaaaatcgtagccttctccacttcaagtcaactaggactcataatagttacaatcggcatcaaccaaccacacctagcattcctgcacatctgtacccacgccttcttcaaagccatactatttatgtgctccgggtccatcatccacaaccttaacaatgaacaagatattcgaaaaataggaggactactcaaaaccatacctctcacttcaacctccctcaccattggcagcctagcattagcaggaatacctttcctcacaggtttctactccaaagaccacatcatcgaaaccgcaaacatatcatacacaaacgcctgagccctatctattactctcatcgctacctccctgacaagcgcctatagcactcgaataattcttctcaccctaacaggtcaacctcgcttccccacccttactaacattaacgaaaataaccccaccctactaaaccccattaaacgcctggcagccggaagcctattcgcaggatttctcattactaacaacatttcccccgcatcccccttccaaacaacaatccccctctacctaaaactcacagccctcgctgtcactttcctaggacttctaacagccctagacctcaactacctaaccaacaaacttaaaataaaatccccactatgcacattttatttctccaacatactcggattctaccctagcatcacacaccgcacaatcccctatctaggccttcttacgagccaaaacctgcccctactcctcctagacctaacctgactagaaaagctattacctaaaacaatttcacagcaccaaatctccacctccatcatcacctcaacccaaaaaggcataattaaactttacttcctctctttcttcttcccactcatcctaaccctactcctaatcacataacctattcccccgagcaatctcaattacaatatatacaccaacaaacaatgttcaaccagtaactactactaatcaacgcccataatcatacaaagcccccgcaccaataggatcctcccgaatcaaccctgacccctctccttcataaattattcagcttcctacactattaaagtttaccacaaccaccaccccatcatactctttcacccacagcaccaatcctacctccatcgctaaccccactaaaacactcaccaagacctcaacccctgacccccatgcctcaggatactcctcaatagccatcggtgtagtatatccaaagacaaccatcattccccctaaataaattaaaaaaactattaaacccatataacctcccccaaaattcagaataataacacacccgaccacaccgctaacaatcaatactaaacccccataaataggagaaggcttagaagaaaaccccacaaaccccattactaaacccacactcaacagaaacaaagcatatatcattattctcgcacggactacaaccacgaccaatgatatgaaaaaccatcgttgtatttcaactacaagaacaccaatgaccccaatacgcaaaattaaccccctaataaaactaattaaccactcattcatcgacctccccaccccatccaacatctccgcatgatgaaacttcggctcactccttggcgcctgcctgatcctccaaatcaccacaggactattcctagccatgcactactcaccagacgcctcaaccgccttttcatcaatcgcccacatcactcgagacgtaaattatggctgaatcatccgctaccttcacgccaatggcgcctcaatattctttatctgcctcttcctacacatcggacgaggcctatattacggatcatttctctactcagaaacctgaaacatcggcattatcctcctgcttgcaactatagcaacagccttcataggctatgtcctcccgtgaggccaaatatcattctgaggggccacagtaattacaaacttactatccgccatcccatacattgggacagacctagttcaatgaatctgaggaggctactcagtagacagtcccaccctcacacgattctttacctttcacttcatcttacccttcattattgcagccctagcagcactccacctcctattcttgcacgaaacgggatcaaacaaccccctaggaatcacctcccattccgataaaatcaccttccacccttactacacaatcaaagacgccctcggcttacttctcttccttctctccttaatgacattaacactattctcaccagacctcctaggcgacccagacaattataccctagccaaccccttaaacacccctccccacatcaagcccgaatgatatttcctattcgcctacacaattctccgatccgtccctaacaaactaggaggcgtccttgccctattactatccatcctcatcctagcaataatccccatcctccatatatccaaacaacaaagcataatatttcgcccactaagccaatcactttattgactcctagccgcagacctcctcattctaacctgaatcggaggacaaccagtaagctacccttttaccatcattggacaagtagcatccgtactatacttcacaacaatcctaatcctaataccaactatctccctaattgaaaacaaaatactcaaatgggcctgtccttgtagtataaactaatacaccagtcttgtaaaccggagatgaaaacctttttccaaggacaaatcagagaaaaagtctttaactccaccattagcacccaaagctaagattctaatttaaactattctctgttctttcatggggaagcagatttgggtaccacccaagtattgactcacccatcaacaaccgctatgtatttcgtacattactgccagccaccatgaatattgtacggtaccataaatacttgaccacctgtagtacataaaaacccaatccacatcaaaaccccctccccatgcttacaagcaagtacagcaatcaacctccaactatcacacatcaactgcaactccaaagccacccctcacccactagaataccaacaaacctacccacccttaacagtacatagtacataaagccattcaccgtacatagcacattacagtcaaatcccttctcgcccccatggatgacccccctcagataggggtcccttgaccaccatcctccgtgaaatcaatatcccgcacaagagtgctactctcctcgctccgggcccataacacttgggggtagctaaagtgaactgtatccgacatctggttcctacttcagggtcataaagcctaaatagcccacacgttccccttaaataagacatcacgatg

SEQ ID NO: 204 - DNA, 16564 bp, Homo sapiens mitochondrial
  3111: "n" refers to a nucleotide at position 3107 of the Cambridge Reference Sequence (CRS, Anderson et al. 1981 Nature 290:457-465), later determined to be absent from the human mtDNA sequence according to the revised CRS (rCRS, Andrews et al. 1999 Nature Genetics 23:147); "n" therefore represents a single nucleotide deletion at a position corresponding to nucleotide 3107 of SEQ ID NO:1 as provided herein.
gatcacaggtctatcaccctattaaccactcacgggagctctccatgcatttggtattttcgtctggggggtgtgcacgcgatagcattgcgagacgctggagccggagcaccctatgtcgcagtatctgtctttgattcctgcctcatcctattatttatcgcacctacgttcaatattacaggcgaacatacttactaaagtgtgttaattaattaatgcttgtaggacataataataacaattgaatgtctgcacagccgctttccacacagacatcataacaaaaaatttccaccaaaccccccctcccccccgcttctggccacagcacttaaacacatctctgccaaaccccaaaaacaaagaaccctaacaccagcctaaccagatttcaaattttatcttttggcggtatgcacttttaacagtcaccccccaactaacacattattttcccctcccactcccatactactaatctcatcaatacaacccccacccatcctacccagcacacacacaccacgctgctaaccccataccccgaaccaaccaaaccccaaagacaccccccacagtttatgtagcttacctcctcaaagcaatacactgaaaatgtttagacgggctcacatcaccccataaacaaataggtttggtcctagcctttctattagctcttagtaagattacacatgcaagcatccccattccagtgagttcaccctctaaatcaccacgatcaaaagggacaagcatcaagcacgcagcaatgcagctcaaaacgcttagcctagccacacccccacgggaaacagcagtgattagcctttagcaataaacgaaagtttaactaagctatactaaccccagggttggtcaatttcgtgccagccaccgcggtcacacgattaacccaagtcaatagaagccggcgtaaagagtgttttagatcaccccctccccaataaagctaaaactcacctgagttgtaaaaaactccagttgacacaaaatagactacgaaagtggctttaacatatctgaacacacaatagctaagacccaaactgggattagataccccactatgcttagccctaaacctcaacagttaaatcaacaaaactgctcgccagaacactacgagccacagcttaaaactcaaaggacctggcggtgcttcatatccctctagaggagcctgttctgtaatcgataaaccccgatcaacctcaccacctcttgctcagcctatataccgccatcttcagcaaaccctgatgaaggctacaaagtaagcgcaagtacccacgtaaagacgttaggtcaaggtgtagcccatgaggtggcaagaaatgggctacattttctaccccagaaaactacgatagcccttatgaaacttaagggtcgaaggtggatttagcagtaaactgagagtagagtgcttagttgaacagggccctgaagcgcgtacacaccgcccgtcaccctcctcaagtatacttcaaaggacatttaactaaaacccctacgcatttatatagaggagacaagtcgtaacatggtaagtgtactggaaagtgcacttggacgaaccagagtgtagcttaacacaaagcacccaacttacacttaggagatttcaacttaacttgaccgctctgagctaaacctagccccaaacccactccaccttactaccagacaaccttagccaaaccatttacccaaataaagtataggcgatagaaattgaaacctggcgcaatagatatagtaccgcaagggaaagatgaaaaattataaccaagcataatatagcaaggactaacccctataccttctgcataatgaattaactagaaataactttgcaaggagagccaaagctaagacccccgaaaccagacgagctacctaagaacagctaaaagagcacacccgtctatgtagcaaaatagtgggaagatttataggtagaggcgacaaacctaccgagcctggtgatagctggttgtccaagatagaatcttagttcaactttaaatttgcccacagaaccctctaaatccccttgtaaatttaactgttagtccaaagaggaacagctctttggacactaggaaaaaaccttgtagagagagtaaaaaatttaacacccatagtaggcctaaaagcagccaccaattaagaaagcgttcaagctcaacacccactacctaaaaaatcccaaacatataactgaactcctcacacccaattggaccaatctatcaccctatagaagaactaatgttagtataagtaacatgaaaacattctcctccgcataagcctgcgtcagattaaaacactgaactgacaattaacagcccaatatctacaatcaaccaacaagtcattattaccctcactgtcaacccaacacaggcatgctcataaggaaaggttaaaaaaagtaaaaggaactcggcaaatcttaccccgcctgtttaccaaaaacatcacctctagcatcaccagtattagaggcaccgcctgcccagtgacacatgtttaacggccgcggtaccctaaccgtgcaaaggtagcataatcacttgttccttaaatagggacctgtatgaatggctccacgagggttcagctgtctcttacttttaaccagtgaaattgacctgcccgtgaagaggcgggcatgacacagcaagacgagaagaccctatggagctttaatttattaatgcaaacagtacctaacaaacccacaggtcctaaactaccaaacctgcattaaaaatttcggttggggcgacctcggagcagaacccaacctccgagcagtacatgctaagacttcaccagtcaaagcgaactactatactcaattgatccaataacttgaccaacggaacaagttaccctagggataacagcgcaatcctattctagagtccatatcaacaatagggtttacgacctcgatgttggatcaggacatcccgatggtgcagccgctattaaaggttcgtttgttcaacgattaaagtcctacgtgatctgagttcagaccggagtaatccaggtcggtttctatctacnttcaaattcctccctgtacgaaaggacaagagaaataaggcctacttcacaaagcgccttcccccgtaaatgatatcatctcaacttagtattatacccacacccacccaagaacagggtttgttaagatggcagagcccggtaatcgcataaaacttaaaactttacagtcagaggttcaattcctcttcttaacaacatacccatggccaacctcctactcctcattgtacccattctaatcgcaatggcattcctaatgcttaccgaacgaaaaattctaggctatatacaactacgcaaaggccccaacgttgtaggcccctacgggctactacaacccttcgctgacgccataaaactcttcaccaaagagcccctaaaacccgccacatctaccatcaccctctacatcaccgccccgaccttagctctcaccgtcgctcttctactatgaacccccctccccatacccaaccccctggtcaacctcaacctaggcctcctatttattctagccacctctagcctagccgtttactcaatcctctgatcagggtgagcatcaaactcaaactacgccctgatcggcgcactgcgagcagtagcccaaacaatctcatatgaagtcaccctagccatcattctactatcaacattactaataagtggctcctttaacctctccgcccttatcacaacacaagaacacctctgattactcctgccatcatgacccttggccataatatgatttatctccacactagcagagaccaaccgaacccccttcgaccttgccgaaggggagtccgaactagtctcaggcttcaacatcgaatacgccgcaggccccttcgccctattcttcatagccgaatacacaaatattattataataaacaccctcaccactacaatcttcctaggaacaacatatgacgcactctcccctgaactctacacaacatattttgtcaccaagaccctacttctaacctccctgttcttatgaattcgaacagcatacccccgattccgctacgaccaactcatacacctcctatgaaaaaacttcctaccactcaccctagcattacttatatgatatgtctccatacccattacaatctccagcattccccctcaaacctaagaaatatgtctgataaaagagttactttgatagagtaaataataggagcttaaacccccttatttctaggactatgagaatcgaacccatccctgagaatccaaaattctccgtgccacctatcacaccccatcctaaagtaaggtcagctaaataagctatcgggcccataccccgaaaatgttggttatacccttcccgtactaattaatcccctggcccaacccgtcatctactctaccatctttgcaggcacactcatcacagcgctaagctcgcactgattttttacctgagtaggcctagaaataaacatgctagcttttattccagttctaaccaaaaaaataaaccctcgttccacagaagctgccatcaagtatttcctcacgcaagcaaccgcatccataatccttctaatagctatcctcttcaacaatatactctccggacaatgaaccataaccaatactaccaatcaatactcatcattaataatcataatggctatagcaataaaactaggaatagccccctttcacttctgagtcccagaagttacccaaggcacccctctgacatccggcctgcttcttctcacatgacaaaaactagcccccatctcaatcatataccaaatctctccctcactaaacgtaagccttctcctcactctctcaatcttatccatcatagcaggcagttgaggtggactaaaccaaacccagctacgcaaaatcttagcatactcctcaattacccacataggatgaataatagcagttctaccgtacaaccctaacataaccattcttaatttaactatttatattatcctaactactaccgcattcctactactcaacttaaactccagcaccacgaccctactactatctcgcacctgaaacaagctaacatgactaacacccttaattccatccaccctcctctccctaggaggcctgcccccgctaaccggctttttgcccaaatgggccattatcgaagaattcacaaaaaacaatagcctcatcatccccaccatcatagccaccatcaccctccttaacctctacttctacctacgcctaatctactccacctcaatcacactactccccatatctaacaacgtaaaaataaaatgacagtttgaacatacaaaacccaccccattcctccccacactcatcgcccttaccacgctactcctacctatctccccttttatactaataatcttatagaaatttaggttaaatacagaccaagagccttcaaagccctcagtaagttgcaatacttaatttctgtaacagctaaggactgcaaaaccccactctgcatcaactgaacgcaaatcagccactttaattaagctaagcccttactagaccaatgggacttaaacccacaaacacttagttaacagctaagcaccctaatcaactggcttcaatctacttctcccgccgccgggaaaaaaggcgggagaagccccggcaggtttgaagctgcttcttcgaatttgcaattcaatatgaaaatcacctcggagctggtaaaaagaggcctaacccctgtctttagatttacagtccaatgcttcactcagccattttacctcacccccactgatgttcgccgaccgttgactattctctacaaaccacaaagacattggaacactatacctattattcggcgcatgagctggagtcctaggcacagctctaagcctccttattcgagccgagctgggccagccaggcaaccttctaggtaacgaccacatctacaacgttatcgtcacagcccatgcatttgtaataatcttcttcatagtaatacccatcataatcggaggctttggcaactgactagttcccctaataatcggtgcccccgatatggcgtttccccgcataaacaacataagcttctgactcttacctccctctctcctactcctgctcgcatctgctatagtggaggccggagcaggaacaggttgaacagtctaccctcccttagcagggaactactcccaccctggagcctccgtagacctaaccatcttctccttacacctagcaggtgtctcctctatcttaggggccatcaatttcatcacaacaattatcaatataaaaccccctgccataacccaataccaaacgcccctcttcgtctgatccgtcctaattacagcagtcctacttctcctatctctcccagtcctagctgctggcatcactatactactaacagaccgcaacctcaacaccaccttcttcgaccccgccggaggaggagaccccattctataccaacacctattctgatttttcggtcaccctgaagtttatattcttatcctaccaggcttcggaataatctcccatattgtaacttactactccggaaaaaaagaaccatttggatacataggtatggtctgagctatgatatcaattggcttcctagggtttatcgtgtgagcacaccatatatttacagtaggaatagacgtagacacacgagcatatttcacctccgctaccataatcatcgctatccccaccggcgtcaaagtatttagctgactcgccacactccacggaagcaatatgaaatgatctgctgcagtgctctgagccctaggattcatctttcttttcaccgtaggtggcctgactggcattgtattagcaaactcatcactagacatcgtactacacgacacgtactacgttgtagctcacttccactatgtcctatcaataggagctgtatttgccatcataggaggcttcattcactgatttcccctattctcaggctacaccctagaccaaacctgcgccaaaatccatttcactatcatattcatcggcgtaaatctaactttcttcccacaacactttctcggcctatccggaatgccccgacgttactcggactaccccgatgcatacaccacatgaaacatcctatcatctgtaggctcattcatttctctaacagcagtaatattaataattttcatgatttgagaagccttcgcttcgaagcgaaaagtcctaatagtagaagaaccctccataaacctggagtgactatatggatgccccccaccctaccacacattcgaagaacccgtatacataaaatctagacaaaaaaggaaggaatcgaaccccccaaagctggtttcaagccaaccccatggcctccatgactttttcaaaaaggtattagaaaaaccatttcataactttgtcaaagttaaattataggctaaatcctatatatcttaatggcacatgcagcgcaagtaggtctacaagacgctacttcccctatcatagaagagcttatcacctttcatgatcacgccctcataatcattttccttatctgcttcctagtcctgtatgcccttttcctaacactcacaacaaaactaactaatactaacatctcagacgctcaggaaatagaaaccgtctgaactatcctgcccgccatcatcctagtcctcatcgccctcccatccctacgcatcctttacataacagacgaggtcaacgatccctcccttaccatcaaatcaattggccaccaatggtactgaacctacgagtacaccgactacggcggactaatcttcaactcctacatacttcccccattattcctagaaccaggcgacctgcgactccttgacgttgacaatcgagtagtactcccgattgaagcccccattcgtataataattacatcacaagacgtcttgcactcatgagctgtccccacattaggcttaaaaacagatgcaattcccggacgtctaaaccaaaccactttcaccgctacacgaccgggggtatactacggtcaatgctctgaaatctgtggagcaaaccacagtttcatgcccatcgtcctagaattaattcccctaaaaatctttgaaatagggcccgtatttaccctatagcaccccctctagagcccactgtaaagctaacttagcattaaccttttaagttaaagattaagagaaccaacacctctttacagtgaaatgccccaactaaatactaccgtatggcccaccataattacccccatactccttacactattcctcatcacccaactaaaaatattaaacacaaactaccacctacctccctcaccaaagcccataaaaataaaaaattataacaaaccctgagaaccaaaatgaacgaaaatctgttcgcttcattcattgcccccacaatcctaggcctacccgccgcagtactgatcattctatttccccctctattgatccccacctccaaatatctcatcaacaaccgactaatcaccacccaacaatgactaatcaaactaacctcaaaacaaatgataaccatacacaacactaaaggacgaacctgatctcttatactagtatccttaatcatttttattgccacaactaacctcctcggactcctgcctcactcatttacaccaaccacccaactatctataaacctagccatggccatccccttatgagcgggcgcagtgattataggctttcgctctaagattaaaaatgccctagcccacttcttaccacaaggcacacctacaccccttatccccatactagttattatcgaaaccatcagcctactcattcaaccaatagccctggccgtacgcctaaccgctaacattactgcaggccacctactcatgcacctaattggaagcgccaccctagcaatatcaaccattaaccttccctctacacttatcatcttcacaattctaattctactgactatcctagaaatcgctgtcgccttaatccaagcctacgttttcacacttctagtaagcctctacctgcacgacaacacataatgacccaccaatcacatgcctatcatatagtaaaacccagcccatgacccctaacaggggccctctcagccctcctaatgacctccggcctagccatgtgatttcacttccactccataacgctcctcatactaggcctactaaccaacacactaaccatataccaatgatggcgcgatgtaacacgagaaagcacataccaaggccaccacacaccacctgtccaaaaaggccttcgatacgggataatcctatttattacctcagaagtttttttcttcgcaggatttttctgagccttttaccactccagcctagcccctaccccccaattaggagggcactggcccccaacaggcatcaccccgctaaatcccctagaagtcccactcctaaacacatccgtattactcgcatcaggagtatcaatcacctgagctcaccatagtctaatagaaaacaaccgaaaccaaataattcaagcactgcttattacaattttactgggtctctattttaccctcctacaagcctcagagtacttcgagtctcccttcaccatttccgacggcatctacggctcaacattttttgtagccacaggcttccacggacttcacgtcattattggctcaactttcctcactatctgcttcatccgccaactaatatttcactttacatccaaacatcactttggcttcgaagccgccgcctgatactggcattttgtagatgtggtctgactatttctgtatgtctccatctattgatgagggtcttactcttttagtataaatagtaccgttaacttccaattaactagttttgacaacattcaaaaaagagtaataaacttcgccttaattttaataatcaacaccctcctagccttactactaataattattacattttgactaccacaactcaacggctacatagaaaaatccaccccttacgagtgcggcttcgaccctatatcccccgcccgcgtccctttctccataaaattcttcttagtagctattaccttcttattatttgatctagaaattgccctccttttacccctaccatgagccctacaaacaactaacctgccactaatagttatgtcatccctcttattaatcatcatcctagccctaagtctggcctatgagtgactacaaaaaggattagactgaaccgaattggtatatagtttaaacaaaacgaatgatttcgactcattaaattatgataatcatatttaccaaatgcccctcatttacataaatattatactagcatttaccatctcacttctaggaatactagtataccgctcacacctcatatcctccctactatgcctagaaggaataatactatcgctgttcattatagctactctcataaccctcaacacccactccctcttagccaatattgtgcctattgccatactagtctttgccgcctgcgaagcagcggtgggcctagccctactagtctcaatctccaacacatatggcctagactacgtacataacctaaacctactccaatgctaaaactaatcgtcccaacaattatattactaccactgacatgactttccaaaaaacacataatttgaatcaacacaaccacccacagcctaattattagcatcatccctctactattttttaaccaaatcaacaacaacctatttagctgttccccaaccttttcctccgaccccctaacaacccccctcctaatactaactacctgactcctacccctcacaatcatggcaagccaacgccacttatccagtgaaccactatcacgaaaaaaactctacctctctatactaatctccctacaaatctccttaattataacattcacagccacagaactaatcatattttatatcttcttcgaaaccacacttatccccaccttggctatcatcacccgatgaggcaaccagtcagaacgcctgaacgcaggcacatacttcctattctacaccctagtaggctcccttcccctactcatcgcactaatttacactcacaacaccctaggctcactaaacattctactactcactctcactgcccaagaactatcaaactcctgagccaacaacttaatatgactagcttacacaatagcttttatagtaaagatacctctttacggactccacttatgactccctaaagcccatgtcgaagcccccatcgctgggtcaatagtacttgccgcagtactcttaaaactaggcggctatggtataatacgcctcacactcattctcaaccccctgacaaaacacatagcctaccccttccttgtactatccctatgaggcataattataacaagctccatctgcctacgacaaacagacctaaaatcgctcattgcatactcttcaatcagccacatagccctcgtagtaacagccattctcatccaaaccccctgaagcttcaccggcgcagtcattctcataatcgcccacggacttacatcctcattactattctgcctagcaaactcaaactacgaacgcactcacagtcgcatcataatcctctctcaaggacttcaaactctactcccactaatagctttttgatgacttctagcaagcctcgctaacctcgccttaccccccactattaacctactgggagaactctctgtgctagtaaccacgttctcctgatcaaatatcactctcctacttacaggactcaacatactagtcacagccctatactccctctacatatttaccacaacacaatggggctcactcacccaccacattaacaacataaaaccctcattcacacgagaaaacaccctcatgttcatacacctatcccccattctcctcctatccctcaaccccgacatcattaccgggttttcctcttgtaaatatagtttaaccaaaacatcagattgtgaatctgacaacagaggcttacgaccccttatttaccgagaaagctcacaagaactgctaactcatgcccccatgtctaacaacatggctttctcaacttttaaaggataacagctatccattggtcttaggccccaaaaattttggtgcaactccaaataaaagtaataaccatgcacactactataaccaccctaaccctgacttccctaattccccccatccttaccaccctcgttaaccctaacaaaaaaaactcatacccccattatgtaaaatccattgtcgcatccacctttattatcagtctcttccccacaacaatattcatgtgcctagaccaagaagttattatctcgaactgacactgagccacaacccaaacaacccagctctccctaagcttcaaactagactacttctccataatattcatccctgtagcattgttcgttacatggtccatcatagaattctcactgtgatatataaactcagacccaaacattaatcagttcttcaaatatctactcatcttcctaattaccatactaatcttagttaccgctaacaacctattccaactgttcatcggctgagagggcgtaggaattatatccttcttgctcatcagttgatgatacgcccgagcagatgccaacacagcagccattcaagcaatcctatacaaccgtatcggcgatatcggtttcatcctcgccttagcatgatttatcctacactccaactcatgagacccacaacaaatagcccttctaaacgctaatccaagcctcaccccactactaggcctcctcctagcagcagcaggcaaatcagcccaattaggtctccacccctgactcccctcagccatagaaggccccaccccagtctcagccctactccactcaagcactatagttgtagcaggaatcttcttactcatccgcttccaccccctagcagaaaatagcccactaatccaaactctaacactatgcttaggcgctatcaccactctgttcgcagcagtctgcgcccttacacaaaatgacatcaaaaaaatcgtagccttctccacttcaagtcaactaggactcataatagttacaatcggcatcaaccaaccacacctagcattcctgcacatctgtacccacgccttcttcaaagccatactatttatgtgctccgggtccatcatccacaaccttaacaatgaacaagatattcgaaaaataggaggactactcaaaaccatacctctcacttcaacctccctcaccattggcagcctagcattagcaggaatacctttcctcacaggtttctactccaaagaccacatcatcgaaaccgcaaacatatcatacacaaacgcctgagccctatctattactctcatcgctacctccctaacaagcgcctatagcactcgaataattcttctcaccctaacaggtcaacctcgcttccccacccttactaacattaacgaaaataaccccaccctactaaaccccattaaacgcctggcagccggaagcctattcgcaggatttctcattactaacaacatttcccccgcatcccccttccaaacaacaatccccctctacctaaaactcacagccctcgctgtcactttcctaggacttctgacagccctagacctcaactacctaaccaacaaacttaaaataaaatccccactatgcacattttatttctccaacatactcggattctaccctagcatcacacaccgcacaatcccctatctaggccttcttacgagccaaaacctgcccctactcctcctagacctaacctgactagaaaagctattacctaaaacaatttcacagcaccaaatctccacctccatcatcacctcaacccaaaaaggcataattaaactttacttcctctctttcttcttcccactcatcctaaccctactcctaatcacataacctattcccccgagcaatctcaattacaatatatacaccaacaaacaatgttcaaccagtaactactactaatcaacgcccataatcatacaaagcccccgcaccaataggatcctcccgaatcaaccctgacccctctccttcataaattattcagcttcctacactattaaagtttaccacaaccaccaccccatcatactctttcacccacagcaccaatcctacctccatcgctaaccccactaaaacactcaccaagacctcaacccctgacccccatgcctcaggatactcctcaatagccatcgctgtagtatatccaaagacaaccatcattccccctaaataaattaaaaaaactattaaacccatataacctcccccaaaattcagaataataacacacccgaccacaccgctaacaatcaatactaaacccccataaataggagaaggcttagaagaaaaccccacaaaccccattactaaacccacactcaacagaaacaaagcatacatcattattctcgcacggactacaaccacgaccaatgatatgaaaaaccatcgttgtatttcaactacaagaacaccaatgaccccaatacgcaaaattaaccccctaataaaattaattaaccactcattcatcgacctccccaccccatccaacatctccgcatgatgaaacttcggctcactccttggcgcctgcctgatcctccaaatcaccacaggactattcctagccatgcactactcaccagacgcctcaaccgccttttcatcaatcgcccacatcactcgagacgtaaattatggctgaatcatccgctaccttcacgccaatggcgcctcaatattctttatctgcctcttcctacacatcgggcgaggcctatattacggatcatttctctactcagaaacctgaaacatcggcattatcctcctgcttgcaactatagcaacagccttcataggctatgtcctcccgtgaggccaaatatcattctgaggggccacagtaattacaaacttactatccgccatcccatacattgggacagacctagttcaatgaatctgaggaggctactcagtagacagtcccaccctcacacgattctttacctttcacttcatcttgcccttcattattgcagccctagcagcactccacctcctattcttgcacgaaacgggatcaaacaaccccctaggaatcacctcccattccgataaaatcaccttccacccttactacacaatcaaagacgccctcggcttacttctcttccttctctccttaatgacattaacactattctcaccagacctcctaggcgacccagacaattataccctagccaaccccttaaatacccctccccacatcaagcccgaatgatatttcctattcgcctacacaattctccgatccgtccctaacaaactaggaggcgtccttgccctattactatccatcctcatcctagcaataatccccatcctccatatatccaaacaacaaagcataatatttcgcccactaagccaatcactttattgactcctagccgcagacctcctcattctaacctgaatcggaggacaaccagtaagctacccttttaccatcattggacaagtagcatccgtactatacttcacaacaatcctaatcctaataccaactatctccctaattgaaaacaaaatactcaaatgggcctgtccttgtagtataaactaatacaccagtcttgtaaaccggagatgaaaacctttttccaaggacaaatcagagaaaaagtctttaactccaccattagcacccaaagctaagattctaatttaaactattctctgttctttcatggggaagcagatttgggtaccacccaagtattgactcacccatcaacaaccgctatgtatttcgtacattactgccagccaccatgaatattgtacggtaccataaatacttgaccacctgtagtacataaaaacccaatccacatcaaacccccccccccatgcttacaagcaagtacagcaatcaaccctcaactatcacacatcaactgcaactccaaagccacccctcacccactaggataccaacaaacctacccacccttaacagtacatagtacataaagccatttaccgtacatagcacattacagtcaaatcccttctcgtccccatggatgacccccctcagataggggtcccttgaccaccatcctccgtgaaatcaatatcccgcacaagagtgctactctcctcgctccgggcccataacacttgggggtagctaaagtgaactgtatccgacatctggttcctacttcagggccataaagcctaaatagcccacacgttccccttaaataagacatcacgatg

SEQ ID NO: 205 - DNA, 16571 bp, Homo sapiens mitochondrial
  3109: "n" refers to a nucleotide at position 3107 of the Cambridge Reference Sequence (CRS, Anderson et al. 1981 Nature 290:457-465), later determined to be absent from the human mtDNA sequence according to the revised CRS (rCRS, Andrews et al. 1999 Nature Genetics 23:147); "n" therefore represents a single nucleotide deletion at a position corresponding to nucleotide 3107 of SEQ ID NO:1 as provided herein.
gatcacaggtctatcaccctattaaccactcacgggagctctccatgcatttggtattttcgtctggggggtatgcacgcgatagcattgcgagacgctggagccggagcaccctatgtcgcagtatctgtctttgattcctgcctcatcctattatttatcgcacctacgttcaatattacaggcgaacatacttactaaagtgtgttaattaattaatgcttgtaggacataataataacaattgaatgtctgcacagccgctttccacacagacatcataacaaaaaatttccaccaaaccccccctcccccccgcttctggccacagcacttaaacacatctctgccaaaccccaaaaacaaagaaccctaacaccagcctaaccagatttcaaattttatcttttggcggtatgcacttttaacagtcaccccccaactaacacattattttcccctcccactcccatactactaatctcatcaatacaacccccgcccatcctacccagcacacacacaccgctgctaaccccataccccgaaccaaccaaaccccaaagacaccccccacagtttatgtagcttacctcctcaaagcaatacactgaaaatgtttagacgggctcacatcaccccataaacaaataggtttggtcctagcctttctattagctcttagtaagattacacatgcaagcatccccgttccagtgagttcaccctctaaatcaccacgatcaaaagggacaagcatcaagcacgcagcaatgcagctcaaaacgcttagcctagccacacccccacgggaaacagcagtgattaacctttagcaataaacgaaagtttaactaagctatactaaccccagggttggtcaatttcgtgccagccaccgcggtcacacgattaacccaagtcaatagaagccggcgtaaagagtgttttagatcaccccctccccaataaagctaaaactcacctgagttgtaaaaaactccagttgacacaaaatagactacgaaagtggctttaacatatctgaacacacaatagctaagacccaaactgggattagataccccactatgcttagccctaaacctcaacagttaaatcaacaaaactgctcgccagaacactacgagccacagcttaaaactcaaaggacctggcggtgcttcatatccctctagaggagcctgttctgtaatcgataaaccccgatcaacctcaccacctcttgctcagcctatataccgccatcttcagcaaaccctgatgaaggctacaaagtaagcgcaagtacccacgtaaagacgttaggtcaaggtgtagcccatgaggtggcaagaaatgggctacattttctaccccagaaaactacgatagcccttatgaaacttaagggtcgaaggtggatttagcagtaaactgagagtagagtgcttagttgaacagggccctgaagcgcgtacacaccgcccgtcaccctcctcaagtatacttcaaaggacatttaactaaaacccctacgcatttatatagaggagacaagtcgtaacatggtaagtgtactggaaagtgcacttggacgaaccagagtgtagcttaacacaaagcacccaacttacacttaggagatttcaacttaacttgaccgctctgagctaaacctagccccaaacccactccaccttactaccagacaaccttagccaaaccatttacccaaataaagtataggcgatagaaattgaaacctggcgcaatagatatagtaccgcaagggaaagatgaaaaattataaccaagcataatatagcaaggactaacccctataccttctgcataatgaattaactagaaataactttgcaaggagagccaaagctaagacccccgaaaccagacgagctacctaagaacagctaaaagagcacacccgtctatgtagcaaaatagtgggaagatttataggtagaggcgacaaacctaccgagcctggtgatagctggttgtccaagatagaatcttagttcaactttaaatttgcccacagaaccctctaaatccccttgtaaatttaactgttagtccaaagaggaacagctctttggacactaggaaaaaaccttgtagagagagtaaaaaatttaacacccatagtaggcctaaaagcagccaccaattaagaaagcgttcaagctcaacacccactacctaaaaaatcccaaacatataactgaactcctcacacccaattggaccaatctatcaccctatagaagaactaatgttagtataagtaacatgaaaacattctcctccgcataagcctgcgtcagattaaaacactgaactgacaattaacagcccaatatctacaatcaaccaacaagtcattattaccctcactgtcaacccaacacaggcatgctcataaggaaaggttaaaaaaagtaaaaggaactcggcaaatcttaccccgcctgtttaccaaaaacatcacctctagcatcaccagtattagaggcaccgcctgcccagtgacacatgtttaacggccgcggtaccctaaccgtgcaaaggtagcataatcacttgttccttaaatagggacctgtatgaatggctccacgagggttcagctgtctcttacttttaaccagtgaaattgacctgcccgtgaagaggcgggcataacacagcaagacgagaagaccctatggagctttaatttattaatgcaaacagtacctaacaaacccacaggtcctaaactaccaaacctgcattaaaaatttcggttggggcgacctcggagcagaacccaacctccgagcagtacatgctaagacttcaccagtcaaagcgaactactatactcaattgatccaataacttgaccaacggaacaagttaccctagggataacagcgcaatcctattctagagtccatatcaacaatagggtttacgacctcgatgttggatcaggacatcccgatggtgcagccgctattaaaggttcgtttgttcaacgattaaagtcctacgtgatctgagttcagaccggagtaatccaggtcggtttctatctacnttcaaattcctccctgtacgaaaggacaagagaaataaggcctacttcacaaagcgccttcccccgtaaatgatatcatctcaacttagtattatacccacacccacccaagaacagggtttgttaagatggcagagcccggtaatcgcataaaacttaaaactttacagtcagaggttcaattcctcttcttaacaacatacccatggccaacctcctactcctcattgtacccattctaatcgcaatggcattcctaatgcttaccgaacgaaaaattctaggctatatacaactacgcaaaggccccaacgttgtaggcccctacgggctactacaacccttcgctgacgccataaaactcttcaccaaagagcccctaaaacccgccacatctaccatcaccctctacatcaccgccccgaccttagctctcaccatcgctcttctactatgaacccccctccccatacccaaccccctggtcaacctcaacctaggcctcctatttattctagccacctctagcctagccgtttactcaatcctctgatcagggtgagcatcaaactcaaactacgccctgatcggcgcactgcgagcagtagcccaaacaatctcatatgaagtcaccctagccatcattctactatcaacattactaataagtggctcctttaacctctccacccttatcacaacacaagaacacctctgattactcctgccatcatgacccttggccataatatgatttatctccacactagcagagaccaaccgaacccccttcgaccttgccgaaggggagtccgaactagtctcaggcttcaacatcgaatacgccgcaggccccttcgccctattcttcatagccgaatacacaaacattattataataaacaccctcaccactacaatcttcctaggaacaacatatgacgcactctcccctgaactctacacaacatattttgtcaccaagaccctacttctaacctccctgttcttatgaattcgaacagcatacccccgattccgctacgaccaactcatacacctcctatgaaaaaacttcctaccactcaccctagcattacttatatgatatgtctccatacccattacaatctccagcattccccctcaaacctaagaaatatgtctgataaaagagttactttgatagagtaaataataggagcttaaacccccttatttctaggactatgagaatcgaacccatccctgagaatccaaaattctccgtgccacctatcacaccccatcctaaagtaaggtcagctaaataagctatcgggcccataccccgaaaatgttggttatacccttcccgtactaattaatcccctggcccaacccgtcatctactctaccatctttgcaggcacactcatcacagcgctaagctcgcactgattttttacctgagtaggcctagaaataaacatgctagcttttattccagttctaaccaaaaaaataaaccctcgttccacagaagctgccatcaagtatttcctcacgcaagcaaccgcatccataatccttctaatagctatcctcttcaacaatatactctccggacaatgaaccataaccaatactaccaatcaatactcatcattaataatcataatggctatagcaataaaactaggaatagccccctttcacttctgagtcccagaggttacccaaggcacccctctgacatccggcctgcttcttctcacatgacaaaaactagcccccatctcaatcatataccaaatctctccctcactaaacgtaagccttctcctcactctctcaatcttatccatcatagcaggcagttgaggtggattaaaccaaacccagctacgcaaaatcttagcatactcctcaattacccacataggatgaataatagcagttctaccgtacaaccctaacataaccattcttaatttaactatttatattatcctaactactaccgcattcctactactcaacttaaactccagcaccacgaccctactactatctcgcacctgaaacaagctaacatgactaacacccttaattccatccaccctcctctccctaggaggcctgcccccgctaaccggctttttgcccaaatgggccattatcgaagaattcacaaaaaacaatagcctcatcatccccaccatcatagccaccatcaccctccttaacctctacttctacctacgcctaatctactccacctcaatcacactactccccatatctaacaacgtaaaaataaaatgacagtttgaacatacaaaacccaccccattcctccccacactcatcgcccttaccacgctactcctacctatctccccttttatactaataatcttatagaaatttaggttaaatacagaccaagagccttcaaagccctcagtaagttgcaatacttaatttctgtaacagctaaggactgcaaaaccccactctgcatcaactgaacgcaaatcagccactttaattaagctaagcccttactagaccaatgggacttaaacccacaaacacttagttaacagctaagcaccctaatcaactggcttcaatctacttctcccgccgccgggaaaaaaggcgggagaagccccggcaggtttgaagctgcttcttcgaatttgcaattcaatatgaaaatcacctcggagctggtaaaaagaggcctaacccctgtctttagatttacagtccaatgcttcactcagccattttacctcacccccactgatgttcgccgaccgttgactattctctacaaaccacaaagacattggaacactatacctattattcggcgcatgagctggagtcctaggcacagctctaagcctccttattcgagccgagctgggccagccaggcaaccttctaggtaacgaccacatctacaacgttatcgtcacagcccatgcatttgtaataatcttcttcatagtaatacccatcataatcggaggctttggcaactgactagttcccctaataatcggtgcccccgatatggcgtttccccgcataaacaacataagcttctgactcttacctccctctctcctactcctgctcgcatctgctatagtggaggccggagcaggaacaggttgaacagtctaccctcccttagcagggaactactcccaccctggagcctccgtagacctaaccatcttctccttacacctagcaggtgtctcctctatcttaggggccatcaatttcatcacaacaattatcaatataaaaccccctgccataacccaataccaaacgcccctcttcgtctgatccgtcctaatcacagcagtcctacttctcctatctctcccagtcctagctgctggcatcactatactactaacagaccgcaacctcaacaccaccttcttcgaccccgccggaggaggagaccccattctataccaacacctattctgatttttcggtcaccctgaagtttatattcttatcctaccaggcttcggaataatctcccatattgtaacttactactccggaaaaaaagaaccatttggatacataggtatggtctgagctatgatatcaattggcttcctagggtttatcgtgtgagcacaccacatatttacagtaggaatagacgtagacacacgagcatatttcacctccgctaccataatcatcgctatccccaccggcgtcaaagtatttagctgactcgccacactccacggaagcaatatgaaatgatctgctgcagtgctctgagccctaggattcatctttcttttcaccgtaggtggcctgactggcattgtattagcaaactcatcactagacatcgtactacacgacacgtactacgttgtagcccacttccactatgtcctatcaataggagctgtatttgccatcataggaggcttcattcactgatttcccctattctcaggctacaccctagaccaaacctacgccaaaatccatttcactatcatattcatcggcgtaaatctaactttcttcccacaacactttctcggcctatccggaatgccccgacgttactcggactaccccgatgcatacaccacatgaaacatcctatcatctgtaggctcattcatttctctaacagcagtaatattaataattttcatgatttgagaagccttcgcttcgaagcgaaaagtcctaatagtagaagaaccctccataaacctggagtgactatatggatgccccccaccctaccacacattcgaagaacccgtatacataaaatctagacaaaaaaggaaggaatcgaaccccccaaagctggtttcaagccaaccccatggcctccatgactttttcaaaaaggtattagaaaaaccatttcataactttgtcaaagttaaattataggctaaatcctatatatcttaatggcacatgcagcgcaagtaggtctacaagacgctacttcccctatcatagaagagcttatcacctttcatgatcacgccctcataatcattttccttatctgcttcctagtcctgtatgcccttttcctaacactcacaacaaaactaactaatactaacatctcagacgctcaggaaatagaaaccgtctgaactatcctgcccgccatcatcctagtcctcatcgccctcccatccctacgcatcctttacataacagacgaggtcaacgatccctcccttaccatcaaatcaattggccaccaatggtactgaacctacgagtacaccgactacggcggactaatcttcaactcctacatacttcccccattattcctagaaccaggcgacctgcgactccttgacgttgacaatcgagtagtactcccgattgaagcccccattcgtataataattacatcacaagacgtcttgcactcatgagctgtccccacattaggcttaaaaacagatgcaattcccggacgtctaaaccaaaccactttcaccgctacacgaccgggggtatactacggtcaatgctctgaaatctgtggagcaaaccacagtttcatgcccatcgtcctagaattaattcccctaaaaatctttgaaatagggcccgtatttaccctatagcaccccctctaccccctctagagcccactgtaaagctaacttagcattaaccttttaagttaaagattaagagaaccaacacctctttacagtgaaatgccccaactaaatactaccgtatggcccaccataattacccccatactccttacactattcctcatcacccaactaaaaatattaaacacaaactaccacctacctccctcaccaaagcccataaaaataaaaaattataacaaaccctgagaaccaaaatgaacgaaaatctgttcgcttcattcattgcccccacaatcctaggcctacccgccgcagtactgatcattctatttccccctctattgatccccacctccaaatatctcatcaacaaccgactaatcaccacccaacaatgactaatcaaactaacctcaaaacaaatgataaccatacacaacactaaaggacgaacctgatctcttatactagtatccttaatcatttttattgccacaactaacctcctcggactcctgcctcactcatttacaccaaccacccaactatctataaacctagccatggccatccccttatgagcgggcgcagtgattataggctttcgctctaagattaaaaatgccctagcccacttcttaccacaaggcacacctacaccccttatccccatactagttattatcgaaaccatcagcctactcattcaaccaatagccctggccgtacgcctaaccgctaacattactgcaggccacctactcatgcacctaattggaagcgccaccctagcaatatcaaccattaaccttccctctacacttatcatcttcacaattctaattctactgactatcctagaaatcgctgtcgccttaatccaagcctacgttttcacacttctagtaagcctctacctgcacgacaacacataatgacccaccaatcacatgcctatcatatagtaaaacccagcccatgacccctaacaggggccctctcagccctcctaatgacctccggcctagccatgtgatttcacttccactccataacgctcctcatactaggcctactaaccaacacactaaccatataccaatgatggcgcgatgtaacacgagaaagcacataccaaggccaccacacaccacctgtccaaaaaggccttcgatacgggataatcctatttattacctcagaagtttttttcttcgcaggatttttctgagccttttaccactccagcctagcccctaccccccaattaggagggcactggcccccaacaggcatcaccccgctaaatcccctagaagtcccactcctaaacacatccgtattactcgcatcaggagtatcaatcacctgagctcaccatagtctaatagaaaacaaccgaaaccaaataattcaagcactgcttattacaattttactgggtctctattttaccctcctacaagcctcagagtacttcgagtctcccttcaccatttccgacggcatctacggctcaacattttttgtagccacaggcttccacggacttcacgtcattattggctcaactttcctcactatctgcttcatccgccaactaatatttcactttacatccaaacatcactttggcttcgaagccgccgcctgatactggcattttgtagatgtggtttgactatttctgtatgtctccatctattgatgagggtcttactcttttagtataaatagtaccgttaacttccaattaactagttttgacaacattcaaaaaagagtaataaacttcgccttaattttaataatcaacaccctcctagccttactactaataattattacattttgactaccacaactcaacggctacatagaaaaatccaccccttacgagtgcggcttcgaccctatatcccccgcccgcgtccctttctccataaaattcttcttagtagctattaccttcttgttatttgatctagaaattgccctccttttacccctaccatgagccctacaaacaactaacctgccactaatagttatgtcatccctcttattaatcatcatcctagccctaagtctggcctatgagtgactacaaaaaggattagactgaaccgaattggtatatagtttaaacaaaacgaatgatttcgactcattaaattatgataatcatatttaccaaatgcccctcatttacataaatattatactagcatttaccatctcacttctaggaatactagtatatcgctcacacctcatatcctccctactatgcctagaaggaataatactatcgctgttcattatagctactctcataaccctcaacacccactccctcttagccaatattgtgcctattgccatactagtctttgccgcctgcgaagcagcggtgggcctagccctactagtctcaatctccaacacatatggcctagactacgtacataacctaaacctactccaatgctaaaactaatcgtcccaacaattatattactaccactgacatgactttccaaaaaacacataatttgaatcaacacaaccacccacagcctaattattagcatcatccctctactattttttaaccaaatcaacaacaacctatttagctgttccccaaccttttcctccgaccccctaacaacccccctcctaatactaactacctgactcctacccctcacaatcatggcaagccaacgccacttatccagtgaaccactatcacgaaaaaaactctacctctctatactaatctccctacaaatctccttaattataacattcacagccacagaactaatcatattttatatcttcttcgaaaccacacttatccccaccttggctatcatcacccgatgaggcaaccagccagaacgcctgaacgcaggcacatacttcctattctacaccctagtaggctcccttcccctactcatcgcactaatttacactcacaacaccctaggctcactaaacattctactactcactctcactgcccaagaactatcaaactcctgagccaacaacttaatatgactagcttacacaatagcttttatagtaaagatacctctttacggactccacttatgactccctaaagcccatgtcgaagcccccatcgctgggtcaatagtacttgccgcagtactcttaaaactaggcggctatggtataatacgcctcacactcattctcaaccccctgacaaaacacatagcctaccccttccttgtactatccctatgaggcataattataacaagctccatctgcctacgacaaacagacctaaaatcgctcattgcatactcttcaatcagccacatagccctcgtagtaacagccattctcatccaaaccccctgaagcttcaccggcgcagtcattctcataatcgcccacgggcttacatcctcattactattctgcctagcaaactcaaactacgaacgcactcacagtcgcatcataatcctctctcaaggacttcaaactctactcccactaatagctttttgatgacttctagcaagcctcgctaacctcgccttaccccccactattaacctactgggagaactctctgtgctagtaaccacgttctcctgatcaaatatcactctcctacttacaggactcaacatactagtcacagccctatactccctctacatatttaccacaacacaatggggctcactcacccaccacattaacaacataaaaccctcattcacacgagaaaacaccctcatgttcatacacctatcccccattctcctcctatccctcaaccccgacatcattaccgggttttcctcttgtaaatatagtttaaccaaaacatcagattgtgaatctgacaacagaggcttacgaccccttatttaccgagaaagctcacaagaactgctaactcatgcccccatgtctaacaacatggctttctcaacttttaaaggataacagctatccattggtcttaggccccaaaaattttggtgcaactccaaataaaagtaataaccatgcacactactataaccaccctaaccctgacttccctaattccccccatccttaccaccctcgttaaccctaacaaaaaaaactcatacccccattatgtaaaatccattgtcgcatccacctttattatcagtctcttccccacaacaatattcatgtgcctagaccaagaagttattatctcgaactgacactgagccacaacccaaacaacccagctctccctaagcttcaaactagactacttctccataatattcatccctgtagcattgttcgttacatggtccatcatagaattctcactgtgatatataaactcagacccaaacattaatcagttcttcaaatatctactcatcttcctaattaccatactaatcttagttaccgctaacaacctattccaactgttcatcggctgagagggcgtaggaattatatccttcttgctcatcagttgatgatacgcccgagcagatgccaacacagcagccattcaagcaatcctatacaaccgtatcggcgatatcggtttcatcctcgccttagcatgatttatcctacactccaactcatgagacccacaacaaatagcccttctaaacgctaatccaagcctcaccccactactaggcctcctcctagcagcagcaggcaaatcagcccaattaggtctccacccctgactcccctcagccatagaaggccccaccccagtctcagccctactccactcaagcactatagttgtagcaggaatcttcttactcatccgcttccaccccctagcagaaaatagcccactaatccaaactctaacactatgcttaggcgctatcaccactctgttcgcagcagtctgcgcccttacacaaaatgacatcaaaaaaatcgtagccttctccacttcaagtcaactaggactcataatagttacaatcggcatcaaccaaccacacctagcattcctgcacatctgtacccacgccttcttcaaagccatactatttatgtgctccgggtccatcatccacaaccttaacaatgaacaagatattcgaaaaataggaggactactcaaaaccatacctctcacttcaacctccctcaccattggcagcctagcattagcaggaatacctttcctcacaggtttctactccaaagaccacatcatcgaaaccgcaaacatatcatacacaaacgcctgagccctatctattactctcatcgctacctccctgacaagcgcctatagcactcgaataattcttctcaccctaacaggtcaacctcgcttccccacccttactaacattaacgaaaataaccccaccctactaaaccccattaaacgcctggcagccggaagcctattcgcaggatttctcattactaacaacatttcccccgcatcccccttccaaacaacaatccccctctacctaaaactcacagccctcgctgtcactttcctaggacttctaacagccctagacctcaactacctaaccaacaaacttaaaataaaatccccactatgcacattttatttctccaacatactcggattctaccctagcatcacacaccgcacaatcccctatctaggccttcttacgagccaaaacctgcccctactcctcctagacctaacctgactagaaaagctattacctaaaacaatttcacagcaccaaatctccacctccatcatcacctcaacccaaaaaggcataattaaactttacttcctctctttcttcttcccactcatcctaaccctactcctaatcacataacctattcccccgagcaatctcaattacaatatatacaccaacaaacaatgttcaaccagtaactactactaatcaacgcccataatcatacaaagcccccgcaccaataggatcctcccgaatcaaccctgacccctctccttcataaattattcagcttcctacactattaaagtttaccacaaccaccaccccatcatactctttcacccacagcaccaatcctacctccatcgctaaccccactaaaacactcaccaagacctcaacccctgacccccatgcctcaggatactcctcaatagccatcgctgtagtatatccaaagacaaccatcattccccctaaataaattaaaaaaactattaaacccatataacctcccccaaaattcagaataataacacacccgaccacaccgctaacaatcaatactaaacccccataaataggagaaggcttagaagaaaaccccacaaaccccattactaaacccacactcaacagaaacaaagcatacatcattattctcgcacggactacaaccacgaccaatgatatgaaaaaccatcgttgtatttcaactacaagaacaccaatgaccccaatacgcaaaactaaccccctaataaaattaattaaccactcattcatcgacctccccaccccatccaacatctccgcatgatgaaacttcggctcactccttggcgcctgcctgatcctccaaatcaccacaggactattcctagccatgcactactcaccagacgcctcaaccgccttttcatcaatcgcccacatcactcgagacgtaaattatggctgaatcatccgctaccttcacgccaatggcgcctcaatattctttatctgcctcttcctacacatcgggcgaggcctatattacggatcatttctctactcagaaacctgaaacatcggcattatcctcctgcttgcaactatagcaacagccttcataggctatgtcctcccgtgaggccaaatatcattctgaggggccacagtaattacaaacttactatccgccatcccatacattgggacagacctagttcaatgaatctgaggaggctactcagtagacagtcccaccctcacacgattctttacctttcacttcatcttgcccttcattattgcagccctagcagcactccacctcctattcttgcacgaaacgggatcaaacaaccccctaggaatcacctcccattccgataaaatcaccttccacccttactacacaatcaaagacgccctcggcttacttctcttccttctctccttaatgacattaacactattctcaccagacctcctaggcgacccagacaattataccctagccaaccccttaaacacccctccccacatcaagcccgaatgatatttcctattcgcctacacaattctccgatccgtccctaacaaactaggaggcgtccttgccctattactatccatcctcatcctagcaataatccccatcctccatatatccaaacaacaaagcataatatttcgcccactaagccaatcactttattgactcctagccgcagacctcctcattctaacctgaatcggaggacaaccagtaagctacccttttaccatcattggacaagtagcatccgtactatacttcacaacaatcctaatcctaataccaactatctccctaattgaaaacaaaatactcaaatgggcctgtccttgtagtataaactaatacaccagtcttgtaaaccggagatgaaaacctttttccaaggacaaatcagagaaaaagtctttaactccaccattagcacccaaagctaagattctaatttaaactattctctgttctttcatggggaagcagatttgggtaccacccaagtattgactcacccatcaacaaccgctatgtatttcgtacattactgccagccaccatgaatattgtacggtaccataaatacttgaccacctgtagtacataaaaacccaatccacatcaaaaccccctccccatgcttacaagcaagtacagcaatcaaccctcaactatcacacatcaactgcaactccaaagccacccctcacccactaggataccaacaaacctacccacccttaacagtacatagtacataaagccatttaccgtacatagcacattacagtcaaatcccttctcgtccccatggatgacccccctcagataggggtcccttgaccaccatcctccgtgaaatcaatatcccgcacaagagtgctactctcctcgctccgggcccataacacttgggggtagctaaagtgaactgtatccgacatctggttcctacttcagggccataaagcctaaatagcccacacgttccccttaaataagacatcacgatg

SEQ ID NO: 206 - DNA, 16561 bp, Homo sapiens mitochondrial
  3108: "n" refers to a nucleotide at position 3107 of the Cambridge Reference Sequence (CRS, Anderson et al. 1981 Nature 290:457-465), later determined to be absent from the human mtDNA sequence according to the revised CRS (rCRS, Andrews et al. 1999 Nature Genetics 23:147); "n" therefore represents a single nucleotide deletion at a position corresponding to nucleotide 3107 of SEQ ID NO:1 as provided herein.
gatcacaggtctatcaccctattaaccactcacgggagctctccatgcatttggtattttcgtctggggggtgtgcacgcgatagcattgcgagacgctggagccggagcaccctatgtcgcagtatctgtctttgattcctgccccatcctattatttatcgcacctacgttcaatattacaggcgaacatacttactaaagtgtgttaattaattaatgcttgtaggacataataataacaattgaatgtctgcacagccgctttccacacagacatcataacaaaaaatttccaccaaaccccccctccccccccgcttctggccacagcacttaaacacatctctgccaaaccccaaaaacaaagaaccctaacaccagcctaaccagatttcaaattttatcttttggcggtatgcacttttaacagtcaccccccaactaacacattattttcccctcccactcccatactactaatctcatcaatacaacccccacccatcctacccagcacacacaccgctgctaaccccataccccgaaccaaccaaaccccaaagacaccccccacagtttatgtagcttacctcctcaaagcaatacactgaaaatgtttagacgggctcacatcaccccataaacaaataggtttggtcctagcctttctattagctcttagtaagattacacatgcaagcatccccgttccagtgagttcaccctctaaatcaccacgatcaaaagggacaagcatcaagcacgcagcaatgcagctcaaaacgcttagcctagccacacccccacgggaaacagcagtgattagcctttagcaataaacgaaagtttaactaagctatactaaccccagggttggtcaatttcgtgccagccaccgcggtcacacgattaacccaagtcaatagaagccggcgtaaagagtgttttagatcaccccctccccaataaagctaaaactcacctgagttgtaaaaaactccagttgacacaaaatagactacgaaagtggctttaacatatctgaacacacaatagctaagacccaaactgggattagataccccactatgcttagccctaaacctcaacagttaaatcaacaaaactgctcgccagaacactacgagccacagcttaaaactcaaaggacctggcggtgcttcatatccctctagaggagcctgttctgtaatcgataaaccccgatcaacctcaccacctcttgctcagcctatataccgccatcttcagcaaaccctgatgaaggctacaaagtaagcgcaagtacccacgtaaagacgttaggtcaaggtgtagcccatgaggtggcaagaaatgggctacattttctaccccagaaaactacgatagcccttatgaaacttaagggtcgaaggtggatttagcagtaaactgagagtagagtgcttagttgaacagggccctgaagcgcgtacacaccgcccgtcaccctcctcaagtatacttcaaaggacatttaactaaaacccctacgcatttatatagaggagacaagtcgtaacatggtaagtgtactggaaagtgcacttggacgaaccagagtgtagcttaacacaaagcacccaacttacacttaggagatttcaacttaacttgaccgctctgagctaaacctagccccaaacccactccaccttactaccagacaaccttagccaaaccatttacccaaataaagtataggcgatagaaattgaaacctggcgcaatagatatagtaccgcaagggaaagatgaaaaattataaccaagcataatatagcaaggactaacccctataccttctgcataatgaattaactagaaataactttgcaaggagagccaaagctaagacccccgaaaccagacgagctacctaagaacagctaaaagagcacacccgtctatgtagcaaaatagtgggaagatttataggtagaggcgacaaacctaccgagcctggtgatagctggttgtccaagatagaatcttagttcaactttaaatttgcccacagaaccctctaaatccccttgtaaatttaactgttagtccaaagaggaacagctctttggacactaggaaaaaaccttgtagagagagtaaaaaatttaacacccatagtaggcctaaaagcagccaccaattaagaaagcgttcaagctcaacacccactacctaaaaaatcccaaacatataactgaactcctcacacccaattggaccaatctatcaccctatagaagaactaatgttagtataagtaacatgaaaacattctcctccgcataagcctgcgtcagattaaaacactgaactgacaattaacagcccaatatctacaatcaaccaacaagtcattattaccctcactgtcaacccaacacaggcatgctcataaggaaaggttaaaaaaagtaaaaggaactcggcaaatcttaccccgcctgtttaccaaaaacatcacctctagcatcaccagtattagaggcaccgcctgcccagtgacacatgtttaacggccgcggtaccctaaccgtgcaaaggtagcataatcacttgttccttaaatagggacctgtatgaatggctccacgagggttcagctgtctcttacttttaaccagtgaaattgacctgcccgtgaagaggcgggcatgacacagcaagacgagaagaccctatggagctttaatttattaatgcaaacagtacctaacaaacccacaggtcctaaactaccaaacctgcattaaaaatttcggttggggcgacctcggagcagaacccaacctccgagcagtacatgctaagacttcaccagtcaaagcgaactactatactcaattgatccaataacttgaccaacggaacaagttaccctagggataacagcgcaatcctattctagagtccatatcaacaatagggtttacgacctcgatgttggatcaggacatcccgatggtgcagccgctattaaaggttcgtttgttcaacgattaaagtcctacgtgatctgagttcagaccggagtaatccaggtcggtttctatctacnttcaaattcctccctgtacgaaaggacaagagaaataaggcctacttcacaaagcgccttcccccgtaaatgatatcatctcaacttagtattatacccacacccacccaagaacagggtttgttaagatggcagagcccggtaatcgcataaaacttaaaactttacagtcagaggttcaattcctcttcttaacaacatacccatggccaacctcctactcctcattgtacccattctaatcgcaatggcattcctaatgcttaccgaacgaaaaattctaggctatatacaactacgcaaaggccccaacgttgtaggcccctacgggctactacaacccttcgctgacgccataaaactcttcaccaaagagcccctaaaacccgccacatctaccatcaccctctacatcaccgccccgaccttagctctcaccgtcgctcttctactatgaacccccctccccatacccaaccccctggtcaacctcaacctaggcctcctatttattctagccacctctagcctagccgtttactcaatcctctgatcagggtgagcatcaaactcaaactacgccctgatcggcgcactgcgagcagtagcccaaacaatctcatatgaagtcaccctagccatcattctactatcaacattactaataagtggctcctttaacctctccacccttatcacaacacaagaacacctctgattactcctgccatcatgacccttggccataatatgatttatctccacactagcagagaccaaccgaacccccttcgaccttgccgaaggggagtccgaactagtctcaggcttcaacatcgaatacgccgcaggccccttcgccctattcttcatagccgaatacacaaacattattataataaacaccctcaccactacaatcttcctaggaacaacatatgacgcactctcccctgaactctacacaacatattttgtcaccaagaccctacttctaacctccctgttcttatgaattcgaacagcatacccccgattccgctacgaccaactcatacacctcctatgaaaaaacttcctaccactcaccctagcattacttatatgatatgtctccatacccattacaatctccagcattccccctcaaacctaagaaatatgtctgataaaagagttactttgatagagtaaataataggagcttaaacccccttatttctaggactatgagaatcgaacccatccctgagaatccaaaattctccgtgccacctatcacaccccatcctaaagtaaggtcagctaaataagctatcgggcccataccccgaaaatgttggttatacccttcccgtactaattaatcccctggcccaacccgtcatctactctaccatctttgcaggcacactcatcacagcgctaagctcgcactgattttttacctgagtaggcctagaaataaacatgctagcttttattccagttctaaccaaaaaaataaaccctcgttccacagaagctgccatcaagtatttcctcacgcaagcaaccgcatccataatccttctaatagctatcctcttcaacaatatactctccggacaatgaaccataaccaatactaccaatcaatactcatcactaataatcataatggctatagcaataaaactaggaatagccccctttcacttctgagtcccagaagttacccaaggcacccctctgacatccggcctgcttcttctcacatgacaaaaactagcccccatctcaatcatataccaaatctctccctcactaaacgtaagccttctcctcactctctcaatcttatccatcatagcaggcagttgaggtggactaaaccaaacccagctacgcaaaatcttagcatactcctcaattacccacataggatgaataatagcagttctaccgtacaaccctaacataaccattcttaatttaactatttatattatcctaactactaccgcattcctactactcaacttaaactccagcaccacgaccctactactatctcgcacctgaaacaagctaacatgactaacacccttaattccatccaccctcctctccctaggaggcctgcccccgctaaccggctttttgcccaaatgggccattatcgaagaattcacaaaaaacaatagcctcatcatccccaccatcatagccaccatcaccctccttaacctctacttctacctacgcctaatctactccacctcaatcacactactccccatatctaacaacgtaaaaataaaatgacagtttgaacatacaaaacccaccccattcctccccacactcatcgcccttaccacgctactcctacctatctccccttttatactaataatcttatagaaatttaggttaaatacagaccaagagccttcaaagccctcagtaagttgcaatacttaatttctgtaacagctaaggactgcaaaaccccactctgcatcaactgaacgcaaatcagccactttaattaagctaagcccttactagaccaatgggacttaaacccacaaacacttagttaacagctaagcaccctaatcaactggcttcaatctacttctcccgccgccgggaaaaaaggcgggagaagccccggcaggtttgaagctgcttcttcgaatttgcaattcaatatgaaaatcacctcggagctggtaaaaagaggcctaacccctgtctttagatttacagtccaatgcttcactcagccattttacctcacccccactgatgttcgccgaccgttgactattctctacaaaccacaaagacattggaacactatacctattattcggcgcatgagctggagtcctaggcacagctctaagcctccttattcgagccgagctgggccagccaggcaaccttctaggtaacgaccacatctacaacgttatcgtcacagcccatgcatttgtaataatcttcttcatagtaatacccatcataatcggaggctttggcaactgactagttcccctaataatcggtgcccccgatatggcgtttccccgcataaacaacataagcttctgactcttacctccctctctcctactcctgctcgcatctgctatagtggaggccggagcaggaacaggttgaacagtctaccctcccttagcagggaactactcccaccctggagcctccgtagacctaaccatcttctccttacacctagcaggtgtctcctctatcttaggggccatcaatttcatcacaacaattatcaatataaaaccccctgccataacccaataccaaacgcccctcttcgtctgatccgtcctaattacagcagtcctacttctcctatctctcccagtcctagctgctggcatcactatactactaacagaccgcaacctcaacaccaccttcttcgaccccgccggaggaggagaccccattctataccaacacctattctgatttttcggtcaccctgaagtttatattcttatcctaccaggcttcggaataatctcccatattgtaacttactactccggaaaaaaagaaccatttggatacataggtatggtctgagctatgatatcaattggcttcctagggtttatcgtgtgagcacaccatatatttacagtaggaatagacgtagacacacgagcatatttcacctccgctaccataatcatcgctatccccaccggcgtcaaagtatttagctgactcgccacactccacggaagcaatatgaaatgatctgctgcagtgctctgagccctaggattcatctttcttttcaccgtaggtggcctgactggcattgtattagcaaactcatcactagacatcgtactacacgacacgtactacgttgtagctcacttccactatgtcctatcaataggagctgtatttgccatcataggaggcttcattcactgatttcccctattctcaggctacaccctagaccaaacctacgccaaaatccatttcactatcatattcatcggcgtaaatctaactttcttcccacaacactttctcggcctatccggaatgccccgacgttactcggactaccccgatgcgtacaccacatgaaacatcctatcatctgtaggctcattcatttctctaacagcagtaatattaataattttcatgatttgagaagccttcgcttcgaagcgaaaagtcctaatagtagaagaaccctccataaacctggagtgactatatggatgccccccaccctaccacacattcgaagaacccgtatacataaaatctagacaaaaaaggaaggaatcgaaccccccaaagctggtttcaagccaaccccatggcctccatgactttttcaaaaaggtattagaaaaaccatttcataactttgtcaaagttaaattataggctaaatcctatatatcttaatggcacatgcagcgcaagtaggtctacaagacgctacttcccctatcatagaagagcttatcacctttcatgatcacgccctcataatcattttccttatctgcttcctagtcctgtatgcccttttcctaacactcacaacaaaactaactaatactaacatctcagacgctcaggaaatagaaaccgtctgaactatcctgcccgccatcatcctagtcctcatcgccctcccatccctacgcatcctttacataacagacgaggtcaacgatccctcccttaccatcaaatcaattggccaccaatggtactgaacctacgagtacaccgactacggcggactaatcttcaactcctacatacttcccccattattcctagaaccaggcgacctgcgactccttgacgttgacaatcgagtagtactcccgattgaagcccccattcgtataataattacatcacaagacgtcttgcactcatgagctgtccccacattaggcttaaaaacagatgcaattcccggacgtctaaaccaaaccactttcaccgctacacgaccgggggtatactacggtcaatgctctgaaatctgtggagcaaaccacagtttcatgcccatcgtcctagaattaattcccctaaaaatctttgaaatagggcccgtatttaccctatagcaccccctctagagcccactgtaaagctaacttagcattaaccttttaagttaaagattaagagaaccaacacctctttacagtgaaatgccccaactaaatactaccgtatggcccaccataattacccccatactccttacactattcctcatcacccaactaaaaatattaaacacaaactaccacctacctccctcaccaaagcccataaaaataaaaaattataacaaaccctgagaaccaaaatgaacgaaaatctggtcgcttcattcattgcccccacaatcctaggcctacccgccgcagtactgatcattctatttccccctctattgatccccacctccaaatatctcatcaacaaccgactaatcaccacccaacaatgactaatcaaactaacctcaaaacaaatgataatcatacacaacactaaaggacgaacctgatctcttatactagtatccttaatcatttttattgccacaactaacctcctcggactcctgcctcactcatttacaccaaccacccaactatctataaacctagccatggccatccccttatgagcgggcgcagtgattataggctttcgctctaagattaaaaatgccctagcccacttcttaccacaaggcacacctacaccccttatccccatactagttattatcgaaaccatcagcctactcattcaaccaatagccctggccgtacgcctaaccgctaacattactgcaggccacctactcatgcacctaattggaagcgccaccctagcaatatcaaccattaaccttccctctacacttatcatcttcacaattctaattctactgactatcctagaaatcgctgtcgccttaatccaagcctacgttttcacacttctagtaagcctctacctgcacgacaacacataatgacccaccaatcacatgcctatcatatagtaaaacccagcccatgacccctaacaggggccctctcagccctcctaatgacctccggcctagccatgtgatttcacttccactccataacgctcctcatactaggcctactaaccaacacactaaccatataccaatgatggcgcgatgtaacacgagaaagcacataccaaggccaccacacaccacctgtccaaaaaggccttcgatacgggataatcctatttattacctcagaagtttttttcttcgcaggatttttctgagccttttaccactccagcctagcccctaccccccaattaggagggcactggcccccaacaggcatcaccccgctaaatcccctagaagtcccactcctaaacacatccgtattactcgcatcaggagtatcaatcacctgagctcaccatagtctaatagaaaacaaccgaaaccaaataattcaagcactgcttattacaattttactgggtctctattttaccctcctacaagcctcagagtacttcgagtctcccttcaccatttccgacggcatctacggctcaacattttttgtagccacaggcttccacggacttcacgtcattattggctcaactttcctcactatctgcttcatccgccaactaatatttcactttacatccaaacatcactttggcttcgaagccgccgcctgatactggcattttgtagatgtggtctgactatttctgtatgtctccatctattgatgagggtcttactcttttagtataaatagtaccgttaacttccaattaactagttttgacaacattcaaaaaagagtaataaacttcgccttaattttaataatcaacaccctcctagccttactactaataattattacattttgactaccacaactcaacggctacatagaaaaatccaccccttacgagtgcggcttcgaccctatatcccccgcccgcgtccctttctccataaaattcttcttagtagctattaccttcttattatttgatctagaaattgccctccttttacccctaccatgagccctacaaacaactaacctgccactaatagttatgtcatccctcttattaatcatcatcctagccctaagtctggcctatgagtgactacaaaaaggattagactgaaccgaattggtatatagtttaaacaaaacgaatgatttcgactcattaaattatgataatcatatttaccaaatgcccctcatttacataaatattatactagcatttaccatctcacttctaggaatactagtatatcgctcacacctcatatcctccctactatgcctagaaggaataatactatcgctgttcattatagctactctcataaccctcaacacccactccctcttagccaatattgtgcctattgccatactagtctttgccgcctgcgaagcagcggtgggcctagccctactagtctcaatctccaacacatatggcctagactacgtacataacctaaacctactccaatgctaaaactaatcgtcccaacaattatattactaccactgacatgactttccaaaaaacacataatttgaatcaacacaaccacccacagcctaattattagcatcatccctctactattttttaaccaaatcaacaacaacctatttagctgttccccaaccttttcctccgaccccctaacaacccccctcctaatactaactacctgactcctacccctcacaatcatggcaagccaacgccacttatccagtgaaccactatcacgaaaaaaactctacctctctatactaatctccctacaaatctccttaattataacattcacagccacagaactaatcatattttatatcttcttcgaaaccacacttatccccaccttggctatcatcacccgatgaggcaaccagtcagaacgcctgaacgcaggcacatacttcctattctacaccctagtaggctcccttcccctactcatcgcactaatttacactcacaacaccctaggctcactaaacattctactactcactctcactgcccaagaactatcaaactcctgagccaacaacttaatatgactagcttacacaatagcttttatagtaaagatacctctttacggactccacttatgactccctaaagcccatgtcgaagcccccatcgctgggtcaatagtacttgccgcagtactcttaaaactaggcggctatggtataatacgcctcacactcattctcaaccccctgacaaaacacatagcctaccccttccttgtactatccctatgaggcataattataacaagctccatctgcctacgacaaacagacctaaaatcgctcattgcatactcttcaatcagccacatagccctcgtagtaacagccattctcatccaaaccccctgaagcttcaccggcgcagtcattctcataatcgcccacggacttacatcctcattactattctgcctagcaaactcaaactacgaacgcactcacagtcgcatcataatcctctctcaaggacttcaaactctactcccactaatagctttttgatgacttctagcaagcctcgctaacctcgccttaccccccactattaacctactgggagaactctctgtgctagtaaccacgttctcctgatcaaatatcactctcctacttacaggactcaacatactagtcacagccctatactccctctacatatttaccacaacacaatggggctcactcacccaccacattaacaacataaaaccctcattcacacgagaaaacaccctcatgttcatacacctatcccccattctcctcctatccctcaaccccgacatcattaccgggttttcctcttgtaaatatagtttaaccaaaacatcagattgtgaatctgacaacagaggcttacgaccccttatttaccgagaaagctcacaagaactgctaactcatgcccccatgtctaacaacatggctttctcaacttttaaaggataacagctatccattggtcttaggccccaaaaattttggtgcaactccaaataaaagtaataaccatgcacactactataaccaccctaaccctgacttccctaattccccccatccttaccaccctcgttaaccctaacaaaaaaaactcatacccccattatgtaaaatccattgtcgcatccacctttattatcagtctcttccccacaacaatattcatgtgcctagaccaagaagttattatctcgaactgacactgagccacaacccaaacaacccagctctccctaagcttcaaactagactacttctccataatattcatccctgtagcattgttcgttacatggtccatcatagaattctcactgtgatatataaactcagacccaaacattaatcagttcttcaaatatctactcatcttcctaattaccatactaatcttagttaccgctaacaacctattccaactgttcatcggctgagagggcgtaggaattatatccttcttgctcatcagttgatgatacgcccgagcagatgccaacacagcagccattcaagcaatcctatacaaccgtatcggcgatatcggtttcatcctcgccttagcatgatttatcctacactccaactcatgagacccacaacaaatagcccttctaaacgctaatccaagcctcaccccactactaggcctcctcctagcagcagcaggcaaatcagcccaattaggtctccacccctgactcccctcagccatagaaggccccaccccagtctcagccctactccactcaagcactatagttgtagcaggaatcttcttactcatccgcttccaccccctagcagaaaatagcccactaatccaaactctaacactatgcttaggcgctatcaccactctgttcgcagcagtctgcgcccttacacaaaatgacatcaaaaaaatcgtagccttctccacttcaagtcaactaggactcataatagttacaatcggcatcaaccaaccacacctagcattcctgcacatctgtacccacgccttcttcaaagccatactatttatgtgctccgggtccatcatccacaaccttaacaatgaacaagatattcgaaaaataggaggactactcaaaaccatacctctcacttcaacctccctcaccattggcagcctagcattagcaggaatacctttcctcacaggtttctactccaaagaccacatcatcgaaaccgcaaacatatcatacacaaacgcctgagccctatctattactctcatcgctacctccctaacaagcgcctatagcactcgaataattcttctcaccctaacaggtcaacctcgcttccccacccttactaacattaacgaaaataaccccaccctactaaaccccattaaacgcctggcagccggaagcctattcgcaggatttctcattactaacaacatttcccccgcatcccccttccaaacaacaatccccctctacctaaaactcacagccctcgctgtcactttcctaggacttctaacagccctagacctcaactacctaaccaacaaacttaaaataaaatccccactatgcacattttatttctccaacatactcggattctaccctagcatcacacaccgcacaatcccctatctaggccttcttacgagccaaaacctgcccctactcctcctagacctaacctgactagaaaagctattacctaaaacaatttcacagcaccaaatctccacctccatcatcacctcaacccaaaaaggcataattaaactttacttcctctctttcttcttcccactcatcctaaccctactcctaatcacataacctattcccccgagcaatctcaattacaatatatacaccaacaaacaatgttcaaccagtaactactactaatcaacgcccataatcatacaaagcccccgcaccaataggatcctcccgaatcaaccctgacccctctccttcataaattattcagcttcctacactattaaagtttaccacaaccaccaccccatcatactctttcacccacagcaccaatcctacctccatcgctaaccccactaaaacactcaccaagacctcaacccctgacccccatgcctcaggatactcctcaatagccatcgctgtagtatatccaaagacaaccatcattccccctaaataaattaaaaaaactattaaacccatataacctcccccaaaattcagaataataacacacccgaccacaccgctaacaatcaatactaaacccccataaataggagaaggcttagaagaaaaccccacaaaccccattactaaacccacactcaacagaaacaaagcatacatcattattctcgcacggactacaaccacgaccaatgatatgaaaaaccatcgttgtatttcaactacaagaacaccaatgaccccaacacgcaaaattaaccccctaataaaattaattaaccactcattcatcgacctccccaccccatccaacatctccgcatgatgaaacttcggctcactccttggcgcctgcctgatcctccaaatcaccacaggactattcctagccatgcactactcaccagacgcctcaaccgccttttcatcaatcgcccacatcactcgagacgtaaattatggctgaatcatccgctaccttcacgccaatggcgcctcaatattctttatctgcctcttcctacacatcgggcgaggcctatattacggatcatttctctactcagaaacctgaaacatcggcattatcctcctgcttgcaactatagcaacagccttcataggctatgtcctcccgtgaggccaaatatcattctgaggggccacagtaattacaaacttactatccgccatcccatacattgggacagacctagttcaatgaatctgaggaggctactcagtagacagtcccaccctcacacgattctttacctttcacttcatcttgcccttcattattgcagccctagcagcactccacctcctattcttgcacgaaacgggatcaaacaaccccctaggaatcacctcccattccgataaaatcaccttccacccttactacacaatcaaagacgccctcggcttacttctcttccttctctccttaatgacattaacactattctcaccagacctcctaggcgacccagacaattataccctagccaaccccttaaatacccctccccacatcaagcccgaatgatatttcctattcgcctacacaattctccgatccgtccctaacaaactaggaggcgtccttgccctattactatccatcctcatcctagcaataatccccatcctccatatatccaaacaacaaagcataatatttcgcccactaagccaatcactttattgactcctagccgcagacctcctcattctaacctgaatcggaggacaaccagtaagctacccttttaccatcattggacaagtagcatccgtactatacttcacaacaatcctaatcctaataccaactatctccctaattgaaaacaaaatactcaaatgggcctgtccttgtagtataaactaatacaccagtcttgtaaaccggagatgaaaacctttttccaaggacaaatcagagaaaaagtctttaactccaccattagcacccaaagctaagattctaatttaaactattctctgttctttcatggggaagcagatttgggtaccacccaagtattgactcacccatcaacaaccgctatgtatttcgtacattactgccagccaccatgaatattgtacggtaccataaatacttgaccacctgtagtacataaaaacccaatccacatcaaaaccccccccccatgcttacaagcaagtacagcaatcaaccctcaactatcacacatcaactgcaactccaaagccacccctcacccactaggataccaacaaacctacccacccttaacagtacatagtacataaaaccatttaccgtacatagcacattacagtcaaatcccttctcgtccccatggatgacccccctcagataggggtcccttgaccaccatcctccgtgaaatcaatatcccgcacaagagtgctactctcctcgctccgggcccataacacttgggggtagctaaagtgaactgtatccgacatctggttcctacttcagggccataaagcctaaatagcccacacgttccccttaaataagacatcacgatg

SEQ ID NO: 207 - DNA, 16570 bp, Homo sapiens mitochondrial
  3108: "n" refers to a nucleotide at position 3107 of the Cambridge Reference Sequence (CRS, Anderson et al. 1981 Nature 290:457-465), later determined to be absent from the human mtDNA sequence according to the revised CRS (rCRS, Andrews et al. 1999 Nature Genetics 23:147); "n" therefore represents a single nucleotide deletion at a position corresponding to nucleotide 3107 of SEQ ID NO:1 as provided herein.
gatcacaggtctatcaccctattaaccactcacgggagctctccatgcatttggtattttcgtctggggggtgtgcacgcgatagcattgcgagacgctggagccggagcaccctatgtcgcagtatctgtctttgattcctgccccatcccattatttatcgcacctacgttcaatattacaggcgaacatacttactaaagtgtgttaattaattaatgcttgtaggacataataataacaattgaatgtctgcacagccgctttccacacagacatcataacaaaaaatttccaccaaaccccccctcccccgccttctggccacagcacttaaacacatctctgccaaaccccaaaaacaaagaaccctaacaccagcctaaccagatttcaaattttatcttttggcggtatgcacttttaacagtcaccccccaactaacacattattttcccctcccactcccatactactaatctcatcaatacaacccccgcccatcctacccagcacacacacaccgctgctaaccccataccccgaaccaaccaaaccccaaagacaccccccacagtttatgtagcttacctcctcaaagcaatacactgaaaatgtttagacgggctcacatcaccccataaacaaataggtttggtcctagcctttctattagctcttagtaagattacacatgcaagcatccccgttccagtgagttcaccctctaaatcaccacgatcaaaagggacaagcatcaagcacgcagcaatgcagctcaaaacgcttagcctagccacacccccacgggaaacagcagtgattaacctttagcaataaacgaaagtttaactaagctatactaaccccagggttggtcaatttcgtgccagccaccgcggtcacacgattaacccaagtcaatagaagccggcgtaaagagtgttttagatcaccccctccccaataaagctaaaactcacctgagttgtaaaaaactccagttgacacaaaatagactacgaaagtggctttaacatatctgaacacacaatagctaagacccaaactgggattagataccccactatgcttagccctaaacctcaacagttaaatcaacaaaactgctcgccagaacactacgagccacagcttaaaactcaaaggacctggcggtgcttcatacccctctagaggagcctgttctgtaatcgataaaccccgatcaacctcaccacctcttgctcagcctatataccgccatcttcagcaaaccctgatgaaggctacaaagtaagcgcaagtacccacgtaaagacgttaggtcaaggtgtagcccatgaggtggcaagaaatgggctacattttctaccccagaaaactacgatagcccttatgaaacttaagggtcgaaggtggatttagcagtaaactgagagtagagtgcttagttgaacagggccctgaagcgcgtacacaccgcccgtcaccctcctcaagtatacttcaaaggacatttaactaaaacccctacgcatttatatagaggagacaagtcgtaacatggtaagtgtactggaaagtgcacttggacgaaccagagtgtagcttaacacaaagcacccaacttacacttaggagatttcaacttaacttgaccgctctgagctaaacctagccccaaacccactccaccttactaccagacaaccttagccaaaccatttacccaaataaagtataggcgatagaaattgaaacctggcgcaatagatatagtaccgcaagggaaagatgaaaaattatagccaagcataatatagcaaggactaacccctataccttctgcataatgaattaactagaaataactttgcaaggagagccaaagctaagacccccgaaaccagacgagctacctaagaacagctaaaagagcacacccgtctatgtagcaaaatagtgggaagatttataggtagaggcgacaaacctaccgagcctggtgatagctggttgtccaagatagaatcttagttcaactttaaatttgcccacagaaccctctaaatccccttgtaaatttaactgttagtccaaagaggaacagctctttggacactaggaaaaaaccttgtagagagagtaaaaaatttaacacccatagtaggcctaaaagcagccaccaattaagaaagcgttcaagctcaacacccactacctaaaaaatcccaaacatataactgaactcctcacacccaattggaccaatctatcaccctatagaagaactaatgttagtataagtaacatgaaaacattctcctccgcataagcctgcgtcagattaaaacactgaactgacaattaacagcccaatatctacaatcaaccaacaagtcattattaccctcactgtcaacccaacacaggcatgctcataaggaaaggttaaaaaaagtaaaaggaactcggcaaatcttaccccgcctgtttaccaaaaacatcacctctagcatcaccagtattagaggcaccgcctgcccagtgacacatgtttaacggccgcggtaccctaaccgtgcaaaggtagcataatcacttgttccttaaatagggacctgtatgaatggctccacgagggttcagctgtctcttacttttaaccagtgaaattgacctgcccgtgaagaggcgggcatgacacagcaagacgagaagaccctatggagctttaatttattaatgcaaacagtacctaacaaacccacaggtcctaaactaccaaacctgcattaaaaatttcggttggggcgacctcggagcagaacccaacctccgagcagtacatgctaagacttcaccagtcaaagcgaactactatactcaattgatccaataacttgaccaacggaacaagttaccctagggataacagcgcaatcctattctagagtccatatcaacaatagggtttacgacctcgatgttggatcaggacatcccgatggtgcagccgctattaaaggttcgtttgttcaacgattaaagtcctacgtgatctgagttcagaccggagtaatccaggtcggtttctatctacnttcaaattcctccctgtacgaaaggacaagagaaataaggcctacttcacaaagcgccttcccccgtaaatgatatcatctcaacttagtattatacccacacccacccaagaacagggtttgttaagatggcagagcccggtaatcgcataaaacttaaaactttacagtcagaggttcaattcctcttcttaacaacatacccatggccaacctcctactcctcattgtacccattctaatcgcaatggcattcctaatgcttaccgaacgaaaaattctaggctatatacaactacgcaaaggccccaacgttgtaggcccctacgggctactacaacccttcgctgacgccataaaactcttcaccaaggagcccctaaaacccgccacatctaccatcaccctctacatcaccgccccgaccttagctctcaccatcgctcttctactatgaacccccctccccatacccaaccccctggtcaacctcaacctaggcctcctatttattctagccacctctagcctagccgtttactcaatcctctgatcagggtgagcatcaaactcaaactacgccctgatcggcgcactgcgagcagtagcccaaacaatctcatatgaagtcaccctagccatcattctactatcaacattactaataagtggctcctttaacctctccacccttatcacaacacaagaacacctctgattactcctgccatcatgacccttggccataatatgatttatctccacactagcagagaccaaccgaacccccttcgaccttgccgaaggggagtccgaactagtctcaggcttcaacatcgaatacgccgcaggccccttcgccctattcttcatagccgaatacacaaacattattataataaacaccctcaccactacaatcttcctaggaacaacatatgacgcactctcccctgaactctacacaacatattttgtcaccaagaccctacttctaacctccctgttcttatgaattcgaacagcatacccccgattccgctacgaccaactcatacacctcctatgaaaaaacttcctaccactcaccctagcattacttatatgatatgtctccatacccattacaatctccagcattccccctcaaacctaagaaatatgtctgataaaagagttactttgatagagtaaataataggagcttaaacccccttatttctaggactatgagaatcgaacccatccctgagaatccaaaattctccgtgccacctatcacaccccatcctaaagtaaggtcagctaaataagctatcgggcccataccccgaaaatgttggttatacccttcccgtactaattaatcccctggcccaacccgtcatctactctaccatctttgcaggcacactcatcacagcgctaagctcgcactgattttttacctgagtaggcctagaaataaacatgctagcttttattccagttctaaccaaaaaaataaaccctcgttccacagaagctgccatcaagtatttcctcacgcaagcaaccgcatccataatccttctaatagctatcctcttcaacaatatactctccggacaatgaaccataaccaatactaccaatcaatactcatcattaataatcataatggctatagcaataaaactaggaatagccccctttcacttctgagtcccagaggttacccaaggcacccctctgacatccggcctgcttcttctcacatgacaaaaactagcccccatctcaatcatataccaaatctctccctcactaaacgtaagccttctcctcactctctcaatcttatccatcatagcaggcagttgaggtggattaaaccaaacccagctacgcaaaatcttagcatactcctcaattacccacataggatgaataatagcagttctaccgtacaaccctaacataaccattcttaatttaactatttatattatcctaactactaccgcattcctactactcaacttaaactccagcaccacgaccctactactatctcgcacctgaaacaagctaacatgactaacacccttaattccatccaccctcctctccctaggaggcctgcccccgctaaccggctttttgcccaaatgggccattatcgaagaattcacaaaaaacaatagcctcatcatccccaccatcatagccaccatcaccctccttaacctctacttctacctacgcctaatctactccacctcaatcacactactccccatatctaacaacgtaaaaataaaatgacagtttgaacatacaaaacccaccccattcctccccacactcatcgcccttaccacgctactcctacctatctccccttttatactaataatcttatagaaatttaggttaaatacagaccaagagccttcaaagccctcagtaagttgcaatacttaatttctgtaacagctaaggactgcaaaaccccactctgcatcaactgaacgcaaatcagccactttaattaagctaagcccttactagaccaatgggacttaaacccacaaacacttagttaacagctaagcaccctaatcaactggcttcaatctacttctcccgccgccgggaaaaaaggcgggagaagccccggcaggtttgaagctgcttcttcgaatttgcaattcaatatgaaaatcacctcggagctggtaaaaagaggcctaacccctgtctttagatttacagtccaatgcttcactcagccattttacctcacccccactgatgttcgccgaccgttgactattctctacaaaccacaaagacattggaacactatacctattattcggcgcatgagctggagtcctaggcacagctctaagcctccttattcgagccgagctgggccagccaggcaaccttctaggtaacgaccacatctacaacgttatcgtcacagcccatgcatttgtaataatcttcttcatagtaatacccatcataatcggaggctttggcaactgactagttcccctaataatcggtgcccccgatatggcgtttccccgcataaacaacataagcttctgactcttacctccctctctcctactcctgctcgcatctgctatagtggaggccggagcaggaacaggttgaacagtctaccctcccttagcagggaactactcccaccctggagcctccgtagacctaaccatcttctccttacacctagcaggtgtctcctctatcttaggggccatcaatttcatcacaacaattatcaatataaaaccccctgccataacccaataccaaacgcccctcttcgtctgatccgtcctaatcacagcagtcctacttctcctatctctcccagtcctagctgctggcatcactatactactaacagaccgcaacctcaacaccaccttcttcgaccccgccggaggaggagaccccattctataccaacacctattctgatttttcggtcaccctgaagtttatattcttatcctaccaggcttcggaataatctcccatattgtaacttactactccggaaaaaaagaaccatttggatacataggtatggtctgagctatgatatcaattggcttcctagggtttatcgtgtgagcacaccatatatttacagtaggaatagacgtagacacacgagcatatttcacctccgctaccataatcatcgctatccccaccggcgtcaaagtatttagctgactcgccacactccacggaagcaatatgaaatgatctgctgcagtgctctgagccctaggattcatctttcttttcaccgtaggtggcctgactggcattgtattagcaaactcatcactagacatcgtactacacgacacgtactacgttgtagctcacttccactatgtcctatcaataggagctgtatttgccatcataggaggcttcattcactgatttcccctattctcaggctacaccctagaccaaacctacgccaaaatccatttcactatcatattcatcggcgtaaatctaactttcttcccacaacactttctcggcctatccggaatgccccgacgttactcggactaccccgatgcatacaccacatgaaacatcctatcatctgtaggctcattcatttctctaacagcagtaatattaataattttcatgatttgagaagccttcgcttcgaagcgaaaagtcctaatagtagaagaaccctccataaacctggagtgactatatggatgccccccaccctaccacacattcgaagaacccgtatacataaaatctagacaaaaaaggaaggaatcgaaccccccaaagctggtttcaagccaaccccatggcctccatgactttttcaaaaaggtattagaaaaaccatttcataactttgtcaaagttaaattataggctaaatcctatatatcttaatggcacatgcagcgcaagtaggtctacaagacgctacttcccctatcatagaagagcttatcacctttcatgatcacgccctcataatcattttccttatctgcttcctagtcctgtatgcccttttcctaacactcacaacaaaactaactaatactaacatctcagacgctcaggaaatagaaaccgtctgaactatcctgcccgccatcatcctagtcctcatcgccctcccatccctacgcatcctttacataacagacgaggtcaacgatccctcccttaccatcaaatcaattggccaccaatggtactgaacctacgagtacaccgactacggcggactaatcttcaactcctacatacttcccccattattcctagaaccaggcgacctgcgactccttgacgttgacaatcgagtagtactcccgattgaagcccccattcgtataataattacatcacaagacgtcttgcactcatgagctgtccccacattaggcttaaaaacagatgcaattcccggacgtctaaaccaaaccactttcaccgctacacgaccgggggtatactacggtcaatgctctgaaatctgtggagcaaaccacagtttcatgcccatcgtcctagaattaattcccctaaaaatctttgaaatagggcccgtatttaccctatagcaccccctctaccccctctagagcccactgtaaagctaacttagcattaaccttttaagttaaagattaagagaaccaacacctctttacagtgaaatgccccaactaaatactaccgtatggcccaccataattacccccatactccttacactattcctcatcacccaactaaaaatattaaacacaaactaccacctacctccctcaccaaagcccataaaaataaaaaattataacaaaccctgagaaccaaaatgaacgaaaatctgttcgcttcattcattgcccccacaatcctaggcctacccgccgcagtactgatcattctatttccccctctattgatccccacctccaaatatctcatcaacaaccgactaatcaccacccaacaatgactaatcaaactaacctcaaaacaaatgataaccatacacaacactaaaggacgaacctgatctcttatactagtatccttaatcatttttattgccacaactaacctcctcggactcctgcctcactcatttacaccaaccacccaactatctataaacctagccatggccatccccttatgagcgggcgcagtgattataggctttcgctctaagattaaaaatgccctagcccacttcttaccacaaggcacacctacaccccttatccccatactagttattatcgaaaccatcagcctactcattcaaccaatagccctggccgtacgcctgaccgctaacattactgcaggccacctactcatgcacctaattggaagcaccaccctagcaatatcaaccattaaccttccctctacacttatcatcttcacaattctaattctactgactatcctagaaatcgctgtcgccttaatccaagcctacgttttcacacttctagtaagcctctacctgcacgacaacacataatgacccaccaatcacatgcctatcatatagtaaaacccagcccatgacccctaacaggggccctctcagccctcctaatgacctccggcctagccatgtgatttcacttccactccataacgctcctcatactaggcctactaaccaacacactaaccatataccaatgatggcgcgatgtaacacgagaaagcacataccaaggccaccacacaccacctgtccaaaaaggccttcgatacgggataatcctatttattacctcagaagtttttttcttcgcaggatttttctgagccttttaccactccagcctagcccctaccccccaattaggagggcactggcccccaacaggcatcaccccgctaaatcccctagaagtcccactcctaaacacatccgtattactcgcatcaggagtatcaatcacctgagctcaccatagtctaatagaaaacaaccgaaaccaaataattcaagcactgctcattacaattttactgggtctctattttaccctcctacaagcctcagagtacttcgagtctcccttcaccatttccgacggcatctacggctcaacattttttgtagccacaggcttccacggacttcacgtcattattggctcaactttcctcactatctgcttcatccgccaactaatatttcactttacatccaaacatcactttggcttcgaagccgccgcctgatactggcattttgtagatgtggtttgactatttctgtatgtctccatctattgatgagggtcttactcttttagtataaatagtaccgttaacttccaattaactagttttgacaacattcaaaaaagagtaataaacttcgccttaattttaataatcaacaccctcctagccttactactaataattattacattttgactaccacaactcaacggctacatagaaaaatccaccccttacgagtgcggcttcgaccctatatcccccgcccgcgtccctttctccataaaattcttcttagtagctattaccttcttattatttgatctagaaattgccctccttttacccctaccatgagccctacaaacaactaacctgccactaatagttatgtcatccctcttattaatcatcatcctagccctaagtctggcctatgagtgactacaaaaaggattagactgagccgaattggtatatagtttaaacaaaacgaatgatttcgactcattaaattatgataatcatatttaccaaatgcccctcatttacataaatattatactagcatttaccatctcacttctaggaatactagtatatcgctcacacctcatgtcctccctactatgcctagaaggaataatactatcgctgttcattatagctactctcataaccctcaacacccactccctcttagccaatattgtgcctattgccatactagtctttgccgcctgcgaagcagcggtgggcctagccctactagtctcaatctccaacacatatggcctagactacgtacataacctaaacctactccaatgctaaaactaatcgtcccaacaattatattactaccactgacatgactttccaaaaaacacataatttgaatcaacacaaccacccacagcctaattattagcatcatccctctactattttttaaccaaatcaacaacaacctatttagctgttccccaaccttttcctccgaccccctaacaacccccctcctaatactaactacctgactcctacccctcacaatcatggcaagccaacgccacttatccagtgaaccactatcacgaaaaaaactctacctctctatactaatctccctacaaatctccttaattataacattcacagccacagaactaatcatattttatatcttcttcgaaaccacacttatccccaccttggctatcatcacccgatgaggcaaccagccagaacgcctgaacgcaggcacatacttcctattctacaccctagtaggctcccttcccctactcatcgcactaatttacactcacaacaccctaggctcactaaacattctactactcaccctcactgcccaagaactatcaaactcctgagccaacaacttaatatgactagcttacacaatagcttttatagtaaagatacctctttacggactccacttatgactccctaaagcccatgtcgaagcccccatcgctgggtcaatagtacttgccgcagtactcttgaaactaggcggctatggtataatacgcctcacactcattctcaaccccctgacaaaacacatagcctaccccttccttgtactatccctatgaggcataattataacaagctccatctgcctacgacaaacagacctaaaatcgctcattgcatactcttcaatcagccacatagccctcgtagtaacagccattctcatccaaaccccctgaagcttcaccggcgcagtcattctcataatcgcccacggacttacatcctcattactattctgcctagcaaactcaaactacgaacgcactcacagtcgcatcataatcctctctcaaggacttcaaactctactcccactaatagctttttgatgacttctagcaagcctcgctaacctcgccttaccccccactattaacctactgggagaactctctgtgctagtaaccacgttctcctgatcaaatatcactctcctacttacaggactcaacatactagtcacagccctatactccctctacatatttaccacaacacaatggggctcactcacccaccacattaacaacataaaaccctcattcacacgagaaaacaccctcatgttcatacacctatcccccattctcctcctatccctcaaccccgacatcattaccgggttttcctcttgtaaatatagtttaaccaaaacatcagattgtgaatctgacaacagaggcttacgaccccttatttaccgagaaagctcacaagaactgctaactcatgcccccatgtctaacaacatggctttctcaacttttaaaggataacagctatccattggtcttaggccccaagaattttggtgcaactccaaataaaagtaataaccatgcacactactataaccaccctaaccctaacttccctaattccccccatccttaccaccctcgttaaccctaacaaaaaaaactcatacccccattatgtaaaatccattgtcgcatccacctttattatcagtctcttccccacaacaatattcatgtgcctagaccaagaagttattatctcgaactgacactgagccacaacccaaacaacccagctctccctaagcttcaaactagactacttctccataatattcatccctgtagcattgttcgttacatggtccatcatagaattctcactgtgatatataaactcagacccaaacattaatcagttcttcaaatatctactcatcttcctaattaccatactaatcttagttaccgctaacaacctattccaactgttcatcggctgagagggcgtaggaattatatccttcttgctcatcagttgatgatacgcccgagcagatgccaacacagcagccattcaagcaatcctatacaaccgtatcggcgatatcggtttcatcctcgccttagcatgatttatcctacactccaactcatgagacccacaacaaatagcccttctaaacgctaatccaagcctcaccccactactaggcctcctcctagcagcagcaggcaaatcagcccaattaggtctccacccctgactcccctcagccatagaaggccccaccccagtctcagccctactccactcaagcactatagttgtagcaggaatcttcttactcatccgcttccaccccctagcagaaaatagcccactaatccaaactctaacactatgcttaggcgctatcaccactctgttcgcagcagtctgcgcccttacacaaaatgacatcaaaaaaatcgtagccttctccacttcaagtcaactaggactcataatagttacaatcggcatcaaccaaccacacctagcattcctgcacatctgtacccacgccttcttcaaagccatactatttatgtgctccgggtccatcatccacaaccttaacaatgaacaagatattcgaaaaataggaggactactcaaaaccatacctctcacttcaacctccctcaccattggcagcctagcattagcaggaatacctttcctcacaggtttctactccaaagaccacatcatcgaaaccgcaaacatatcatacacaaacgcctgagccctatctattactctcatcgctacctccctgacaagcgcctatagcactcgaataattcttctcaccctaacaggtcaacctcgcttccccacccttactaacattaacgaaaataaccccaccctactaaaccccattaaacgcctggcagccggaagcctattcgcaggatttctcattactaacaacatttcccccgcatcccccttccaaacaacaatccccctctacctaaaactcacagccctcgctgtcactttcctaggacttctaacagccctagacctcaactacctaaccaacaaacttaaaataaaatccccactatgcacattttatttctccaacatactcggattctaccctagcatcacacaccgcacaatcccctatctaggccttcttacgagccaaaacctgcccctactcctcctagacctagcctgactagaaaagctattacctaaaacaatttcacaacaccaaatctccacctccatcatcacctcaacccaaaaaggcataattaaactttacttcctctctttcttcttcccactcatcctaaccctactcctaatcacataacctattcccccgagcaatttcaattacaatatatacaccaacaaacaatgttcaaccagtaactactactaatcaacgcccataatcatacaaagcccccgcaccaataggatcctcccgaatcaaccctgacccctctccttcataaattattcagcttcctacactattaaagtttaccacaaccaccaccccatcatactctttcacccacagcaccaatcctacctccatcgctaaccccactaaaacactcaccaagacctcaacccctgacccccatgcctcaggatactcctcaatagccatcgctgtagtatatccaaagacaaccatcattccccctaaataaattaaaaaaactattaaacccatataacctcccccaaaattcagaataataacacacccgaccacaccgctaacaatcaatactaaacccccataaataggagaaggcttagaagaaaaccccacaaaccccattactaaacccacactcaacagaaacaaagcatacatcattattctcgcacggactacaaccacgaccaatgatatgaaaaaccatcgttgtatttcaactacaagaacaccaatgaccccaatacgcaaaattaaccccctaataaaattaattaaccactcactcatcgacctccccaccccatccaacatctccgcatgatgaaacttcggctcactccttggcgcctgcctgatcctccaaatcaccacaggactattcctagccatgcactactcaccagacgcctcaaccgccttttcatcaatcgcccacatcactcgagacgtaaattatggctgaatcatccgctaccttcacgccaatggcgcctcaatattctttatctgcctcttcctacacatcgggcgaggcctatattacggatcatttctctactcagaaacctgaaacatcggcattatcctcctgcttgcaactatagcaacagccttcataggctatgtcctcccgtgaggccaaatatcattctgaggggccacagtaattacaaacttactatccgccatcccatacattgggacagacctagttcaatgaatctgaggaggctactcagtagacagtcccaccctcacacgattctttacctttcacttcatcttgcccttcattattgcagccctagcagcactccacctcctattcttgcacgaaacgggatcaaacaaccccctaggaatcacctcccattccgataaaatcaccttccacccttactacacaatcaaagacgccctcggcttacttctcttccttctctccttaatgacattaacactattctcaccagacctcctaggcgacccagacaattataccctagccaaccccttaaacacccctccccacatcaagcccgaatgatatttcctattcgcctacacaattctccgatccgtccctaacaaactaggaggcgtccttgccctattactatccatcctcatcctagcaataatccccatcctccatatatccaaacaacaaagcataatatttcgcccactaagccaatcactttattgactcctagccgcagacctcctcattctaacctgaatcggaggacaaccagtaagctacccttttaccatcattggacaagtagcatccgtactatacttcacaacaatcctaatcctaataccaactatctccctaattgaaaacaaaatactcaaatgggcctgtccttgtagtataaactaatacaccagtcttgtaaaccggagatgaaaacctttttccaaggacaaatcagagaaaaagtctttaactccaccattagcacccaaagctaagattctaatttaaactattctctgttctttcatggggaagcagatttgggtaccacccaagtattgactcacccatcaacaaccgctatgtatttcgtacattactgccagccaccatgaatattgtacggtaccataaatacttgaccacctgtagtacataaaaacccaatccacatcaaaaccccctccccatgcttacaagcaagtacagcaatcaacccccaactatcacacatcaactgcaactccaaagccacccctcacccactaggataccaacaaacctacccacccttaacagtacatagcacataaagtcatttaccgtacatagcacattacagtcaaatcccttctcgtccccatggatgacccccctcagataggggtcccttgaccaccatcctccgtgaaatcaatatcccgcacaagagtgctactctcctcgctccgggcccataacacttgggggtagctaaagtgaactgtatccgacatctggttcctacttcagggccataaagcctaaatagcccacacgttccccttaaataagacatcacgatg

SEQ ID NO: 208 - DNA, 16566 bp, Homo sapiens mitochondrial
  3104: "n" refers to a nucleotide at position 3107 of the Cambridge Reference Sequence (CRS, Anderson et al. 1981 Nature 290:457-465), later determined to be absent from the human mtDNA sequence according to the revised CRS (rCRS, Andrews et al. 1999 Nature Genetics 23:147); "n" therefore represents a single nucleotide deletion at a position corresponding to nucleotide 3107 of SEQ ID NO:1 as provided herein.
gatcacaggtctatcaccctattaaccactcacgggagctctccatgcatttggtattttcgtctggggggtgtgcacgcgatagcattgcgggccgctggagccggagcaccctatgtcgcagtatctgtctttgattcctgcctcatcccattatttatcgcacctacgttcaatattataggagaccatacctactaaagtgtgttaattaattaatgcttgtaggacataacaataacaattaaatgtctgcacagccgctttccacacagacatcataacaaaaaatttccgccaaaccccccctccccccattctggccacagcacttaaacacatctctgccaaaccccaaaaacaaagaaccctaacaccagcctaaccagatttcaaattttatcttttggcggtatgcacttttaacagtcaccccccaactaacacattattttcccctcccactcccatactactaatctcatcaatacaacccccgcccatcctacccagcacacacaccgctgctaaccccataccccgaaccaaccaaaccccaaagacaccccccacagtttatgtagcttacctcctcaaagcaatacactgaaaatgtttagacgggctcacatcaccccataaacaaataggtttggtcctagcctttctattagctcttagtaagattacacatgcaagcatccccgttccagtgagttcaccctctaaatcaccacgatcaaaagggacaagcatcaagcacgcaacaatgcagctcaaaacgcttagcctagccacacccccacgggaaacagcagtgataaacctttagcaataaacgaaagtttaactaagctatactaaccccagggttggtcaatttcgtgccagccaccgcggtcacacgattaacccaagtcaatagaagccggcgtaaagagtgttttagatcaccccctccccaataaagctaaaactcacctgagttgtaaaaaactccagttgacacaaaataaactacgaaagtggctttaacatatctgaacacacaatagctaagacccaaactgggattagataccccactatgcttagccctaaacctcaacagttaaatcaacaaaactgctcgccagaacactacgagccacagcttaaaactcaaaggacctggcggtgcttcatatccctctagaggagcctgttctgtaatcgataaaccccgatcaacctcaccacctcttgctcagcctatataccgccatcttcagcaaaccctgatgaaggctacaaagtaagcgcaagtacccacgtaaagacgttaggtcaaggtgtagcccatgaggtggcaagaaatgggctacattttctaccccagaaaactacgatagcccttatgaaacttaagggtcgaaggtggatttagcagtaaactgagagtagagtgcttagttgaacagggccctgaagcgcgtacacaccgcccgtcaccctcctcaagtatacttcaaaggacatttaactaaaacccctacgcatttatatagaggagacaagtcgtaacatggtaagtgtactggaaagtgcacttggacgaaccagagtgtagcttaacacaaagcacccaacttacacttaggagatttcaacttaacttgaccgctctgagctaaacctagccccaaacccactccaccttactaccagacaaccttagccaaaccatttacccaaataaagtataggcgatagaaattgaaacctggcgcaatagatatagtaccgcaagggaaagatgaaaaattataaccaagcataatatagcaaggactaacccctataccttctgcataatgaattaactagaaataactttgcaaggagagccaaagctaagacccccgaaaccagacgagctacctaagaacagctaaaagagcacacccgtctatgtagcaaaatagtgggaagatttataggtagaggcgacaaacctaccgagcctggtgatagctggttgtccaagatagaatcttagttcaactttaaatttgcccacagaaccctctaaatccccttgtaaatttaactgttagtccaaagaggaacagctctttggacactaggaaaaaaccttgtagagagagtaaaaaatttaacacccatagtaggcctaaaagcagccaccaattaagaaagcgttcaagctcaacacccactacctaaaaaatcccaaacatataactgaactcctcacacccaattggaccaatctatcaccctatagaagaactaatgttagtataagtaacatgaaaacattctcctccgcataagcctgcgtcagattaaaacactgaactgacaattaacagcccaatatctacaatcaccaacaagtcattattaccctcactgtcaacccaacacaggcatgctcataaggaaaggttaaaaaaagtaaaaggaactcggcaaatcttaccccgcctgtttaccaaaaacatcacctctagcatcaccagtattagaggcaccgcctgcccagtgacacatgtttaacggccgcggtaccctaaccgtgcaaaggtagcataatcacttgttccttaaatagggacctgtatgaatggctccacgagggttcagctgtctcttacttttaaccagtgaaattgacctgcccgtgaagaggcgggcatgacacagcaagacgagaagaccctatggagctttaatttattaatgcaagcaatacctaacaaacccacaggtcctaaactaccaaacctgcattaaaaatttcggttggggcgacctcggagcagaacccaacctccgagcagtacatgctaagacctcaccagtcaaagcgaactaccatactcaattgatccaataacttgaccaacggaacaagttaccctagggataacagcgcaatcctattctagagtccatatcaacaatagggtttacgacctcgatgttggatcaggacatcccgatggtgcagccgctattaaaggttcgtttgttcaacgattaaagtcctacgtgatctgagttcagaccggagtaatccaggtcggtttctatctacnttcaaattcctccctgtacgaaaggacaagagaaataaggcctacttcacaaagcgccttcccccgtaaatgatatcatctcaacttagtattatacccacacccacccaagaacagggtttgttaagatggcagagcccggtaatcgcataaaacttaaaactttacagtcagaggttcaattcctcttcttaacaacatacccatggccaacctcctactcctcattgtacccattctaatcgcaatggcattcctaatgcttaccgaacgaaaaattctaggctatatacaactacgcaaaggccccaacgttgtaggcccctacgggctactacaacccttcgctgacgccataaaactcttcaccaaagagcccctaaaacccgccacatctaccatcactctctacatcaccgccccgaccttagctctcaccatcgctcttctactatgaacccccctccccatacccaaccccctggttaacctcaacctaggcctcctatttattctagccacctctagcctagccgtttactcaatcctctgatcaggatgagcatcaaactcaaactacgccctgatcggcgcactgcgagcagtagcccaaacaatctcatatgaagtcaccctagccatcattctactatcaacattactaataagtggctcctttaacctctcctcccttatcacaacacaagaacacctctgattactcctgccatcatggcccttggccataatatgatttatctccacactagcagagaccaaccgaacccccttcgaccttgccgaaggggagtccgaactggtctcaggcttcaacatcgaatacgccgcaggccccttcgccctattcttcatagccgaatacacaaacattattataataaacaccctcaccactacaatcttcctaggaacaacatatgacgcactctcccctgaactctacacaacatattttgtcaccaagaccctacttctgacctccctgttcttatgaattcgaacagcatacccccgattccgctacgaccaactcatacacctcctatgaaaaaacttcctaccactcaccctagcattacttatatgatatgtctccatacccattacaatctccagcattccccctcaaacctaagaaatatgtctgataaaagagttactttgatagagtaaataataggagcttaaacccccttatttctaggactatgagaatcgaacccatccctgagaatccaaaattctccgtgccacctatcacaccccatcctaaagtaaggtcagctaaataagctatcgggcccataccccgaaaatgttggttatacccttcccgtactaattaatcccctggcccaacccgtcatctactctaccgtctttgcaggcacactcatcacagcgctaagctcgcactgattttttacctgagtaggcctagaaataaacatgctagcttttattccagttctaaccaaaaaaataaaccctcgttccacagaagccgccatcaagtatttcctcacgcaagcaaccgcatccataatccttctaatagctatcctcttcaacaatatactctccggacaatgaaccataaccaatactaccaatcaatactcatcattaataatcataatggctatagcaataaaactaggaatagccccctttcacttctgagtcccagaggttacccaaggcacccctctgacatccggcctgcttcttctcacatgacaaaaactagcccccatctcaatcatataccaaatctctccctcactaaacgtaagccttctcctcactctctcaatcttatccatcatagcaggcagttgaggtggattaaaccaaacccagctacgcaaaatcttagcatactcctcaattacccacataggatgaataatagcagttctaccgtacaaccctaacataaccattcttaatttaactatttatattatcctaactactaccgcattcctactactcaacttaaactccagcaccacgaccctactactatctcgcacctgaaacaagctaacatgactaacacccttaattccatccaccctcctctccctaggaggcctgcccccgctaaccggctttttgcccaaatgggccattatcgaagaattcacaaaaaacaatagcctcatcatccccaccatcatagccaccatcaccctccttaacctctacttctacctacgcctaatctactccacctcaatcacactactccccatatctaacaacgtaaaaataaaatgacagtttgaacatacaaaacccaccccattcctccccacactcatcgcccttaccacgctactcctacctatctccccttttatactaataatcttatagaaatttaggttaaatacagaccaagagccttcaaagccctcagtaagttgcaatacttaatttctgtaacagctaaggactgcaaaaccccactctgcatcaactgaacgcaaatcagccactttaattaagctaagcccttactagaccaatgggacttaaacccacaaacacttagttaacagctaagcaccctaatcaactggcttcaatctacttctcccgccgccgggaaaaaaggcgggagaagccccggcaggtttgaagctgcttcttcgaatttgcaattcaatatgaaaatcacctcggagctggtaaaaagaggcctaacccctgtctttagatttacagtccaatgcttcactcagccattttacctcacccccactgatgttcgccgaccgttgactattctctacaaaccacaaagacattgggacactatacctattattcggcgcatgagctggagtcctaggcacagctctaagcctccttattcgagccgagctgggccagccaggcaaccttctaggtaacgaccacatctacaacgtcatcgtcacagcccatgcatttgtaataatcttcttcatagtaatacccatcataatcggaggctttggcaactgactagttcccctaataatcggtgcccccgatatggcgtttccccgcataaacaacataagcttctgactcttacctccctctctcctactcctgctcgcatctgctatagtggaggccggagcaggaacaggttgaacagtctaccctcccttagcagggaactactcccaccctggagcctccgtagacctaaccatcttctccttacacctagcaggtgtctcctctatcttaggggccatcaatttcatcacaacaattatcaatataaaaccccctgccataacccaataccaaacgcccctcttcgtctgatccgtcctaatcacagcagtcctacttctcctatctctcccagtcctagctgctggcatcactatactactaacagaccgcaacctcaacaccaccttcttcgaccccgccggaggaggagaccccattctataccaacacctattctgatttttcggtcaccctgaagtttatattcttatcctaccaggcttcggaataatctcccatattgtaacttactactccggaaaaaaagaaccatttggatacataggtatggtctgagctatgatatcaattggcttcctagggtttatcgtgtgagcacaccatatatttacagtaggaatagacgtagacacacgagcatatttcacctccgctaccataatcatcgctatccccaccggcgtcaaagtatttagctgactcgccacactccacggaagcaatatgaaatgatctgctgcagtgctctgagccctaggattcatctttcttttcaccgtaggtggcctgactggcattgtattagcaaactcatcactagacatcgtactacacgacacgtactacgttgtagctcacttccactatgtcctatcaataggggctgtatttgccatcataggaggcttcattcactgatttcccctattctcaggctacaccctagaccaaacctacgccaaaatccatttcgctatcatattcatcggcgtaaatctaactttcttcccacaacactttctcggcctgtccggaatgccccgacgttactcggactaccccgatgcatacaccacatgaaatatcctatcatctgtaggctcattcatttctctaacagcagtaatattaataattttcatgatttgagaagccttcgcttcgaagcgaaaagtcctaatagtagaagaaccctccataaacctggagtgactacatggatgccccccaccctaccacacattcgaagaacccgtatacataaaatctagacaaaaaaggaaggaatcgaaccccccaaagctggtttcaagccaaccccatggcctccatgactttttcaaaaagatattagaaaaaccatttcataactttgtcaaagttaaattataggctaaatcctatatatcttaatggcacatgcagcgcaagtaggtctacaagacgctacttcccctatcatagaagagcttatcacctttcatgatcacgccctcataatcattttccttatctgctccctagtcctgtatgcccttttcctaacactcacaacaaaactaactaatactaacatctcagacgctcaggaaatagaaaccgtctgaactatcctgcccgccatcatcctagtcctcatcgccctcccatccctacgcatcctttacataacagacgaggtcaacgatccctcccttaccatcaaatcaattggccaccaatggtactgaacctacgagtacaccgactacggcggactaatcttcaactcctacatacttcccccattattcctagaaccaggcgacctgcgactccttgacgttgacaatcgagtagtactcccgattgaaacccccattcgtataataattacatcacaagacgtcttgcactcatgagctgtccccacactaggcttaaaaacagatgcaattcccggacgtctaaaccaaaccactttcaccgctacacgaccgggggtatactacggtcaatgctctgaaatctgtggagcaaaccacagtttcatgcccatcgtcctagaattaattcccctaaaaatctttgaaatagggcccgtatttaccctatagcaccccctctaccccctctagagcccactgtaaagctaacttagcattaaccttttaagttaaagattaagagaaccaacacctctttacagtgaaatgccccaactaaatactaccgtatggcccaccataattacccccatactcctcacactattcctcatcacccaactaaaaatattaaacacaaactaccacttacctccctcaccaaagcccataaaaataaaaaattataacaaaccctgagaaccaaaatgaacgaaaatctgttcgcttcattcattgcccccacaatcctaggcctacccgccgcagtactgatcattctatttccccctctattgatccccacctccaaatatctcatcaacaaccgactaattaccacccaacaatgactaatcaaactaacctcaaaacaaatgatagccatacacaacactaaaggacgaacctgatctcttatactagtatccttaatcatttttattgccacaactaacctcctcggactcctgcctcactcatttacaccaaccacccaactatctataaacctagccatggccatccccttatgagcgggcgcagtgattataggctttcgctctaagattaaaaatgccctagcccacttcttaccacaaggcacacctacaccccttatccccatactagttattatcgaaaccatcagcctactcattcaaccaatagccctggccgtacgcctaaccgctaacattactgcaggccacctactcatgcacctaattggaagcgccaccctagcaatatcgaccattaaccttccctctacacttatcatcttcacaattctaattctactgactatcctagaaatcgctgtcgccttaatccaagcctacgttttcacacttctagtaagcctctacctgcacgacaacacataatgacccaccaatcacatgcctatcatatagtaaaacccagcccatgacccctaacaggggccctctcagccctcctaatgacctccggcctagccatgtgatttcacttccactccataacgctcctcgtactaggcctactaaccaacacactaaccatataccaatgatggcgcgatgtaacacgagaaagcacataccaaggccaccacacaccacctgtccaaaaaggccttcgatacgggataatcctatttattacctcagaagtttttttcttcgcaggatttttctgagccttttaccactccagcctagcccctaccccccaactaggagggcactggcccccaacaggcatcaccccgctaaatcccctagaagtcccactcctaaacacatccgtattactcgcatcaggagtatcaatcacctgagcccaccatagtctaatagaaaacaaccgaaaccaaataattcaagcactgcttattacaattttactgggtctctattttaccctcctacaagcctcagagtacttcgagtctcccttcaccatttccgacggcatctacggctcaacattttttgtagccacaggcttccacggacttcacgtcattattggctcaactttcctcactatctgcttcatccgccaactaatatttcactttacatccaaacatcactttggcttcgaagccgccgcctgatactggcattttgtagatgtggtttgactatttctgtatgtctccatctattgatgagggtcttactcttttagtataaatagtaccgttaacttccaattaactagttttgacaacattcaaaaaagagtaataaacttcgccttaattttaataatcaacaccctcctagccttactactaataattattacattttgactaccacaactcaacggctacatagaaaaatccaccccttacgagtgcggcttcgaccctatatcccccgcccgcgtccctttctccataaaattcttcttagtagctattaccttcttattatttgatctagaaattgccctccttttacccctaccatgagccctacaaacaactaacctgccactaatagctatgtcatccctcttattaatcatcatcctagccctaagtctgacctatgagtgactacaaaaaggattagactgagccgaattggtatatagtttaaacaaaacgaatgatttcgactcattaaattatgataatcatatttaccaaatgcccctcatttacataaatattatactagcatttaccatctcacttctaggaatactagtatatcgctcacacctcatatcctccctactatgcctagaaggaataatactatcactgttcattatagctactctcataaccctcaacacccactccctcttagccaatattgtgcctattgccatactagtctttgccgcctgcgaagcagcggtaggcctagccctactagtctcaatctccaacacatatggcctagactacgtacataacctaaacctactccaatgctaaaactaatcgtcccaacaattatattactaccactgacatgactctccaaaaaacacataatttgaatcaacacaaccacccacagcctaattattagcatcatccccctactattttttaaccaaatcaacaacaacctatttagctgttccccaaccttttcctccgaccccctaacaacccccctcctaatactaactacctgactcctacccctcacaatcatggcaagccaacgccacttatccagtgaaccactatcacgaaaaaaactctacctctctatactaatctccctacaaatctccttaattataacattcacagccacagaactaatcatattttatatcttcttcgaaaccacacttatccccaccttggctatcatcacccgatgaggcaaccagccagaacgcctgaacgcaggcacatacttcctattctacaccctagtaggctcccttcccctactcatcgcactaatttacactcacaacaccctaggctcactaaacattctactactcactctcactgcccaagaactatcaaactcctgagccaacaacttaatatgactagcttacacaatagcttttatagtaaagatacctctttacggactccacttatgactccctaaagcccatgtcgaagcccccatcgctgggtcaatagtacttgccgcagtactcttaaaactaggcggctatggtataatacgcctcacactcattctcaaccccctgacaaaacacatagcctaccccttccttgtactatccctatgaggcataattataacaagctccatctgcctacgacaaacagacctaaaatcgctcattgcatactcttcaatcagccacatagccctcgtagtaacagccattctcatccaaaccccctgaagcttcaccggcgcagtcattctcataatcgcccacggacttacatcctcattactattctgcctagcaaactcaaactacgaacgcactcacagtcgcatcataatcctctctcaaggacttcaaactctactcccactaatagctttttgatgacttctagcaagcctcgctaacctcgccttaccccccactattaacctactgggagaactctccgtgctagtaaccacgttctcctgatcaaatatcactctcctacttacaggactcaacatactagtcacagccctatactccctctacatatttaccacaacacaatggggctcactcacccaccacattaacaacataaaaccctcattcacacgagaaaacaccctcatgttcatacacctatcccccattctcctcctatccctcaaccccgacatcattaccgggttttcctcttgtaaatatagtttaaccaaaacatcagattgtgaatctgacaacagaggcttacgaccccttatttaccgagaaagctcacaagaactgctaactcatgcccccatgtctaacaacatggctttctcaacttttaaaggataacagctatccattggtcttaggccccaaaaattttggtgcaactccaaataaaagtaataaccatgcacactactataaccaccctaaccctgacttccctaattccccccatccttaccaccctcgttaaccctaacaaaaaaaactcatacccccattatgtaaaatccattgtcgcatccacctttattatcagcctcttccccacaacaatattcatgtgcctagaccaagaagttattatctcgaactgacactgagccacaacccaaacaacccagctctccctaagcttcaaactagactacttctccataatattcatccctgtagcattgttcgttacatggtccatcatagaattctcactgtgatatataaactcagacccaaacattaatcagttcttcaaatatctactcattttcctaattaccatactaatcttagttaccgctaacaacctattccaactgttcatcggctgggagggcgtaggaattatatccttcttgctcatcagttgatggtacgcccgagcagatgccaacacagcagccattcaagcaatcctatacaaccgtatcggcgatatcggtttcatcctcgccttagcatgatttatcctacactccaactcatgagacccacaacaaatagcccttctaaacgctaatccaagcctcaccccactactaggcctcctcctagcagcagcaggcaaatcagcccaattaggtctccacccctgactcccctcagccatagaaggccccaccccagtctcagccctactccactcaagcactatagttgtagcaggagtcttcttactcatccgcttccaccccctagcagaaaatagcccactaatccaaactctaacactatgcttaggcgctatcaccactctgttcgcagcagtctgcgcccttacacaaaatgacatcaaaaaaatcgtagccttctccacttcaagtcaactaggactcataatagttacaatcggcatcaaccaaccacacctagcattcctgcacatctgtacccacgccttcttcaaagccatactatttatgtgctccgggtccatcatccacaaccttaacaatgaacaagatattcgaaaaataggaggactactcaaaaccatacctctcacttcaacctccctcaccattggcagcctagcattagcaggaatgcctttcctcacaggtttctattccaaagaccacatcatcgaaaccgcaaacatatcatacacaaacgcctgagccctatctattactctcatcgctacctccctgacaagcgcctatagcactcgaataattcttctcaccctaacaggtcaacctcgcttccctacccttactaacattaacgaaaataaccccaccctactaaaccccattaaacgcctggcagccggaagcctattcgcaggatttctcattactaacaacatttcccccgcatcccccttccaaacaacaatccccctccacctaaaactcacagccctcgctgtcactttcctaggacttctaacagccctagacctcaactacctaaccaacaaacttaaaataaaatccccactatgcacattttatttctccaacatactcggattctaccctagcatcacacaccgcacaatcccctatctaggccttcttacgagccaaaacctgcccctactcctcctagaccaaacctgactagaaaagctattacctaaaacaatttcacagcaccaaatctccacctccatcatcacctcaacccaaaaaggcataatcaaactttacttcctctctttcttcttcccactcatcctaaccctactcctaatcacatagcctattcccccgagcaatctcaattacaacatatacaccaacaaacaatgttcaaccagtaactactactaatcaacgcccataatcatacaaagcccccgcaccaataggatcctcccgaatcaaccctgacccctctccttcataaattattcagcttcctacactattaaagtttaccacaaccaccaccccatcatactctttcacccacagcaccaatcctacctccatcgctaaccccactaaaacactcaccaagacctcaacccctgacccccatgcctcaggatactcctcaatagccatcgctgtagtatatccaaagacaaccatcattccccctaaataaattaaaaaaactattaaacccatataacctcccccaaaattcagaataataacacacccaaccacaccgctaacaatcaatactaaacccccataaataggagaaggcttagaagaaaaccccacaaaccccattactaaacccacactcaacagaaacaaagcatacatcattattctcgcacggactacaaccacgaccaatgatatgaaaaaccatcgttgtatttcaactacaagaacaccaatgaccccaatacgcaaaattaaccccctaataaaattaattaaccactcattcatcgacctccccaccccatccaacatctccgcatgatgaaacttcggctcactccttggcgcctgcctgatcctccaaatcaccacaggactattcctagccatgcactattcaccagacgcctcaaccgccttttcatcaatcgcccacatcactcgagacgtaaattatggctgaatcatccgctaccttcacgccaatggcgcctcaatattctttatctgcctcttcctacacatcgggcgaggcctatattacggatcatttctctactcagaaacctgaaacatcggcattatcctcctgcttgcaactatagcaacagccttcataggctatgtcctcccgtgaggccaaatatcattctgaggggccacagtaattacaaacttactatccgccatcccatacattgggacagacctagttcaatgaatctgaggaggctactcagtagacagtcccaccctcacacgattctttacctttcacttcatcttgcccttcattattgcagccctagcagcactccacctcctattcttgcacgaaacgggatcaaacaaccccctaggaatcacctcccattccgataaaatcaccttccacccttactacacaatcaaagacgccctcggcttacttctcttccttctctccttaatgacattaacactattctcaccagacctcctaggcgacccagacaattataccctagccaaccccttaaacacccctccccacatcaagcccgaatgatatttcctattcgcctacacaattctccgatccgtccctaacaaactaggaggcgtccttgccctattactatccatcctcatcctagcaataatccccatcctccatatatccaaacaacaaagcataatatttcgcccactaagccaatcactttattgactcctagccgcagacctcctcattctaacctgaatcggaggacaaccagtaagctacccttttaccatcattggacaagtagcatccgtactatacttcacaacaatcctaatcctaataccaactatctccctaattgaaaacaaaatactcaaatgggcctgtccttgtagtataaactaatacaccagtcttgtaaaccggagatgaaaacctttttccaaggacaaatcagagaaaaagtctttaactccaccattagcacccaaagctaagattctaatttaaactattctctgttctttcatggggaagcagatttgggtaccacccaagtattgactcacccatcaacaaccgctatgtatttcgtacattactgccagccaccatgaatattgtacagtaccataaatacttgaccacctgtagtacataaaaacccaatccacatcaaaaccctccccccatgcttacaagcaagtacagcaatcaaccttcaactatcacacatcaactgcaactccaaagccacccctcacccactagaatatcaacaaacctacccgtccttaacagtacatagcacataaagccatttaccgtacatagcacattacagtcaaatcccttcttgtccccatggatgacccccctcagataggggtcccttgaccaccatcctccgtgaaatcaatatcccgcacaagagtgctactctcctcgctccgggcccataacacttgggggtagctaaagtgaactgtatccgacatctggttcctacttcagggccataaagcctaaatagcccacacgttccccttaaataagacatcacgatg

SEQ ID NO: 209 - DNA, 16571 bp, Homo sapiens mitochondrial
  3109: "n" refers to a nucleotide at position 3107 of the Cambridge Reference Sequence (CRS, Anderson et al. 1981 Nature 290:457-465), later determined to be absent from the human mtDNA sequence according to the revised CRS (rCRS, Andrews et al. 1999 Nature Genetics 23:147); "n" therefore represents a single nucleotide deletion at a position corresponding to nucleotide 3107 of SEQ ID NO:1 as provided herein.
gatcacaggtctatcaccctattaaccactcacgggagctctccatgcatttggtattttcgtctggggggtgtgcacgcgatagcattgcgagacgctggagccggagcaccctatgtcgcagtatctgtctttgattcctgccccatcccattatttatcgcacctacgttcaatattacaggcgaacatacctactaaagtgtgttaattaattaatgcttgtaggacataataataacaattgaatgtctgcacagccgctttccacacagacatcataacaaaaaatttccaccaaaccccccctcccccccgcttctggccacagcacttaaacacatctctgccaaaccccaaaaacaaagaaccctaacaccagcctaaccagatttcaaattttatcttttggcggtatgcacttttaacagtcaccccccaactaacacattattttcccctcccactcccatactactaatctcatcaatacaacccccgcccatcctacccagcacacacacaccgctgctaaccccataccccgaaccaaccaaaccccaaagacaccccccacagtttatgtagcttacctcctcaaagcaatacactgaaaatgtttagacgggctcacatcaccccataaacaaataggtttggtcctagcctttctattagctcttagtaagattacacatgcaagcatccccgttccagtgagttcaccctctagatcaccacgatcaaaagggacaagcatcaagcacgcaacaatgcagctcaaaacgcttagcctagccacacccccacgggaaacagcagtgattaacctttagcaataaacgaaagtttaactaagctatactaaccccagggttggtcaatttcgtgccagccaccgcggtcacacgattaacccaagtcaatagaagccggcgtaaagagtgttttagatcaccccctccccaataaagctaaaactcacctgagttgtaaaaaactccagttgacacaaaataaactacgaaagtggctttaacatatctgaacacacaatagctaagacccaaactgggattagataccccactatgcttagccctaaacctcaacagttaaatcaacaaaactgctcgccagaacactacgagccacagcttaaaactcaaaggacctggcggtgcttcatatccctctagaggagcctgttctgtaatcgataaaccccgatcaacctcaccacctcttgctcagcctatataccgccatcttcagcaaaccctgatgaaggctacaaagtaagcgcaagtacccacgtaaagacgttaggtcaaggtgtagcccatgaggtggcaagaaatgggctacattttctaccccagaaaactacgatagcccttatgaaacttaagggtcgaaggtggatttagcagtaaactgagagtagagtgcttagttgaacagggccctgaagcgcgtacacaccgcccgtcaccctcctcaagtatacttcaaaggacatttaactaaaacccctacgcatttatatagaggagacaagtcgtaacatggtaagtgtactggaaagtgcacttggacgaaccagagtgtagcttaacacaaagcacccaacttacacttaggagatttcaacttaacttgaccgctctgagctaaacctagccccaaacccactccaccttactaccagacaaccttagccaaaccatttacccaaataaagtataggcgatagaaattgaaacctggcgcaatagatatagtaccgcaagggaaagatgaaaaattataaccaagcataatatagcaaggactaacccctataccttctgcataatgaattaactagaaataactttgcaaggagagccaaagctaagacccccgaaaccagacgagctacctaagaacagctaaaagagcacacccgtctatgtagcaaaatagtgggaagatttataggtagaggcgacaaacctaccgagcctggtgatagctggttgtccaagatagaatcttagttcaactttaaatttgcccacagaaccctctaaatccccttgtaaatttaactgttagtccaaagaggaacagctctttggacactaggaaaaaaccttgtagagagagtaaaaaatttaacacccatagtaggcctaaaagcagccaccaattaagaaagcgttcaagctcaacacccactacctaaaaaatcccaaacatataactgaactcctcacacccaattggaccaatctatcaccctatagaagaactaatgttagtataagtaacatgaaaacattctcctccgcataagcctgcgtcagattaaaacactgaactgacaattaacagcccaatatctacaatcaaccaacaagtcattattacccccactgtcaacccaacacaggcatgctcataaggaaaggttaaaaaaagtaaaaggaactcggcaaatcttaccccgcctgtttaccaaaaacatcacctctagcatcaccagtattagaggcaccgcctgcccagtgacacatgtttaacggccgcggtaccctaaccgtgcaaaggtagcataatcacttgttccttaaatagggacctgtatgaatggctccacgagggttcagctgtctcttacttttaaccagtgaaattgacctgcccgtgaagaggcgggcatgacacagcaagacgagaagaccctatggagctttaatttattaatgcaaacagtacctaacaaacccacaggtcctaaactactaaacctgcattaaaaatttcggttggggcgacctcggagcagaacccaacctccgagcagtacatgctaagacttcaccagtcaaagcgaactactatactcaattgatccaataacttgaccaacggaacaagttaccctagggataacagcgcaatcctattctagagtccatatcaacaatagggtttacgacctcgatgttggatcaggacatcccgatggtgcagccgctattaaaggttcgtttgttcaacgattaaagtcctacgtgatctgagttcagaccggagtaatccaggtcggtttctatctacnttcaaattcctccctgtacgaaaggacaagagaaataaggcctacttcacaaagcgccttcccccgtaaatgatatcatctcaacttagtattatacccacacccacccaagaacagggtttgttaagatggcagagcccggtaatcgcataaaacttaaaactttacagtcagaggttcaattcctcttcttaacaacatacccatggccaacctcctactcctcattgtacccattctaatcgcaatggcattcctaatgcttaccgaacgaaaaattctaggctatatacaactacgcaaaggccccaacgttgtaggcccctacgggctactacaacccttcgctgacgccataaaactcttcaccaaagagcccctaaaacccgccacatctaccatcaccctctacatcaccgccccgaccttagctctcaccatcgctcttctactatgaacccccctccccatacccaaccccctggttaacctcaacctaggcctcctatttattctagccacctctagcctagccgtttactcaatcctctgatcagggtgagcatcaaactcaaactacgccctgatcggcgcactacgagcagtagcccaaacaatctcatatgaagtcaccctagccatcattctactatcaacattactaataagtggctcctttaacctctccacccttatcacaacacaagaacacctctgattactcctgccatcatgacccttggccataatatgatttatctccacactagcagagaccaaccgaacccccttcgaccttgccgaaggggagtccgaactagtctcaggcttcaacatcgaatacgccgcaggccccttcgccctattcttcatagccgaatacacaaacattattataataaacaccctcaccactacaatcttcctaggaacaacatatgacgcactctcccctgaactctacacaacatattttgtcaccaagaccctacttctgacctccctgttcttatgaattcgaacagcatacccccgattccgctacgaccaactcatacacctcctatgaaaaaacttcctaccactcaccctagcattacttatatgatatgtctccatacccattacaatctccagcattccccctcaaacctaagaaatatgtctgataaaagagttactttgatagagtaaataataggagcttaaacccccttatttctaggactatgagaatcgaacccatccctgagaatccaaaattctccgtgccacctatcacaccccatcctaaagtaaggtcagctaaataagctatcgggcccataccccgaaaatgttggttatacccttcccgtactaattaatcccctggcccaacccgtcatctactctaccatctttgcaggcacactcatcacagcgctaagctcgcactgattttttacctgagtaggcctagaaataaacatgctagcttttattccagttctaaccaaaaaaataaaccctcgttccacagaagctgccatcaagtatttcctcacgcaagcaaccgcatccataatccttctaatagctatcctcttcaacaatatactctccggacaatgaaccataaccaatactaccaatcaatactcatcattaataatcataatggctatagcaataaaactaggaatagccccctttcacttctgagtcccagaggttacccaaggcacccctctgacatccggcctgcttcttctcacatgacaaaaactagcccccatctcaatcatataccaaatctctccctcactaaacgtaagccttctcctcactctctcaatcttatccatcatagcaggcagttgaggtggattaaaccaaacccagctacgcaaaatcttagcatactcctcaattacccacataggatgaataatagcagttctaccgtacaaccctaacataaccattcttaatttaactatttatattatcctaactactaccgcattcctactactcaacttaaactccagcaccacgaccctactactatctcgcacctgaaacaagctaacatgactaacacccttaattccatccaccctcctctccctaggaggcctgcccccgctaaccggctttttgcccaaatgggccattatcgaagaattcacaaaaaacaatagcctcatcatccccaccatcatagccaccatcaccctccttaacctctacttctacctacgcctaatctactccacctcaatcacactactccccatatctaacaacgtaaaaataaaatgacagtttgaacatacaaaacccaccccattcctccccacactcatcgcccttaccacgctactcctacctatctccccttttatactaataatcttatagaaatttaggttaaatacagaccaagagccttcaaagccctcagtaagttgcaatacttaatttctgtgacagctaaggactgcaaaaccccactctgcatcaactgaacgcaaatcagccactttaattaagctaagcccttactagaccaatgggacttaaacccacaaacacttagttaacagctaagcaccctaatcaactggcttcaatctacttctcccgccgccgggaaaaaaggcgggagaagccccggcaggtttgaagctgcttcttcgaatttgcaattcaatatgaaaatcacctcggagctggtaaaaagaggcctaacccctgtctttagatttacagtccaatgcttcactcagccattttacctcacccccactgatgttcgccgaccgttgactattctctacaaaccacaaagacattggaacactatacctattattcggcgcatgagctggagtcctaggcacagctctaagcctccttattcgagccgagctgggccagccaggcaaccttctaggtaacgaccacatctacaacgttatcgtcacagcccatgcatttgtaataatcttcttcatagtaatacccatcataatcggaggctttggcaactgactagttcccctaataatcggtgcccccgatatggcgtttccccgcataaacaacataagcttctgactcttacctccctctctcctactcctgctcgcatctgctatagtggaggccggagcaggaacaggttgaacagtctaccctcccttagcagggaactactcccaccctggagcctccgtagacctaaccatcttctccttacacctagcaggtgtctcctctatcttaggggccatcaatttcatcacaacaattatcaatataaaaccccctgccataacccaataccaaacgcccctcttcgtctgatccgtcctaatcacagcagtcctacttctcctatctctcccagtcctagctgctggcatcactatactactaacagaccgcaacctcaacaccaccttcttcgaccccgccggaggaggagaccccattctataccaacacctattctgatttttcggtcaccctgaagtttatattcttatcctaccaggcttcggaataatctcccatattgtaacttactactccggaaaaaaagaaccatttggatacataggtatggtctgagctatgatatcaattggcttcctagggtttatcgtgtgagcacaccatatatttacagtaggaatagacgtagacacacgagcatatttcacctccgctaccataatcatcgctatccccaccggcgtcaaagtatttagctgactcgccacactccacggaagcaatatgaaatgatctgctgcagtgctctgagccctaggattcatctttcttttcaccgtaggtggcctgactggcattgtattagcaaactcatcactagacatcgtactacacgacacgtactacgttgtagctcacttccactatgtcctatcaataggagctgtatttgccatcataggaggcttcattcactgatttcccctattctcaggctacaccctagaccaaacctacgccaaaatccatttcactatcatattcatcggcgtaaatctaaccttcttcccacaacactttctcggcctatccggaatgccccgacgttactcggactaccccgatgcatacaccacatgaaatatcctatcatctgtaggttcattcatttctctaacagcagtaatattaataattttcatgatttgagaagccttcgcttcgaagcgaaaagtcctaatagtagaagaaccctccataaacctggagtgactatatggatgccccccaccctaccacacattcgaagaacccgtatacataaaatctagacaaaaaaggaaggaatcgaaccccccaaagctggtttcaagccaaccccatggcctccatgactttttcaaaaagatattagaaaaaccatttcataactttgtcaaagttaaattataggctaaatcctatatatcttaatggcacatgcagcgcaagtaggtctacaagacgctacttcccctatcatagaagagcttatcacctttcatgatcacgccctcataatcattttccttatctgcttcctagtcctgtatgcccttttcctaacactcacaacaaaactaactaatactaacatctcagacgctcaggaaatagagaccgtctgaactatcctgcccgccatcatcctagtcctcatcgccctcccatccctacgcatcctttacataacagacgaggtcaacgatccctcccttaccatcaaatcaattggccaccaatggtactgaacctacgagtacaccgactacggcggactaatcttcaactcctacatacttcccccattattcctagaaccaggcgacctgcgactccttgacgttgacaatcgagtagtactcccgattgaagcccccattcgtataataattacatcacaagacgtcttgcactcatgagctgtccccacattaggcttaaaaacagatgcaattcccggacgtctaaaccaaaccactttcaccgctacacgaccgggggtatactacggtcaatgctctgaaatctgtggagcaaaccacagtttcatacccatcgtcctagaattaattcccctaaaaatctttgaaatagggcccgtatttaccctatagcaccccctctaccccctctagagcccactgtaaagctaacttagcattaaccttttaagttaaagattaagagaaccaacacctctttacagtgaaatgccccaactaaatactaccgtatggcccaccataattacccccatactccttacactattcctcatcacccaactaaaaatattaaacacaaactaccacctacctccctcaccaaagcccataaaaataaaaaattataacaaaccctgagaaccaaaatgaacgaaaatctgttcgcttcattcattgcccccacaatcctaggcctacccgccgcagtactgatcattctatttccccctctattgatccccacctccaaatatctcatcaacaaccgactaatcaccacccaacaatgactaatcaaactaacctcaaaacaaatgatagccatacacaacactaaaggacgaacctgatctcttatactagtatccttaatcatttttattgccacaactaacctcctcggactcctgcctcactcatttacaccaaccacccaactatctataaacctagccatggccatccccttatgagcgggcgcagtgattataggctttcgctctaagattaaaaatgccctagcccacttcttaccacaaggcacacctacaccccttatccccatactagttattatcgaaaccatcagcctactcattcaaccaatagccctggccgtacgcctaaccgctaacattactgcaggccacctactcatgcacctaattggaagcgccaccctagcaatatcaaccattaaccttccctctacacttatcatcttcacaattctaattctactgactatcctagaaatcgctgtcgccttaatccaagcctacgttttcacacttctagtaagcctctacctgcacgacaacacataatgacccaccaatcgcatgcctatcatatagtaaaacccagcccatgacccctaacaggggccctctcagccctcctaatgacctccggcctagccatgtgatttcacttccactccataacgctcctcatactaggcctactaaccaacacactaaccatataccaatgatggcgcgatgtaacacgagaaagcacataccaaggccaccacacaccacctgtccaaaaaggccttcgatacgggataatcctatttattacctcagaagtttttttcttcgcaggatttttctgagccttttaccactccagcctagcccctaccccccaactaggagggcactggcccccaacaggcatcaccccgctaaatcccctagaagtcccactcctaaacacatccgtattactcgcatcaggagtatcaatcacctgagctcaccatagtctaatagaaaacaaccgaaaccaaataattcaagcactgcttattacaattttactgggtctctattttaccctcctacaagcctcagagtacttcgagtctcccttcaccatttccgacggcatctacggctcaacattttttgtagccacaggcttccacggacttcacgtcattattggctcaactttcctcactatctgcttcatccgccaactaatatttcactttacatccaaacatcactttggcttcgaagccgccgcctgatactggcattttgtagatgtggtttgactatttctgtatgtctccatctattgatgagggtcttactcttttagtataaatagtaccgttaacttccaattaactagttttgacaacattcaaaaaagagtaataaacttcgccttaattttaataatcaacaccctcctagccttactactaataatcattacattttgactaccacaactcaacggctacatagaaaaatccaccccttacgagtgcggcttcgaccctatatcccccgcccgcgtccctttctccataaaattcttcttagtagctattaccttcttattatttgatctagaaattgccctccttttacccctaccatgagccctacaaacaactaacctgccactaatagttatgtcatccctcttattaatcatcatcctagccctaagtctggcctatgagtgactacaaaaaggattagactgagccgaattggtatatagtttaaacaaaacgaatgatttcgactcattaaattatgataatcatatttaccaaatgcccctcatttacataaatattatactagcatttaccatctcacttctaggaatactagtatatcgctcacacctcatatcctccctactatgcctagaaggaataatactatcgctgttcattatagctactctcataaccctcaacacccactccctcttagccaatattgtgcctattgccatactagtctttgccgcctgcgaagcagcggtgggcctagccctactagtctcaatctccaacacatatggcctagactacgtacataacctaaacctactccaatgctaaaactaatcgtcccaacaattatattactaccactgacatgactttccaaaaaacacataatttgaatcaacacaaccacccacagcctaattattagcatcatccccctactattttttaaccaaatcaacaacaacctatttagctgttccccaaccttttcctccgaccccctaacaacccccctcctaatactaactacctgactcctacccctcacaatcatggcaagccaacgccacttatccagtgaaccactatcacgaaaaaaactctacctctctatactaatctccctacaaatctccttaattataacattcacagccacagaactaatcatattttatatcttcttcgaaaccacacttatccccaccttggctatcatcacccgatgaggcaaccagccagaacgcctgaacgcaggcacatacctcctattctacaccctagtaggctcccttcccctactcatcgcactaatttacactcacaacaccctaggctcactaaacattctactactcactctcactgcccaagaactatcaaactcctgagccaacaacttaatatgactagcttacacaatagcttttatagtaaagatacctctttacggactccacttatgactccctaaagcccatgtcgaagcccccatcgctgggtcaatagtacttgccgcagtactcttaaaactaggcggctatggtataatacgcctcacactcattctcaaccccctgacaaaacacatagcctaccccttccttgtactatccctatgaggcataattataacaagctccatctgcctacgacaaacagacctaaaatcgctcattgcatactcttcaatcagccacatagccctcgtagtaacagccattctcatccaaaccccctgaagcttcaccggcgcagtcattctcataatcgcccacggacttacatcctcattactattctgcctagcaaactcaaactacgaacgcactcacagtcgcatcataatcctctctcaaggacttcaaactctactcccactaatagctttttgatgacttctagcaagcctcgctaacctcgccttaccccccactattaacctactgggagaactctctgtgctagtaaccacattctcctgatcaaatatcactctcctactcacaggactcaacatactagtcacagccctatactccctctacatatttaccacaacacaatggggctcactcacccaccacattaacaacataaaaccctcattcacacgagaaaacaccctcatgttcatacacctatcccccattctcctcctatccctcaaccccgacatcattaccgggttttcctcttgtaaatatagtttaaccaaaacatcagattgtgaatctgacaacagaggcttacgaccccttatttaccgagaaagctcacaagaactgctaactcatgcccccatgtctaacaacatggctttctcaacttttaaaggataacagctatccattggtcttaggccccaaaaattttggtgcaactccaaataaaagtaataaccatgcacactactataaccaccctaaccctgacttccctaattccccccatccttaccaccctcgttaaccctaacaaaaaaaactcatacccccattatgtaaaatccattgtcgcatccacctttattatcagtctcttccccacaacaatattcatgtgcctagaccaagaagttattatctcgaactgacactgagccacaacccaaacaacccagctctccctaagcttcaaactagactacttctccataatattcatccctgtagcattgttcgttacatggtccatcatagaattctcactgtgatatataaactcagacccaaacattaatcagttcttcaagtatctactcattttcctaattaccatactaatcttagttaccgctaacaacctattccaactgttcatcggctgagagggcgtaggaattatatccttcttgctcatcagttgatgatacgcccgagcagatgccaacacagcagccattcaagcaatcctatacaaccgtatcggcgatatcggtttcatcctcgccttagcatgatttatcctacactccaactcatgagacccacaacaaatagcccttctaaacgctaatccaagcctcaccccactactaggcctcctcctagcagcagcaggcaaatcagcccaattaggtctccacccctgactcccctcagccatagaaggccccaccccagtctcagccctactccactcaagcactatagttgtagcaggaatcttcttactcatccgcttccaccccctagcagaaaatagcccactaatccaaactctaacactatgcttaggcgctatcaccactctgttcgcagcagtctgcgcccttacacaaaatgacatcaaaaaaatcgtagccttctccacttcaagtcaactaggactcataatagttacaatcggcatcaaccaaccacacctagcattcctgcacatctgtacccacgccttcttcaaagccatactatttatgtgctccgggtccatcatccacaaccttaacaatgaacaagatattcgaaaaataggaggactactcaaaaccatacctctcacttcaacctccctcaccattggcagcctagcattagcaggaatacctttcctcacaggtttctactccaaagaccacatcatcgaaaccgcaaacatatcatacacaaacgcctgagccctatctattactctcatcgctacctccctaacaagcgcctatagcactcgaataattcttctcaccctaacaggtcaacctcgcttccctacccttactaacattaacgaaaataaccccaccctactaaaccccattaaacgcctggcagccggaagcctattcgcaggatttctcattactaacaacatttcccccgcatcccccttccaaacaacaatccccctctacctaaaactcacggccctcgctgtcactttcctaggacttctaacagccctagacctcaactacctaaccaacaaacttaaaataaaatccccactatgcacattttatttctccaacatactcggattctaccctagcatcacacaccgcacaatcccctatctaggccttcttacgagccaaaacctgcccctactcctcctagacctaacctgactagaaaagctattacctaaaacaatttcacagcaccaaatctccacctccatcatcacctcaacccaaaaaggcataattaaactttacttcctctctttcttcttcccactcatcctaaccctactcctaatcacataacctattcccccgagcaatctcaattacaatatatacaccaacaaacaatgttcaaccagtaactactactaatcaacgcccataatcatacaaagcccccgcaccaataggatcctcccgaatcaaccctgacccctctccttcataaattattcagcttcctacactattaaagtttaccacaaccaccaccccatcatactctttcacccacagcaccaatcctacctccatcgctaaccccactaaaacactcaccaagacctcaacccctgacccccatgcttcaggatactcctcaatagccatcgctgtagtatatccaaagacaaccatcattccccctaaataaattaaaaaaactattaaacccatataacctcccccaaaattcagaataataacacacccgaccacgccgctaacaatcaatactaaacccccataaataggagaaggcttagaagaaaaccccacaaaccccattactaaacccacactcaacagaaacaaagcatacatcattattctcgcacggactacaaccacgaccaatgatatgaaaaaccatcgttgtatttcaactacaagaacaccaatgaccccaatacgcaaaattaaccccctaataaaattaattaaccactcattcatcgacctccccaccccatccaacatctccgcatgatgaaacttcggctcactccttggcgcctgcctgatcctccaaatcaccacaggactattcctagccatgcactactcaccagacgcctcagccgccttttcatcaatcgcccacatcactcgagacgtaaattatggctgaatcatccgctaccttcacgccaatggcgcctcaatattctttatctgcctcttcctacacatcgggcgaggcctatattacggatcatttctctactcagaaacctgaaacatcggcattatcctcctgcttgcaactatagcaacagccttcataggctatgtcctcccgtgaggccaaatatcattctgaggggccacagtaattacaaacttactatccgccatcccatacattgggacagacctagttcaatgaatctgaggaggctactcagtagacagtcccaccctcacacgattctttacctttcacttcatcttacccttcattattgcagccctagcagcactccacctcctattcttgcacgaaacgggatcaaacaaccccctaggaatcacctcccattccgataaaatcaccttccacccttactacacaatcaaagacgccctcggcttacttctcttccttctctccttaatgacattaacactattctcaccagacctcctaggcgacccagacaattataccctagccaaccccttaaacacccctccccacatcaagcccgaatgatatttcctattcgcctacacaattctccgatccgtccctaacaaactaggaggcgtccttgccctattactatccatcctcatcctagcaataatccccatcctccatatatccaaacaacaaagcataatatttcgcccactaagccaatcactttattgactcctagccgcagacctcctcattctaacctgaatcggaggacaaccagtaagctacccctttaccatcattggacaagtagcatccgtactatacttcacaacaatcctaatcctaataccaactatctccctaattgaaaacaaaatactcaaatgggcctgtccttgtagtataaactaatacaccagtcttgtaaaccggagatgaaaacctttttccaaggacaaatcagagaaaaagtctttaactccaccattagcacccaaagctaagattctaatttaaactattctctgttctttcatggggaagcagatttgggtaccacccaagtattgactcacccatcaacaaccgctatgtatttcgtacattactgccagccaccatgaatattgtacggtaccataaatacttgaccacctgtagtacataaaaacccaatccacatcaaacccccccccccatgcttacaagcaagtacagcaatcaaccttcaactatcacacatcaactgcaactccaaagccacccctcacccactaggatatcaacaaacctacccatccttaacagtacatggtacataaagccatttaccgtacatagcacattacagtcaaatcccttctcgtccccatggatgacccccctcagataggagtcccttgaccaccatcctccgtgaaatcaatatcccgcacaagagtgctactctcctcgctccgggcccataacacttgggggtagctaaagtgaactgtatccgacatctggttcctacttcagggtcataaagcctaaatagcccacacgttccccttaaataagacatcacgatg

SEQ ID NO: 210 - DNA, 16571 bp, Homo sapiens mitochondrial
  3109: "n" refers to a nucleotide at position 3107 of the Cambridge Reference Sequence (CRS, Anderson et al. 1981 Nature 290:457-465), later determined to be absent from the human mtDNA sequence according to the revised CRS (rCRS, Andrews et al. 1999 Nature Genetics 23:147); "n" therefore represents a single nucleotide deletion at a position corresponding to nucleotide 3107 of SEQ ID NO:1 as provided herein.
gatcacaggtctatcaccctattaaccactcacgggagctctccatgcatttggtattttcgtctggggggtatgcacgcgatagcattgcgagacgctggagccggagcaccctatgtcgcagtatctgtctttgattcctgcctcatcctattatttatcgcacctacgttcaatattacaggcgaacatacttactaaagtgtgttaattaattaatgcttgtaggacataataataacaattgaatgtctgcacagccgctttccacacagacatcataacaaaaaatttccaccaaaccccccctcccccccgcttctggccacagcacttaaacacatctctgccaaaccccaaaaacaaagaaccctaacaccagcctaaccagatttcaaattttatcttttggcggtatgcacttttaacagtcaccccccaactaacacattattttcccctcccactcccatactactaatctcatcaatacaacccccgcccatcctacccagcacacacacaccgctgctaaccccataccccgaaccaaccaaaccccaaagacaccccccacagtttatgtagcttacctcctcaaagcaatacactgaaaatgtttagacgggctcacatcaccccataaacaaataggtttggtcctagcctttctattagctcttagtaagattacacatgcaagcatccccgttccagtgagttcaccctctaaatcaccacgatcaaaagggacaagcatcaagcacgcagcaatgcagctcaaaacgcttagcctagccacacccccacgggaaacagcagtgattaacctttagcaataaacgaaagtttaactaagctatactaaccccagggttggtcaatttcgtgccagccaccgcggtcacacgattaacccaagtcaatagaagccggcgtaaagagtgttttagatcaccccctccccaataaagctaaaactcacctgagttgtaaaaaactccagttgacacaaaatagactacgaaagtggctttaacatatctgaacacacaatagctaagacccaaactgggattagataccccactatgcttagccctaaacctcaacagttaaatcaacaaaactgctcgccagaacactacgagccacagcttaaaactcaaaggacctggcggtgcttcatatccctctagaggagcctgttctgtaatcgataaaccccgatcaacctcaccacctcttgctcagcctatataccgccatcttcagcaaaccctgatgaaggctacaaagtaagcgcaagtacccacgtaaagacgttaggtcaaggtgtagcccatgaggtggcaagaaatgggctacattttctaccccagaaaactacgatagcccttatgaaacttaagggtcgaaggtggatttagcagtaaactaagagtagagtgcttagttgaacagggccctgaagcgcgtacacaccgcccgtcaccctcctcaagtatacttcaaaggacatttaactaaaacccctacgcatttatatagaggaggcaagtcgtaacatggtaagtgtactggaaagtgcacttggacgaaccagagtgtagcttaacacaaagcacccaacttacacttaggagatttcaacttaacttgaccgctctgagctaaacctagccccaaacccactccaccttactaccagacaaccttagccaaaccatttacccaaataaagtataggcgatagaaattgaaacctggcgcaatagatatagtaccgcaagggaaagatgaaaaattataaccaagcataatatagcaaggactaacccctataccttctgcataatgaattaactagaaataactttgcaaggagagccaaagctaagacccccgaaaccagacgagctacctaagaacagctaaaagagcacacccgtctatgtagcaaaatagtgggaagatttataggtagaggcgacaaacctaccgagcctggtgatagctggttgtccaagatagaatcttagttcaactttaaatttgcccacagaaccctctaaatccccttgtaaatttaactgttagtccaaagaggaacagctctttggacactaggaaaaaaccttgtagagagagtaaaaaatttaacacccatagtaggcctaaaagcagccaccaattaagaaagcgttcaagctcaacacccactacctaaaaaatcccaaacatataactgaactcctcacacccaattggaccaatctatcaccctatagaagaactaatgttagtataagtaacatgaaaacattctcctccgcataagcctgcgtcagattaaaacactgaactgacaattaacagcccaatatctacaatcaaccaacaagtcattattaccctcactgtcaacccaacacaggcatgctcataaggaaaggttaaaaaaagtaaaaggaactcggcaaatcttaccccgcctgtttaccaaaaacatcacctctagcatcaccagtattagaggcaccgcctgcccagtgacacatgtttaacggccgcggtaccctaaccgtgcaaaggtagcataatcacttgttccttaaatagggacctgtatgaatggctccacgagggttcagctgtctcttacttttaaccagtgaaattgacctgcccgtgaagaggcgggcataacacagcaagacgagaagaccctatggagctttaatttattaatgcaaacagtacctaacaaacccacaggtcctaaactaccaaacctgcattaaaaatttcggttggggcgacctcggagcagaacccaacctccgagcagtacatgctaagacttcaccagtcaaagcgaactactatactcaattgatccaataacttgaccaacggaacaagttaccctagggataacagcgcaatcctattctagagtccatatcaacaatagggtttacgacctcgatgttggatcaggacatcccgatggtgcagccgctattaaaggttcgtttgttcaacgattaaagtcctacgtgatctgagttcagaccggagtaatccaggtcggtttctatctacnttcaaattcctccctgtacgaaaggacaagagaaataaggcctacttcacaaagcgccttcccccgtaaatgatatcatctcaacttagtattatacccacacccacccaagaacagggtttgttaagatggcagagcccggtaatcgcataaaacttaaaactttacagtcagaggttcaattcctcttcttaacaacatacccatggccaacctcctactcctcattgtacccattctaatcgcaatggcattcctaatgcttaccgaacgaaaaattctaggctatatacaactacgcaaaggccccaacgttgtaggcccctacgggctactacaacccttcgctgacgccataaaactcttcaccaaagagcccctaaaacccgccacatctaccatcaccctctacatcaccgccccgaccttagctctcaccatcgctcttctactatgaacccccctccccatacccaaccccctggtcaacctcaacctaggcctcctatttattctagccacctctagcctagccgtttactcaatcctctgatcagggtgagcatcaaactcaaactacgccctgatcggcgcactgcgagcagtagcccaaacaatctcatatgaagtcaccctagccatcattctactatcaacattactaataagtggctcctttaacctctccacccttatcacaacacaagaacacctctgattactcctgccatcatgacccttggccataatatgatttatctccacactagcagagaccaaccgaacccccttcgaccttgccgaaggggagtccgaactagtctcaggcttcaacatcgaatacgccgcaggccccttcgccctattcttcatagccgaatacacaaacattattataataaacaccctcaccactacaatcttcctaggaacaacatatgacgcactctcccctgaactctacacaacatattttgtcaccaagaccctacttctaacctccctgttcttatgaattcgaacagcatacccccgattccgctacgaccaactcatacacctcctatgaaaaaacttcctaccactcaccctagcattacttatatgatatgtctccatacccattacaatctccagcattccccctcaaacctaagaaatatgtctgataaaagagttactttgatagagtaaataataggagcttaaacccccttatttctaggactatgagaatcgaacccatccctgagaatccaaaattctccgtgccacctatcacaccccatcctaaagtaaggtcagctaaataagctatcgggcccataccccgaaaatgttggttatacccttcccgtactaattaatcccctggcccaacccgtcatctactctaccatctttgcaggcacactcatcacagcgctaagctcgcactgattttttacctgagtaggcctagaaataaacatgctagcttttattccagttctaaccaaaaaaataaaccctcgttccacagaagctgccatcaagtatttcctcacgcaagcaaccgcatccataatccttctaatagctatcctcttcaacaatatactctccggacaatgaaccataaccaatactaccaatcaatactcatcattaataatcataatagctatagcaataaaactaggaatagccccctttcacttctgagtcccagaggttacccaaggcacccctctgacatccggcctgcttcttctcacatgacaaaaactagcccccatctcaatcatataccaaatctctccctcactaaacgtaagccttctcctcactctctcaatcttatccatcatagcaggcagttgaggtggattaaaccaaacccagctacgcaaaatcttagcatactcctcaattacccacataggatgaataatagcagttctaccgtacaaccctaacataaccattcttaatttaactatttatattatcctaactactaccgcattcctactactcaacttaaactccagcaccacgaccctactactatctcgcacctgaaacaagctaacatgactaacacccttaattccatccaccctcctctccctaggaggcctgcccccgctaaccggctttttgcccaaatgggccattatcgaagaattcacaaaaaacaatagcctcatcatccccaccatcatagccaccatcaccctccttaacctctacttctacctacgcctaatctactccacctcaatcacactactccccatatctaacaacgtaaaaataaaatgacagtttgaacatacaaaacccaccccattcctccccacactcatcgcccttaccacgctactcctacctatctccccttttatactaataatcttatagaaatttaggttaaatacagaccaagagccttcaaagccctcagtaagttgcaatacttaatttctgtaacagctaaggactgcaaaaccccactctgcatcaactgaacgcaaatcagccactttaattaagctaagcccttactagaccaatgggacttaaacccacaaacacttagttaacagctaagcaccctaatcaactggcttcaatctacttctcccgccgccgggaaaaaaggcgggagaagccccggcaggtttgaagctgcttcttcgaatttgcaattcaatatgaaaatcacctcggagctggtaaaaagaggcctaacccctgtctttagatttacagtccaatgcttcactcagccattttacctcacccccactgatgttcgccgaccgttgactattctctacaaaccacaaagacattggaacactatacctattattcggcgcatgagctggagtcctaggcacagctctaagcctccttattcgagccgagctgggccagccaggtaaccttctaggtaacgaccacatctacaacgttatcgtcacagcccatgcatttgtaataatcttcttcatagtaatacccatcataatcggaggctttggcaactgactagttcccctaataatcggtgcccccgatatggcgtttccccgcataaacaacataagcttctgactcttacctccctctctcctactcctgctcgcatctgctatagtggaggccggagcaggaacaggttgaacagtctaccctcccttagcagggaactactcccaccctggagcctccgtagacctaaccatcttctccttacacctagcaggtgtctcctctatcttaggggccatcaatttcatcacaacaattatcaatataaaaccccctgccataacccaataccaaacgcccctcttcgtctgatccgtcctaatcacagcagtcctacttctcctatctctcccagtcctagctgctggcatcactatactactaacagaccgcaacctcaacaccaccttcttcgaccccgccggaggaggagaccccattctataccaacacctattctgatttttcggtcaccctgaagtttatattcttatcctaccaggcttcggaataatctcccatattgtaacttactactccggaaaaaaagaaccatttggatacataggtatggtctgagctatgatatcaattggcttcctagggtttatcgtgtgagcacaccatatatttacagtaggaatagacgtagacacacgagcatatttcacctccgctaccataatcatcgctatccccaccggcgtcaaagtatttagctgactcgccacactccacggaagcaatatgaaatgatctgctgcagtgctctgagccctaggattcatctttcttttcaccgtaggtggcctgactggcattgtattagcaaactcatcactagacatcgtactacacgacacgtactacgttgtagcccacttccactatgtcctatcaataggagctgtatttgccatcataggaggcttcattcactgatttcccctattctcaggctacaccctagaccaaacctacgccaaaatccatttcactatcatattcatcggcgtaaatctaactttcttcccacaacactttctcggcctatccggaatgccccgacgttactcggactaccccgatgcatacaccacatgaaacatcctatcatctgtaggctcattcatttctctaacagcagtaatattaataattttcatgatttgagaagccttcgcttcgaagcgaaaagtcctaatagtagaagaaccctccataaacctggagtgactatatggatgccccccaccctaccacacattcgaagaacccgtatacataaaatctagacaaaaaaggaaggaatcgaaccccccaaagctggtttcaagccaaccccatggcctccatgactttttcaaaaaggtattagaaaaaccatttcataactttgtcaaagttaaattataggctaaatcctatatatcttaatggcacatgcagcgcaagtaggtctacaagacgctacttcccctatcatagaagagcttatcacctttcatgatcacgccctcataatcattttccttatctgcttcctagtcctgtatgcccttttcctaacactcacaacaaaactaactaatactaacatctcagacgctcaggaaatagaaaccgtctgaactatcctgcccgccatcatcctagtcctcatcgccctcccatccctacgcatcctttacataacagacgaggtcaacgatccctcccttaccatcaaatcaattggccaccaatggtactgaacctacgagtacaccgactacggcggactaatcttcaactcctacatacttcccccattattcctagaaccaggcgacctgcgactccttgacgttgacaatcgagtagtactcccgattgaagcccccattcgtataataattacatcacaagacgtcttgcactcatgagctgtccccacattaggcttaaaaacagatgcaattcccggacgtctaaaccaaaccactttcaccgctacacgaccgggggtatactacggtcaatgctctgaaatctgtggagcaaaccacagtttcatgcccatcgtcctagaattaattcccctaaaaatctttgaaatagggcccgtatttaccctatagcaccccctctaccccctctagagcccactgtaaagctaacttagcattaaccttttaagttaaagattaagagaaccaacacctctttacagtgaaatgccccaactaaatactaccgtatggcccaccataattacccccatactccttacactattcctcatcacccaactaaaaatattaaacacaaactaccacctacctccctcaccaaagcccataaaaataaaaaattataacaaaccctgagaaccaaaatgaacgaaaatctgttcgcttcattcattgcccccacaatcctaggcctacccgccgcagtactgatcattctatttccccctctattgatccccacctccaaatatctcatcaacaaccgactaatcaccacccaacaatgactaatcaaactaacctcaaaacaaatgataaccatacacaacactaaaggacgaacctgatctcttatactagtatccttaatcatttttattgccacaactaacctcctcggactcctgcctcactcatttacaccaaccacccaactatctataaacctagccatggccatccccttatgagcgggcgcagtgattataggctttcgctctaagattaaaaatgccctagcccacttcttaccacaaggcacacctacaccccttatccccatactagttattatcgaaaccatcagcctactcattcaaccaatagccctggccgtacgcctaaccgctaacattactgcaggccacctactcatgcacctaattggaagcgccaccctagcaatatcaaccattaaccttccctctacacttatcatcttcacaattctaattctactgactatcctagaaatcgctgtcgccttaatccaagcctacgttttcacacttctagtaagcctctacctgcacgacaacacataatgacccaccaatcacatgcctatcatatagtaaaacccagcccatgacccctaacaggggccctctcagccctcctaatgacctccggcctagccatgtgatttcacttccactccataacgctcctcatactaggcctactaaccaacacactaaccatataccaatgatggcgcgatgtaacacgagaaagcacataccaaggccaccacacaccacctgtccaaaaaggccttcgatacgggataatcctatttattacctcagaagtttttttcttcgcaggatttttctgagccttttaccactccagcctagcccctaccccccaattaggagggcactggcccccaacaggcatcaccccgctaaatcccctagaagtcccactcctaaacacatccgtattactcgcatcaggagtatcaatcacctgagctcaccatagtctaatagaaaacaaccgaaaccaaataattcaagcactgcttattacaattttactgggtctctattttaccctcctacaagcctcagagtacttcgagtctcccttcaccatttccgacggcatctacggctcaacattttttgtagccacaggcttccacggacttcacgtcattattggctcaactttcctcactatctgcttcatccgccaactaatatttcactttacatccaaacatcactttggcttcgaagccgccgcctgatactggcattttgtagatgtggtttgactatttctgtatgtctccatctattgatgagggtcttactcttttagtataaatagtaccgttaacttccaattaactagttttgacaacattcaaaaaagagtaataaacttcgccttaattttaataatcaacaccctcctagccttactactaataattattacattttgactaccacaactcaacggctacatagaaaaatccaccccttacgagtgcggcttcgaccctatatcccccgcccgcgtccctttctccataaaattcttcttagtagctattaccttcttattatttgatctagaaattgccctccttttacccctaccatgagccctacaaacaactaacctgccactaatagttatgtcatccctcttattaatcatcatcctagccctaagtctggcctatgagtgactacaaaaaggattagactgaaccgaattggtatatagtttaaacaaaacgaatgatttcgactcattaaattatgataatcatatttaccaaatgcccctcatttacataaatattatactagcatttaccatctcacttctaggaatactagtatatcgctcacacctcatatcctccctactatgcctagaaggaataatactatcgctgttcattatagctactctcataaccctcaacacccactccctcttagccaatattgtgcctattgccatactagtctttgccgcctgcgaagcagcggtgggcctagccctactagtctcaatctccaacacatatggcctagactacgtacataacctaaacctactccaatgctaaaactaatcgtcccaacaattatattactaccactgacatgactttccaaaaaacacataatttgaatcaacacaaccacccacagcctaattattagcatcatccctctactattttttaaccaaatcaacaacaacctatttagctgttccccaaccttttcctccgaccccctaacaacccccctcctaatactaactacctgactcctacccctcacaatcatggcaagccaacgccacttatccagtgaaccactatcacgaaaaaaactctacctctctatactaatctccctacaaatctccttaattataacattcacagccacagaactaatcatattttatatcttcttcgaaaccacacttatccccaccttggctatcatcacccgatgaggcaaccagccagaacgcctgaacgcaggcacatacttcctattctacaccctagtaggctcccttcccctactcatcgcactaatttacactcacaacaccctaggctcactaaacattctactactcactctcactgcccaagaactatcaaactcctgagccaacaacttaatatgactagcttacacaatagcttttatagtaaagatacctctttacggactccacttatgactccctaaagcccatgtcgaagcccccatcgctgggtcaatagtacttgccgcagtactcttaaaactaggcggctatggtataatacgcctcacactcattctcaaccccctgacaaaacacatagcctaccccttccttgtactatccctatgaggcataattataacaagctccatctgcctacgacaaacagacctaaaatcgctcattgcatactcttcaatcagccacatagccctcgtagtaacagccattctcatccaaaccccctgaagcttcaccggcgcagtcattctcataatcgcccacgggcttacatcctcattactattctgcctagcaaactcaaactacgaacgcactcacagtcgcatcataatcctctctcaaggacttcaaactctactcccactaatagctttttgatgacttctagcaagcctcgctaacctcgccttaccccccactattaacctactgggagaactctctgtgctagtaaccacgttctcctgatcaaatatcactctcctacttacaggactcaacatactagtcacagccctatactccctctacatatttaccacaacacaatggggctcactcacccaccacattaacaacataaaaccctcattcacacgagaaaacaccctcatgttcatacacctatcccccattctcctcctatccctcaaccccgacatcattaccgggttttcctcttgtaaatatagtttaaccaaaacatcagattgtgaatctgacaacagaggcttacgaccccttatttaccgagaaagctcacaagaactgctaactcatgcccccatgtctaacaacatggctttctcaacttttaaaggataacagctatccattggtcttaggccccaaaaattttggtgcaactccaaataaaagtaataaccatgcacactactataaccaccctaaccctgacttccctaattccccccatccttaccaccctcgttaaccctaacaaaaaaaactcatacccccattatgtaaaatccattgtcgcatccacctttattatcagtctcttccccacaacaatattcatgtgcctagaccaagaagttattatctcgaactgacactgagccacaacccaaacaacccagctctccctaagcttcaaactagactacttctccataatattcatccctgtagcattgttcgttacatggtccatcatagaattctcactgtgatatataaactcagacccaaacattaatcagttcttcaaatatctactcatcttcctaattaccatactaatcttagttaccgctaacaacctattccaactgttcatcggctgagagggcgtaggaattatatccttcttgctcatcagttgatgatacgcccgagcagatgccaacacagcagccattcaagcaatcctatacaaccgtatcggcgatatcggtttcatcctcgccttagcatgatttatcctacactccaactcatgagacccacaacaaatagcccttctaaacgctaatccaagcctcaccccactactaggcctcctcctagcagcagcaggcaaatcagcccaattaggtctccacccctgactcccctcagccatagaaggccccaccccagtctcagccctactccactcaagcactatagttgtagcaggaatcttcttactcatccgcttccaccccctagcagaaaatagcccactaatccaaactctaacactatgcttaggcgctatcaccactctgttcgcagcagtctgcgcccttacacaaaatgacatcaaaaaaatcgtagccttctccacttcaagtcaactaggactcataatagttacaatcggcatcaaccaaccacacctagcattcctgcacatctgtacccacgccttcttcaaagccatactatttatgtgctccgggtccatcatccacaaccttaacaatgaacaagatattcgaaaaataggaggactactcaaaaccatacctctcacttcaacctccctcaccattggcagcctagcattagcaggaatacctttcctcacaggtttctactccaaagaccacatcatcgaaaccgcaaacatatcatacacaaacgcctgagccctatctattactctcatcgctacctccctgacaagcgcctatagcactcgaataattcttctcaccctaacaggtcaacctcgcttccccacccttactaacattaacgaaaataaccccaccctactaaaccccattaaacgcctggcagccggaagcctattcgcaggatttctcattactaacaacatttcccccgcatcccccttccaaacaacaatccccctctacctaaaactcacagccctcgctgtcactttcctaggacttctaacagccctagacctcaactacctaaccaacaaacttaaaataaaatccccactatgcacattttatttctccaacatactcggattctaccctagcatcacacaccgcacaatcccctatctaggccttcttacgagccaaaacctgcccctactcctcctagacctaacctgactagaaaagctattacctaaaacaatttcacagcaccaaatctccacctccatcatcacctcaacccaaaaaggcataattaaactttacttcctctctttcttcttcccactcatcctaaccctactcctaatcacataacctattcccccgagcaatctcaattacaatatatacaccaacaaacaatgttcaaccagtaactactactaatcaacgcccataatcatacaaagcccccgcaccaataggatcctcccgaatcaaccctgacccctctccttcataaattattcagcttcctacactattaaagtttaccacaaccaccaccccatcatactctttcacccacagcaccaatcctacctccatcgctaaccccactaaaacactcaccaagacctcaacccctgacccccatgcctcaggatactcctcaatagccatcgctgtagtatatccaaagacaaccatcattccccctaaataaattaaaaaaactattaaacccatataacctcccccaaaattcagaataataacacacccgaccacaccgctaacaatcaatactaaacccccataaataggagaaggcttagaagaaaaccccacaaaccccattactaaacccacactcaacagaaacaaagcatacatcattattctcgcacggactacaaccacgaccaatgatatgaaaaaccatcgttgtatttcaactacaagaacaccaatgaccccaatacgcaaaactaaccccctaataaaattaattaaccactcattcatcgacctccccaccccatccaacatctccgcatgatgaaacttcggctcactccttggcgcctgcctgatcctccaaatcaccacaggactattcctagccatgcactactcaccagacgcctcaaccgccttttcatcaatcgcccacatcactcgagacgtaaattatggctgaatcatccgctaccttcacgccaatggcgcctcaatattctttatctgcctcttcctacacatcgggcgaggcctatattacggatcatttctctactcagaaacctgaaacatcggcattatcctcctgcttgcaactatagcaacagccttcataggctatgtcctcccgtgaggccaaatatcattctgaggggccacagtaattacaaacttactatccgccatcccatacattgggacagacctagttcaatgaatctgaggaggctactcagtagacagtcccaccctcacacgattctttacctttcacttcatcttgcccttcattattgcagccctagcagcactccacctcctattcttgcacgaaacgggatcaaacaaccccctaggaatcacctcccattccgataaaatcaccttccacccttactacacaatcaaagacgccctcggcttacttctcttccttctctccttaatgacattaacactattctcaccagacctcctaggcgacccagacaattataccctagccaaccccttaaacacccctccccacatcaagcccgaatgatatttcctattcgcctacacaattctccgatccgtccctaacaaactaggaggcgtccttgccctattactatccatcctcatcctagcaataatccccatcctccatatatccaaacaacaaagcataatatttcgcccactaagccaatcactttattgactcctagccgcagacctcctcattctaacctgaatcggaggacaaccagtaagctacccctttaccatcattggacaagtagcatccgtactatacttcacaacaatcctaatcctaataccaactatctccctaattgaaaacaaaatactcaaatgggcctgtccttgtagtataaactaatacaccagtcttgtaaaccggagatgaaaacctttttccaaggacaaatcagagaaaaagtctttaactccaccattagcacccaaagctaagattctaatttaaactattctctgttctttcatggggaagcagatttgggtaccacccaagtattgactcacccatcaacaaccgctatgtatttcgtacattactgccagccaccatgaatattgtacggtaccataaatacttgaccacctgtagtacataaaaacccaatccacatcaaaaccccctccccatgcttacaagcaagtgcagcaatcaaccctcaactatcacacatcaactgcaactccaaagccacccctcacccactaggataccaacaaacctacccacccttaacagtacatagtacataaagccatttaccgtacatagcacattacagtcaaatcccttctcgtccccatggatgacccccctcagataggggtcccttgaccaccatcctccgtgaaatcaatatcccgcacaagagtgctactctcctcgctccgggcccataacacttgggggtagctaaagtgaactgtatccgacatctggttcctacttcagggtcataaagcctaaatagcccacacgttccccttaaataagacatcacgatg

SEQ ID NO: 211 - DNA, 16567 bp, Homo sapiens mitochondrial
  3105: "n" refers to a nucleotide at position 3107 of the Cambridge Reference Sequence (CRS, Anderson et al. 1981 Nature 290:457-465), later determined to be absent from the human mtDNA sequence according to the revised CRS (rCRS, Andrews et al. 1999 Nature Genetics 23:147); "n" therefore represents a single nucleotide deletion at a position corresponding to nucleotide 3107 of SEQ ID NO:1 as provided herein.
gatcacaggtctatcaccctattaaccactcacgggagctctccatgcatttggtattttcgtctggggggtgtgcacgcgatagcattgcgagacgctggagccggagcaccctatgtcgcagtatctgtctttgattcctgcctcatcctattatttatcgcacctacgttcaatattacaggcgaacatacttactaaagtgtgttaattaattaatgcttgtaggacataataataacaattgatgtctgcacagccgctttccacacagacatcataacaaaatttccaccaaaccccccctcccccgccttctggccacagcacttaaacacatctctgccaaaccccaaaaacaaagaaccctaacaccagcctaaccagatttcaaattttatcttttggcggtatgcacttttaacagtcaccccccaactaacacattattttcccctcccactcccatactactaatctcatcaacacaacccccgcccatcctacccagcacacacacaccgctgctaaccccataccccgaaccaaccaaaccccaaagacaccccccacagtttatgtagcttacctcctcaaagcaatacactgaaaatgtttagacgggctcacatcaccccataaacaaataggtttggtcctagcctttctattagctcttagtaagattacacatgcaagcatccccgttccagtgagttcaccctctaaatcaccacgatcaaaagggacaagcatcaagcacgcagcaatgcagctcaaaacgcttagcctagccacacccccacgggaaacagcagtgattaacctttagcaataaacgaaagtttaactaagctatactaaccccagggttggtcaatttcgtgccagccaccgcggtcacacgattaacccaagtcaatagaagccggcgtaaagagtgttttagatcaccccctccccaataaagctaaaactcacctgagttgtaaaaaactccagttgacacaaaatagactacgaaagtggctttaacatatctgaacacacaatagctaagacccaaactgggattagataccccactatgcttagccctaaacctcaacagttaaatcaacaaaactgctcgccagaacactacgagccacagcttaaaactcaaaggacctggcggtgcttcatatccctctagaggagcctgttctgtaatcgataaaccccgatcaacctcaccacctcttgctcagcctatataccgccatcttcagcaaaccctgatgaaggctacaaagtaagcgcaagtacccacgtaaagacgttaggtcaaggtgtagcccatgaggtggcaagaaatgggctacattttctaccccagaaaactacgatagcccttatgaaacttaagggtcgaaggtggatttagcagtaaactgagagtagagtgcttagttgaacagggccctgaagcgcgtacacaccgcccgtcaccctcctcaagtatacttcaaaggacatttaactaaaacccctacgcatttatatagaggagacaagtcgtaacatggtaagtgtactggaaagtgcacttggacgaaccagagtgtagcttaacacaaagcacccaacttacacttaggagatttcaacttaacttgaccgctctgagctaaacctagccccaaacccactccaccttactaccagacaaccttagccaaaccatttacccaaataaagtataggcgatagaaattgaaacctggcgcaatagatatagtaccgcaagggaaagatgaaaaattataaccaagcataatatagcaaggactaacccctataccttctgcataatgaattaactagaaataactttgcaaggagaaccaaagctaagacccccgaaaccagacgagctacctaagaacagctaaaagagcacacccgtctatgtagcaaaatagtgggaagatttataggtagaggcgacaaacctaccgagcctggtgatagctggttgtccaagatagaatcttagttcaactttaaatttgcccacagaaccctctaaatccccttgtaaatttaactgttagtccaaagaggaacagctctttggacactaggaaaaaaccttgtagagagagtaaaaaatttaacacccatagtaggcctaaaagcagccaccaattaagaaagcgttcaagctcaacacccactacctaaaaaatcccaaacatataactgaactcctcacacccaattggaccaatctatcaccctatagaagaactaatgttagtataagtaacatgaaaacattctcctccgcataagcctgcgtcagattaaaacactgaactgacaattaacagcccaatatctacaatcaaccaacaagtcattattaccctcactgtcaacccaacacaggcatgctcataaggaaaggttaaaaaaagtaaaaggaactcggcaaatctcaccccgcctgtttaccaaaaacatcacctctagcatcaccagtattagaggcaccgcctgcccagtgacacatgtttaacggccgcggtaccctaaccgtgcaaaggtagcataatcacttgttccttaaatagggacctgtatgaatggctccacgagggttcagctgtctcttacttttaaccagtgaaattgacctgcccgtgaagaggcgggcatgacacagcaagacgagaagaccctatggagctttaatttattaatgcaaacagtacctaacaaacccacaggtcctaaactaccaaacctgcattaaaaatttcggttggggcgacctcggagcagaacccaacctccgagcagtacatgctaagacttcaccagtcaaagcgaactactatactcaattgatccaataacttgaccaacggaacaagttaccctagggataacagcgcaatcctattctagagtccatatcaacaatagggtttacgacctcgatgttggatcaggacatcccgatggtgcagccgctattaaaggttcgtttgttcaacgattaaagtcctacgtgatctgagttcagaccggagtaatccaggtcggtttctatctacnttcaaattcctccctgtacgaaaggacaagagaaataaggcctacttcacaaagcgccttcccccgtaaatgatatcatctcaacttagtattatacccacacccacccaagaacagggtttgttaagatggcagagcccggtaatcgcataaaacttaaaactttacagtcagaggttcaattcctcttcttaacaacatacccatggccaacctcctactcctcattgtacccattctaatcgcaatggcattcctaatgcttaccgaacgaaaaattctaggctatatacaactacgcaaaggccccaacgttgtaggcccctacgggctactacaacccttcgctgacgccataaaactcttcaccaaagagcccctaaaacccgccacatctaccatcaccctctacatcaccgccccgaccttagctctcaccatcgcacttctactatgaacccccctccccatacccaaccccctggtcaacctcaacctaggcctcctatttattctagccacctctagcctagccgtttactcaatcctctgatcagggtgagcatcaaactcaaactacgccctgatcggcgcactgcgagcagtagcccaaacaatctcatatgaagtcaccctagccatcattctactatcaacattactaataagtggctcctttaacctctccacccttatcacaacacaagaacacctctgattactcctgccatcatgacccttggccataatatgatttatctccacactagcagagaccaaccgaacccccttcgaccttgccgaaggggagtccgaactagtctcaggcttcaacatcgaatacgccgcaggccccttcgccctattcttcatagccgaatacacaaacattattataataaacaccctcaccactacaatcttcctaggaacaacatatgacgcactctcccctgaactctacacaacatattttgtcaccaagaccctacttctaacctccctgttcttatgaattcgaacagcatacccccgattccgctacgaccaactcatacacctcctatgaaaaaacttcctaccactcaccctagcattacttatatgatatgtctccatacccattacaatctccagcattccccctcaaacctaagaaatatgtctgataaaagagttactttgatagagtaaataataggagctttaacccccttatttctaggactatgagaatcgaacccatccctgagaatccaaaattctccgtgccacctatcacaccccatcctaaagtaaggtcagctaaataagctatcgggcccataccccgaaaatgttggttatacccttcccgtactaattaatcccctggcccaacccgtcatctactctaccatctttgcaggcacactcatcacagcgctaagctcgcactgattttttacctgagtaggcctagaaataaacatgctagcttttattccagttctaaccaaaaaaataaaccctcgttccacagaagctgccatcaagtatttcctcacgcaagcaaccgcatccataatccttctaatagctatcctcttcaacaatatactctccgggcaatgaaccataaccaatactaccaatcaatactcatcattaataatcataatggctatagcaataaaactaggaatagccccctttcacttctgagtcccagaggttacccaaggcacccctctgacatccggcctgcttcttctcacatgacaaaaactagcccccatctcaatcatataccaaatctctccctcactaaacgtaagccttctcctcactctctcaatcttatccatcatagcaggcagttgaggtggattaaaccaaacccagctacgcaaaatcttagcatactcctcaattacccacataggatgaataatagcagttctaccgtacaaccctaacataaccattcttaatttaactatttatattatcctaactactaccgcattcctactactcaacttaaactccagcaccacgaccctactactatctcgcacctgaaacaagctaacatgactaacacccttaattccatccaccctcctctccctaggaggcctgcccccgctaaccggctttttgcccaaatgggccattatcgaagaattcacaaaaaacaatagcctcatcatccccaccatcatagccaccatcaccctccttaacctctacttctacctacgcctaatctactccacctcaatcacactactccccatatctaacaacgtaaaaataaaatgacagtttgaacatacaaaacccaccccattcctccccacactcatcgcccttaccacgctactcctacctatctccccttttatactaataatcttatagaaatttaggttaaatacagaccaagagccttcaaagccctcagtaagttgcaatacttaatttctgtaacagctaaggactgcaaaaccccactctgcatcaactgaacgcaaatcagccactttaattaagctaagcccttactagaccaatgggacttaaacccacaaacacttagttaacagctaagcaccctaatcaactggcttcaatctacttctcccgccgccgggaaaaaaggcgggagaagccccggcaggtttgaagctgcttcttcgaatttgcaattcaatatgaaaatcacctcggagctggtaaaaagaggcctaacccctgtctttagatttacagtccaatgcttcactcagccattttacctcacccccactgatgttcgccgaccgttgactattctctacaaaccacaaagacattggaacactatacctattattcggcgcatgagctggagtcctaggcacagctctaagcctccttattcgagccgagctgggccagccaggcaaccttctaggtaacgaccacatctacaacgttatcgtcacagcccatgcatttgtaataatcttcttcatagtaatacccatcataatcggaggctttggcaactgactagttcccctaataatcggtgcccccgatatggcgtttccccgcataaacaacataagcttctgactcttacctccctctctcctactcctgctcgcatctgctatagtggaggccggagcaggaacaggttgaacagtctaccctcccttagcagggaactactcccaccctggagcctccgtagacctaaccatcttctccttacacctagcaggtgtctcctctatcttaggggccatcaatttcatcacaacaattatcaatataaaaccccctgccataacccaataccaaacgcccctcttcgtctgatccgtcctaatcacagcagtcctacttctcctatctctcccagtcctagctgctggcatcactatactactaacagaccgcaacctcaacaccaccttcttcgaccccgccggaggaggagaccccattctataccaacacctattctgatttttcggtcaccctgaagtttatattcttatcctaccaggcttcggaataatctcccatattgtaacttactactccggaaaaaaagaaccatttggatacataggtatggtctgagctatgatatcaattggcttcctagggtttatcgtgtgagcacaccatatatttacagtaggaatagacgtagacacacgagcatatttcacctccgctaccataatcatcgctatccccaccggcgtcaaagtatttagctgactcgccacactccacggaagcaatatgaaatgatctgctgcagtgctctgagccctaggattcatctttcttttcaccgtaggtggcctgactggcattgtattagcaaactcatcactagacatcgtactacacgacacgtactacgttgtagctcacttccactatgtcctatcaataggagctgtatttgccatcataggaggcttcattcactgatttcccctattctcaggctacaccctagaccaaacctacgccaaaatccatttcactatcatattcatcggcgtaaatctaactttcttcccacaacactttctaggcctatccggaatgccccgacgttactcggactaccccgatgcatacaccacatgaaacatcctatcatctgtaggctcattcatttctctaacagcagtaatattaataattttcatgatttgagaagccttcgcttcgaagcgaaaagtcctaatagtagaagaaccctccataaacctggagtgactatatggatgccccccaccctaccacacattcgaagaacccgtatacataaaatctagacaaaaaaggaaggaatcgaaccccccaaagctggtttcaagccaaccccatggcctccatgactttttcaaaaaggtattagaaaaaccatttcataactttgtcaaagttaaattataggctaaatcctatatatcttaatggcacatgcagcgcaagtaggtctacaagacgctacttcccctatcatagaagagcttatcacctttcatgatcacgccctcataatcattttccttatctgcttcctagtcctgtatgcccttttcctaacactcacaacaaaactaactaatactaacatctcagacgctcaggaaatagaaaccgtctgaactatcctgcccgccatcatcctagtcctcatcgccctcccatccctacgcatcctttacataacagacgaggtcaacgatccctcccttaccatcaaatcaattggccaccaatggtactgaacctacgagtacaccgactacggcggactaatcttcaactcctacatacttcccccattattcctagaaccaggcgacctgcgactccttgacgttgacaatcgagtagtactcccgattgaagcccccattcgtataataattacatcacaagacgtcttgcactcatgagctgtccccacattaggcttaaaaacagatgcaattcccggacgtctaaaccaaaccactttcaccgctacacgaccgggggtatactacggtcaatgctctgaaatctgtggagcaaaccacagtttcatgcccatcgtcctagaattaattcccctaaaaatctttgaaatagggcccgtatttaccctatagcaccccctctaccccctctagagcccactgtaaagctaacttagcattaaccttttaagttaaagattaagagaaccaacacctctttacagtgaaatgccccaactaaatactaccgtatggcccaccataattacccccatactccttacactattcctcatcacccaactaaaaatattaaacacaaactaccacctacctccctcaccaaagcccataaaaataaaaaattataacaaaccctgagaaccaaaatgaacgaaaatctgttcgcttcattcattgcccccacaatcctaggcctacccgccacagtactgatcattctatttccccctctattgatccccacctccaaatatctcatcaacaaccgactaatcaccacccaacaatgactaatcaaactaacctcaaaacaaatgatagccatacacaacactaaaggacgaacctgatctcttatactagtatccttaatcatttttattgccacaactaacctcctcggactcctgcctcactcatttacaccaaccacccaactatctataaacctagccatggccatccccttatgagcgggcgcagtgattataggctttcgctctaagattaaaaatgccctagcccacttcttaccacaaggcacacctacaccccttatccccatactagttattatcgaaaccatcagcctactcattcaaccaatagccctggccgtacgcctaaccgctaacattactgcaggccacctactcatgcacctaattggaagcgccaccctagcaatatcaaccattaaccttccctctacacttatcatcttcacaattctaattctactgactatcctagaaatcgctgtcgccttaatccaagcctacgttttcacacttctagtaagcctctacctgcacgacaacacataatgacccaccaatcacatgcctatcatatagtaaaacccagcccatgacccctaacaggggccctctcagccctcctaatgacctccggcctagccatgtgatttcacttccactccataacgctcctcatactaggcctactaaccaacacactaaccatataccaatgatggcgcgatgtaacacgagaaagcacataccaaggccaccacacaccacctgtccaaaaaggccttcgatacgggataatcctatttattacctcagaagtttttttcttcgcaggatttttctgagccttttaccactccagcctagcccctaccccccaactaggggggcactggcccccaacaggcatcaccccgctaaatcccctagaagtcccactcctaaacacatccgtattactcgcatcaggagtatcaatcacctgagctcaccatagtctaatagaaaacaaccgaaaccaaataattcaagcactgcttattacaattttactgggtctctattttaccctcctacaagcctcagagtacttcgagtctcccttcaccatttccgacggcatctacggctcaacattttttgtagccacaggcttccacggacttcacgtcattattggctcaactttcctcactatctgcttcatccgccaactaatatttcactttacatccaaacatcactttggcttcgaagccgccgcctgatactggcattttgtagatgtggtttgactatttctgtatgtctccatctattgatgagggtcttactcttttagtataaatagtaccgttaacttccaattaactagttttgacaacattcaaaaaagagtaataaacttcgccttaattttaataatcaacaccctcctagccttactactaataattattacattttgactaccacaactcaacggctacatagaaaaatccaccccttacgagtgcggcttcgaccctatatcccccgcccgcgtccctttctccataaaattcttcttagtagctattaccttcttattatttgatctagaaattgccctccttttacccctaccatgagccctacaaacaactaacctgccactaatagttatgtcatccctcttattaatcatcatcctagccctaagtctggcctatgagtgactacaaaaaggattagactgagctgaattggtatatagtttaaacaaaacgaatgatttcgactcattaaattatgataatcatatttaccaaatgcccctcatttacataaatattatactagcatttaccatctcacttctaggaatactagtatatcgctcacacctcatatcctccctactatgcctagaaggaataatactatcgctgttcattatagctactctcataaccctcaacacccactccctcttagccaatattgtgcctattgccatactagtctttgccgcctgcgaagcagcggtgggcctagccctactagtctcaatctccaacacatatggcctagactacgtacataacctaaacctactccaatgctaaaactaatcgtcccaacaattatattactaccactgacatgactttccaaaaaacacataatttgaatcaacacaaccacccacagcctaattattagcatcatccccctactattttttaaccaaatcaacaacaacctatttagctgttccccaaccttttcctccgaccccctaacaacccccctcctaatactaactacctgactcctacccctcacaatcatggcaagccaacgccacttatccagtgaaccactatcacgaaaaaaactctacctctctatactaatctccctacaaatctccttaattataacattcacagccacagaactaatcatattttatatcttcttcgaaaccacacttatccccaccttggctatcatcacccgatgaggcaaccagccagaacgcctgaacgcaggcacatacttcctattctacaccctagtaggctcccttcccctactcatcgcactaatttacactcacaacaccctaggctcactaaacattctactactcactctcactgcccaagaactatcaaactcctgagccaacaacttaatatgactagcttacacaatagcttttatagtaaagatacctctttacggactccacttatgactccctaaagcccatgtcgaagcccccatcgctgggtcaatagtacttgccgcagtactcttaaaactaggcggctatggtataatacgcctcacactcattctcaaccccctgacaaaacacatagcctaccccttccttgtactatccctatgaggcataattataacaagctccatctgcctacgacaaacagacctaaaatcgctcattgcatactcttcaatcagccacatagccctcgtagtaacagccattctcatccaaaccccctgaagcttcaccggcgcagtcattctcataatcgcccacggacttacatcctcattactattctgcctagcaaactcaaactacgaacgcactcacagtcgcatcataatcctctctcaaggacttcaaactctactcccactaatagctttttgatgacttctagcaagcctcgctaacctcgccttaccccccactattaacctactgggagaactctctgtgctagtaaccacattctcctgatcaaatatcactctcctacttacaggactcaacatactagtcacagccctatactccctctacatatttaccacaacacaatggggctcactcacccaccacattaacaacataaaaccctcattcacacgagaaaacaccctcatgttcatacacctatcccccattctcctcctatccctcaaccccgacatcattaccgggttttcctcttgtaaatatagtttaaccaaaacatcagattgtgaatctgacaacagaggcttacgaccccttatttaccgagaaagctcacaagaactgctaactcatgcccccatgtctaacaacatggctttctcaacttttaaaggataacagctatccattggtcttaggccccaaaaattttggtgcaactccaaataaaagtaataaccatgcacactactataaccaccctaaccctaacttccctaattccccccatccttaccaccctcgttaaccctaacaaaaaaaactcatacccccattatgtaaaatccattgtcgcatccacctttattatcagtctcttccccacaacaatattcatgtgcctagaccaagaagttattatctcgaactgacactgagccacaacccaaacaacccagctctccctaagcttcaaactagactacttctccataatattcatccctgtagcattgttcgttacatggtccatcatagaattctcactgtgatatataaactcagacccaaacattaatcagttcttcaaatatctactcattttcctaattaccatactaatcttagttaccgctaacaacctattccaactgttcatcggctgagagggcgtaggaattatatccttcttgctcatcagttgatgatacgcccgagcagatgccaacacagcagccattcaagcaatcctatacaaccgtatcggcgatatcggtttcatcctcgccttagcatgatttatcctacactccaactcatgagacccacaacaaatagcccttctaaacgctaatccaagcctcaccccactactaggcctcctcctagcagcagcaggcaaatcagcccaattaggtctccacccctgactcccctcagccatagaaggccccaccccagtctcagccctactccactcaagcactatagttgtagcaggaatcttcttactcatccgcttccaccccctagcagaaaatagcccactaatccaaactctaacactatgcttaggcgctatcaccactctgttcgcagcagtctgcgcccttacacaaaatgacatcaaaaaaatcgtagccttctccacttcaagtcagctaggactcataatagttacaatcggcatcaaccaaccacacctagcattcctgcacatctgtacccacgccttcttcaaagccatactatttatgtgctccgggtccatcatccacaaccttaacaatgaacaagatattcgaaaaataggaggactactcaaaaccatacctctcacttcaacctccctcaccattggcagcctagcattagcaggaatacctttcctcacaggtttctactccaaagaccacatcatcgaaaccgcaaacatatcatacacaaacgcctgagccctatctattactctcatcgctacctccctgacaagcgcctatagcactcgaataattcttctcaccctaacaggtcaacctcgcttccccacccttactaacattaacgaaaataaccccaccctactaaaccccattaaacgcctggcagccggaagcctattcgcaggatttctcattactaacaacatttcccccgcatcccccttccaaacaacaatccccctctacctaaaactcacagccctcgctgtcactttcctaggacttctaacagccctagacctcaactacctaaccaacaaacttaaaataaaatccccactatgcacattttatttctccaacatactcggattctaccctagcatcacacaccgcacaatcccctatctaggccttcttacgagccaaaacctgcccctactcctcctagacctaacctgactagaaaagctattacctaaaacaatttcacagcaccaaatctccacctccatcatcacctcaacccaaaaaggcataattaaactttacttcctctctttcttcttcccactcatcctaaccctactcctaatcacataacctattcccccgagcaatctcaattacaatatatacaccaacaaacaatgttcaaccagtaactactactaatcaacgcccataatcatacaaagcccccgcaccaataggatcctcccgaatcaaccctgacccctctccttcataaattattcagcttcctacactactaaagtttaccacaaccaccaccccatcatactctttcacccacagcaccaatcctacctccatcgctaaccccactaaaacactcaccaagacctcaacccctgacccccatgcctcaggatactcctcaatagccatcgctgtagtatatccaaagacaaccatcattccccctaaataaattaaaaaaactattaaacccatataacctcccccaaaattcagaataataacacacccgaccacaccgctaacaatcaatactaaacccccataaataggagaaggcttagaagaaaaccccacaaaccccattactaaacccacactcaacagaaacaaagcatacatcattattctcgcacggactacaaccacgaccaatgatatgaaaaaccatcgttgtatttcaactacaagaacaccaatgaccccaatacgcaaaattagccccctaataaaactaattaaccactcattcatcgacctccccaccccatccaacatctccgcatgatgaaacttcggctcactccttggcgcctgcctgatcctccaaatcaccacaggactattcctagccatgcactactcaccagacgcctcaaccgccttttcatcaatcgcccacatcactcgagacgtaaattatggctgaatcatccgctaccttcacgccaatggcgcctcaatattctttatctgcctcttcctacacatcggacgaggcctatattacggatcatttctctactcaaaaacctgaaacatcggcattatcctcctgcttgcaactataacaacagccttcataggctatgtcctcccgtgaggccaaatatcattctgaggggccacagtaattacaaacttactatccgccatcccatacattgggacagacctagttcaatgaatctgaggaggctactcagtagacagtcccaccctcacacgattctttacctttcacttcatcttacccttcattattgcagccctagcagcactccacctcctattcttgcacgaaacgggatcaaacaaccccctaggaatcacctcccattccgataaaatcaccttccacccttactacacaatcaaagacgccctcggcttacttctcttccttctctccttaatgacattaacactattctcacctgacctcctaggcgacccagacaattataccctagccaaccccttaaacacccctccccacatcaagcccgaatgatatttcctattcgcctacacaattctccgatccgtccctaacaaactaggaggcgtccttgccctattactatccatcctcatcctagcaataatccccatcctccatatatccaaacaacaaagcataatatttcgcccactaagccaatcactttattgactcctagccgcagacctcctcattctaacctgaatcggaggacaaccagtaagctacccttttaccatcattggacaagtagcatccgtactatacttcacaacaatcctaatcctaataccaactatctccctaattgaaaacaaaatactcaaatgggcctgtccttgtagtataaactaatacaccagtcttgtaaaccggaaatgaaaacctttttccaaggacaaatcagagaaaaagtctttaactccaccattagcacccaaagctaagattctaatttaaactattctctgttctttcatggggaagcagatttgggtaccacccaagtattgactcacccatcaacaaccgctatgtatttcgtacattactgccagccaccatgaatattgtacggtaccataaatacttgaccacctgtggtacataaaaacccaatccacatcaaaaccccctccccatgcttacaagcaagtacagcaatcaaccttcaactatcacacatcaactgcaactccaaagccacccctcacccactaggataccaacaaacctacccaccctcaacagtacatagtacataaagccattcatcgtacatagcacattacagtcaaatcccttctcgtccccatggatgacccccctcagataggggtcccttgaccaccatcctccgtgaaatcaatatcccgcacaagagtgctactctcctcgctccgggcccataacacttgggggtagctaaagtgaactgtatccgacatctggttcctacttcagggtcataaagcctaaatagcccacacgttccccttaaataagacatcacgatg

SEQ ID NO: 212 - DNA, 16570 bp, Homo sapiens mitochondrial
  3108: "n" refers to a nucleotide at position 3107 of the Cambridge Reference Sequence (CRS, Anderson et al. 1981 Nature 290:457-465), later determined to be absent from the human mtDNA sequence according to the revised CRS (rCRS, Andrews et al. 1999 Nature Genetics 23:147); "n" therefore represents a single nucleotide deletion at a position corresponding to nucleotide 3107 of SEQ ID NO:1 as provided herein.
gatcacaggtctatcaccctattaaccactcacgggagctctccatgcatttggtattttcgtctggggggtgtgcacgcgatagcattgcgagacgctggagccggagcaccctatgtcgcagtatctgtctttgattcctgcctcattctattatttatcgcacctacgttcaatattacagacgagcatacttactgaagtgtgttaattaattaatgcttgtaggacataataataacaattgaatgtctgcacagccgctttccacacagacatcataacaaaaaatttccaccaaaccccccctcccccgccttctggccacagcacttaaacacatctctgccaaaccccaaaaacaaagaaccctaacaccagcctaaccagatttcaaattttatcttttggcggtatgcacttttaacagtcaccccccaactaacacattattttcccctcccactcccatactactaatctcatcaatacaacccccgcccatcctacccagcacacacacaccgctgctaaccccataccccgaaccaaccaaaccccaaagacaccccccacagtttatgtagcttacctcctcaaagcaatacactgaaaatgtttagacgggctcacatcaccccataaacaaataggtttggtcctagcctttctattagctcttagtaagattacacatgcaagcatccccgttccagtgagttcaccctctaaatcaccacgatcaaaagggacaagcatcaagcacgcagcaatgcagctcaaaacgcttagcctagccacacccccacgggaaacagcagtgattaacctttagcaataaacgaaagtttaactaagctatactaaccccagggttggtcaatttcgtgccagccaccgcggtcacacgattaacccaagtcaatagaagccggcgtaaagagtgttttagatcaccccctccccaataaagctaaaactcacctgagttgtaaaaaactccagttgacacaaaatagactacgaaagtggctttaacatatctgaacacacaatagctaagacccaaactgggattagataccccactatgcttagccctaaacctcaacagttaaatcaacaaaactgctcgccagaacactacgagccacagcttaaaactcaaaggacctggcggtgcttcatatccctctagaggagcctgttctgtaatcgataaaccccgatcaacctcaccacctcttgctcagcctatataccgccatcttcagcaaaccctgatgaaggctacaaagtaagcgcaagtacccacgtaaagacgttaggtcaaggtgtagcccatgaggtggcaagaaatgggctacattttctaccccagaaaactacgatagcccttatgaaacttaagggtcgaaggtggatttagcagtaaactgagagtagagtgcttagttgaacagggccctgaagcgcgtacacaccgcccgtcaccctcctcaagtatacttcaaaggacatttaactaaaacccctacgcatttatatagaggagacaagtcgtaacatggtaagtgtactggaaagtgcacttggacgaaccagagtgtagcttaacacaaagcacccaacttacacttaggagatttcaacttaacttgaccgctctgagctaaacctagccccaaacccactccaccttactaccagacaaccttagccaaaccatttacccaaataaagtataggcgatagaaattgaaacctggcgcaatagatatagtaccgcaagggaaagatgaaaaattataaccaagcataatatagcaaggactaacccctataccttctgcataatgaattaactagaaataactttgcaaggagagccaaagctaagacccccgaaaccagacgagctacctaagaacagctaaaagagcacacccgtctatgtagcaaaatagtgggaagatttataggtagaggcgacaaacctaccgagcctggtgatagctggttgtccaagatagaatcttagttcaactttaaatttgcccacagaaccctctaaatccccttgtaaatttaactgttagtccaaagaggaacagctctttggacactaggaaaaaaccttgtagagagagtaaaaaatttaacacccatagtaggcctaaaagcagccaccaattaagaaagcgttcaagctcaacacccactacctaaaaaatcccaaacatataactgaactcctcacacccaattggaccaatctatcaccctatagaagaactaatgttagtataagtaacatgaaaacattctcctccgcataagcctgcgtcagatcaaaacactgaactgacaattaacagcccaatatctacaatcaaccaacaagtcattattaccctcactgtcaacccaacacaggcatgctcataaggaaaggttaaaaaaagtaaaaggaactcggcaaatcttaccccgcctgtttaccaaaaacatcacctctagcatcaccagtattagaggcaccgcctgcccagtgacacatgtttaacggccgcggtaccctaaccgtgcaaaggtagcataatcacttgttccttaaatagggacctgtatgaatggctccacgagggttcagctgtctcttacttttaaccagtgaaattgacctgcccgtgaagaggcgggcatgacacagcaagacgagaagaccctatggagctttaatttattaatgcaaacagtacctaacaaacccacaggtcctaaactaccaaacctgcattaaaaatttcggttggggcgacctcggagcagaacccaacctccgagcagtacatgctaagacttcaccagtcaaagcgaactactatactcaattgatccaataacttgaccaacggaacaagttaccctagggataacagcgcaatcctattctagagtccatatcaacaatagggtttacgacctcgatgttggatcaggacatcccgatggtgcagccgctattaaaggttcgtttgttcaacgattaaagtcctacgtgatctgagttcagaccggagtaatccaggtcggtttctatctacnttcaaattcctccctgtacgaaaggacaagagaaataaggcctacttcacaaagcgccttcccccgtaaatgatatcatctcaacttagtattatacccacacccacccaagaacagggtttgttaagatggcagagcccggtaatcgcataaaacttaaaactttacagtcagaggttcaattcctcttcttaacaacatacccatggccaacctcctactcctcattgtacccattctaatcgcaatggcattcctaatgcttaccgaacgaaaaattctaggctatatacaactacgcaaaggccccaacgttgtaggcccctacgggctactacaacccttcgctgacgccataaaactcttcaccaaagagcccctaaaacccgccacatctaccatcaccctctacatcaccgccccgaccttagctctcaccatcgctcttctactatgaacccccctccccatacccaaccccctggtcaacctcaacctaggcctcctatttattctagccacctctagcctagccgtttactcaatcctctgatcagggtgagcatcaaactcaaactacgccctgatcggcgcactgcgagcagtagcccaaacaatctcatatgaagtcaccctagccatcattctactatcaacattactaataagtggctcctttaacctctccacccttatcacaacacaagaacacctctgattactcctgccatcatgacccttggccataatatgatttatctccacactagcagagaccaaccgaacccccttcgaccttgccgaaggggagtccgaactagtctcaggcttcaacatcgaatacgccgcaggccccttcgccctattcttcatagccgaatacacaaacattattataataaacaccctcaccactacaatcttcctaggaacaacatatgacgcactctcccctgaactctacacaacatattttgtcaccaagaccctacttctaacctccctgttcttatgaattcgaacagcatacccccgattccgctacgaccaactcatacacctcctatgaaaaaacttcctaccactcaccctagcattacttatatgatatgtctccatacccattacaatctccagcattccccctcaaacctaagaaatatgtctgataaaagagttactttgatagagtaaataataggagcttaaacccccttatttctaggactatgagaatcgaacccatccctgagaatccaaaattctccgtgccacctatcacaccccatcctaaagtaaggtcagctaaataagctatcgggcccataccccgaaaatgttggttatacccttcccgtactaattaatcccctggcccaacccgtcatctactctaccatctttgcaggcacactcatcacagcgctaagctcgcactgattttttacctgagtaggcctagaaataaacatgctagcttttattccagttctaaccaaaaaaataaaccctcgttccacagaagctgccatcaagtatttcctcacgcaagcaaccgcatccataatccttctaatagctatcctcttcaacaatatactctccggacaatgaaccataaccaacactaccaatcaatactcatcattaataatcataatggctatagcaataaaactaggaatagccccctttcacttctgagtcccagaggttacccaaggcacccctctgacatccggcctgcttcttctcacatgacaaaaactagcccccatctcaatcatataccaaatctctccctcactaaacgtaagccttctcctcactctctcaatcttatccatcatagcaggcagttgaggtggattaaaccaaacccagctacgcaaaatcttagcatactcctcaattacccacataggatgaataatagcagttctaccgtacaaccctaacataaccattcttaatttaactatttatattatcctaactactaccgcattcctactactcaacttaaactccagcaccacgaccctactactatctcgcacctgaaacaagctaacatgactaacacccttaattccatccaccctcctctccctaggaggcctgcccccgctaaccggctttttgcccaaatgggccattatcgaagaattcacaaaaaacaatagcctcatcatccccaccatcatagccaccatcaccctccttaacctctacttctacctacgcctaatctactccacctcaatcacactactccccatatctaacaacgtaaaaataaaatgacagtttgaacatacaaaacccaccccattcctccccacactcatcgcccttaccacgctactcctacctatctccccttttatactaataatcttatagaaatttaggttaaatacagaccaagagccttcaaagccctcagtaagttgcaatacttaatttctgtaacagctaaggactgcaaaaccccactctgcatcaactgaacgcaaatcagccactttaattaagctaagcccttactagaccaatgggacttaaacccacaaacacttagttaacagctaagcaccctaatcaactggcttcaatctacttctcccgccgccgggaaaaaaggcgggagaagccccggcaggtttgaagctgcttcttcgaatttgcaattcaatatgaaaatcacctcggagctggtaaaaagaggcctaacccctgtctttagatttacagtccaatgcttcactcagccattttacctcacccccactgatgttcgccgaccgttgactattctctacaaaccacaaagacattggaacactatacctattattcggcgcatgagctggagtcctaggcacagctctaagcctccttattcgagccgagctgggccagccaggcaaccttctaggtaacgaccacatctacaacgttatcgtcacagcccatgcatttgtaataatcttcttcatagtaatacccatcataatcggaggctttggcaactgactagttcccctaataatcggtgcccccgatatggcgtttccccgcataaacaacataagcttctgactcttacccccctctctcctactcctgctcgcatctgctatagtggaggccggagcaggaacaggttgaacagtctaccctcccttagcagggaactactcccaccctggagcctccgtagacctaaccatcttctccttacacctagcaggtgtctcctctatcttaggggccatcaatttcatcacaacaattatcaatataaaaccccctgccataacccaataccaaacgcccctcttcgtctgatccgtcctaatcacagcagtcctacttctcctatctctcccagtcctagctgctggcatcactatactactaacagaccgcaacctcaacaccaccttcttcgaccccgccggaggaggagaccctattctataccaacacctattctgatttttcggtcaccctgaagtttatattcttatcctaccaggcttcggaataatctcccatattgtaacttactactccggaaaaaaagaaccatttggatacataggtatggtctgagctatgatatcaattggcttcctagggtttatcgtgtgagcacaccatatatttacagtaggaatagacgtagacacacgagcatatttcacctccgctaccataatcatcgctatccccaccggcgtcaaagtatttagctgactcgccacactccacggaagcaatatgaaatgatctgctgcagtgctctgagccctaggattcatctttcttttcaccgtaggtggcctgactggcattgtattagcaaactcatcactagacatcgtactacacgacacgtactacgttgtagctcacttccactatgtcctatcaataggagctgtatttgccatcataggaggcttcattcactgatttcccctattctcaggctacaccctagaccaaacctacgccaaaatccatttcactatcatattcatcggcgtaaatctaactttcttcccacaacactttctcggcctatccggaatgccccgacgttactcggactaccccgatgcatacaccacatgaaacatcctatcatctgtaggctcattcatttctctaacagcagtaatattaataattttcatgatttgagaagccttcgcttcgaagcgaaaagtcctaatagtagaagaaccctccataaacctggagtgactatatggatgccccccaccctaccacacattcgaagaacccgtatacataaaatctagacaaaaaaggaaggaatcgaaccccccaaagctggtttcaagccaaccccatggcctccatgactttttcaaaaaggtattagaaaaaccatttcataactttgtcaaagttaaattataggctaaatcctatatatcttaatggcacatgcagcgcaagtaggtctacaagacgctacttcccctatcatagaagagcttatcacctttcatgatcacgccctcataatcattttccttatctgcttcctagtcctgtatgcccttttcctaacactcacaacaaaactaactaatactaacatctcagacgctcaggaaatagaaaccgtctgaactatcctgcccgccatcatcctagtcctcatcgccctcccatccctacgcatcctttacataacagacgaggtcaacgatccctcccttaccatcaaatcaattggccaccaatggtactgaacctacgagtacaccgactacggcggactaatcttcaactcctacatacttcccccattattcctagaaccaggcgacctgcgactccttgacgttgacaatcgagtagtactcccgattgaagcccccattcgtataataattacatcacaagacgtcttgcactcatgagctgtccccacattaggcttaaaaacagatgcaattcccggacgtctaaaccaaaccactttcaccgctacacgaccgggggtatactacggtcaatgctctgaaatctgtggagcaaaccacagtttcatgcccatcgtcctagaattaattcccctaaaaatctttgaaatagggcccgtatttaccctatagcaccccctctaccccctctagagcccactgtaaagctaacttagcattaaccttttaagttaaagattaagagaaccaacacctctttacagtgaaatgccccaactaaatactaccgtatggcccaccataattacccccatactccttacactattcctcatcacccaactaaaaatattaaacacaaactaccacctacctccctcaccaaagcccataaaaataaaaaattataacaaaccctgagaaccaaaatgaacgaaaatctgttcgcttcattcattgcccccacaatcctaggcctacccgccgcagtactgatcattctatttccccctctattgatccccacctccaaatatctcatcaacaaccgattaatcaccacccaacaatgactaatcaaactaacctcaaaacaaatgatagccatacacaacactaaaggacgaacctgatctcttatactagtatccttaatcatttttattgccacaactaacctcctcggactcctgcctcactcatttacaccaaccacccaactatctataaacctagccatggccatccccttatgagcgggcgcagtgattataggctttcgctctaagattaaaaatgccctagcccacttcttaccacaaggcacacctacaccccttatccccatactagttattatcgaaaccatcagcctactcattcaaccaatagccctggccgtacgcctaaccgctaacattactgcaggccacctactcatgcacctaattggaagcgccaccctagcaatatcaaccattaaccttccctctacacttatcatcttcacaattctaattctactgactatcctagaaatcgctgtcgccttaatccaagcctacgttttcacacttctagtaagcctctacctgcacgacaacacataatgacccaccaatcacatgcctatcatatagtaaaacccagcccatgacccctaacaggggccctctcagccctcctaatgacctccggcctagccatgtgatttcacttccactccataacgctcctcatactaggcctactaaccaacacactaaccatataccaatgatggcgcgatgtaacacgagaaagcacataccaaggccaccacacaccacctgtccaaaaaggccttcgatacgggataatcctatttattacctcagaagtttttttcttcgcaggatttttctgagccttttaccactccagcctagcccctaccccccaactaggagggcactggcccccaacaggcatcaccccgctaaatcccctagaagtcccactcctaaacacatccgtattactcgcatcaggagtatcaatcacctgagctcaccatagtctaatagaaaacaaccgaaaccaaataattcaagcactgcttattacaattttactgggtctctattttaccctcctacaagcctcagagtacttcgagtctcccttcaccatttccgacggcatctacggctcaacattttttgtagccacaggcttccacggacttcacgtcattattggctcaactttcctcactatctgcttcatccgccaactaatatttcactttacatccaaacatcactttggcttcgaagccgccgcctgatactggcattttgtagatgtggtttgactatttctgtatgtctccatctattgatgagggtcttactcttttagtataaatagtaccgttaacttccaattaactagttttgacaacattcaaaaaagagtaataaacttcgccttaattttaataatcaacaccctcctagccttactactaataattattacattttgactaccacaactcaacggctacatagaaaaatccaccccttacgagtgcggcttcgaccctatatcccccgcccgcgtccctttctccataaaattcttcttagtagctattaccttcttattatttgatctagaaattgccctccttttacccctaccatgagccctacaaacaactaacctgccactaatagttatgtcatccctcttattaatcatcatcctagccctaagtctggcctatgagtgactacaaaaaggattagactgagccgaattggtatatagtttaaacaaaacgaatgatttcgactcattaaattatgataatcatatttaccaaatgcccctcatttacataaatattatactagcatttaccatctcacttctaggaatactagtatatcgctcacacctcatatcctccctactatgcctagaaggaataatactatcgctgttcattatagctactctcataaccctcaacacccactccctcttagccaatattgtgcctattgccatactagtctttgccgcctgcgaagcagcggtgggcctagccctactagtctcaatctccaacacatatggcctagactacgtacataacctaaacctactccaatgctaaaactaatcgtcccaacaattatattactaccactgacatgactttccaaaaagcacataatttgaatcaacacaaccacccacagcctaattattagcatcatccccctactattttttaaccaaatcaacaacaacctatttagctgttccccaaccttttcctccgaccccctaacaacccccctcctaatactaactacctgactcctacccctcacaatcatggcaagccaacgccacttatccagtgaaccactatcacgaaaaaaactctacctctctatactaatctccctacaaatctccttaattataacattcacagccacagaactaatcatattttatatcttcttcgaaaccacacttatccccaccttggctatcatcacccgatgaggcaaccagccagaacgcctgaacgcaggcacatacttcctattctacaccctagtaggctcccttcccctactcatcgcactaatttacactcacaacaccctaggctcactaaacattctactactcactctcactgcccaagaactatcaaactcctgagccaacaacttaatatgactagcttacacaatagcttttatagtaaagatacctctttacggactccacttatgactccctaaagcccatgtcgaagcccccatcgctgggtcaatagtacttgccgcagtactcttaaaactaggcggctatggtataatacgcctcacactcattctcaaccccctgacaaaacacatagcctaccccttccttgtactatccctatgaggcataattataacaagctccatctgcctacgacaaacagacctaaaatcgctcattgcatactcttcaatcagccacatagccctcgtagtaacagccattctcatccaaaccccctgaagcttcaccggcgcagtcattctcataatcgcccacggacttacatcctcattactattctgcctagcaaactcaaactacgaacgcactcacagtcgcatcataatcctctctcaaggacttcaaactctactcccactaatagctttttgatgacttctagcaagcctcgctaacctcgccttaccccccactattaacctactgggagaactctctgtgctagtaaccacgttctcctgatcaaatatcactctcctacttacaggactcaacatactagtcacagccctatactccctctacatatttaccacaacacaatggggctcactcacccaccacattaacaacataaaaccctcattcacacgagaaaacaccctcatgttcatacacctatcccccattctcctcctatccctcaaccccgacatcattaccgggttttcctcttgtaaatatagtttaaccaaaacatcagattgtgaatctgacaacagaggcttacgaccccttatttaccgagaaagctcacaagaactgctaactcatgcccccatgtctaacaacatggctttctcaacttttaaaggataacagctatccattggtcttaggccccaaaaattttggtgcaactccaaataaaagtaataaccatgcacactactataaccaccctaaccctgacttccctaattccccccatccttaccaccctcgttaaccctaacaaaaaaaactcatacccccattatgtaaaatccattgtcgcatccacctttattatcagtctcttccccacaacaatattcatgtgcctagaccaagaagttattatctcgaactgacactgagccacaacccaaacaacccagctctccctaagcttcaaactagactacttctccataatattcatccctgtagcattgttcgttacatggtccatcatagaattctcactgtgatatataaactcagacccaaacattaatcagttcttcaaatatctactcattttcctaattaccatactaatcttagttaccgctaacaacctattccaactgttcatcggctgagagggcgtaggaattatatccttcttgctcatcagttgatgatacgcccgagcagatgccaacacagcagccattcaagcaatcctatacaaccgtatcggcgatatcggtttcatcctcgccttagcatgatttatcctacactccaactcatgagacccacaacaaatagcccttctaaacgctaatccaagcctcaccccactactaggcctcctcctagcagcagcaggcaaatcagcccaattaggtctccacccctgactcccctcagccatagaaggccccaccccagtctcagccctactccactcaagcactatagttgtagcaggaatcttcttactcatccgcttccaccccctagcagaaaatagcccactaatccaaactctaacactatgcttaggcgctatcaccactctgttcgcagcagtctgcgcccttacacaaaatgacatcaaaaaaatcgtagccttctccacttcaagtcaactaggactcataatagttacaatcggcatcaaccaaccacacctagcattcctgcacatctgtacccacgccttcttcaaagccatactatttatgtgctccgggtccatcatccacaaccttaacaatgaacaagatattcgaaaaataggaggactactcaaaaccatacctctcacttcaacctccctcaccattggcagcctagcattagcaggaatacctttcctcacaggtttctactccaaagaccacatcatcgaaaccgcaaacatatcatacacaaacgcctgagccctatctattactctcatcgctacctccctgacaagcgcctatagcactcgaataattcttctcaccctaacaggtcaacctcgcttccccacccttactaacattaacgaaaataaccccaccctactaaaccccattaaacgcctggcagccggaagcctattcgcaggatttctcattactaacaacatttcccccgcatcccccttccaaacaacaatccccctctacctaaaactcacagccctcgctgtcactttcctaggacttctaacagccctagacctcaactacctaaccaacaaacttaaaataaaatccccactatgcacattttatttctccaacatactcggattctaccctagcatcacacaccgcacaatcccctatctaggccttcttacgagccaaaacctgcccctactcctcctagacctaacctgactagaaaagctattacctaaaacaatttcacagcaccaaatctccacctccatcatcacctcaacccaaaaaggcataattaaactttacttcctctctttcttcttcccactcatcctaaccctactcctaatcacataacctgttcccccgagcaatctcaattacaatatatacaccaacaaacaatgttcaaccagtaaccactactaatcaacgcccataatcatacaaagcccccgcaccaataggatcctcccgaatcaaccctgacccctctccttcataaattattcagcttcctacactattaaagtttaccacaaccaccaccccatcatactctttcacccacagcaccaatcctacctccatcgctaaccccactaaaacactcaccaagacctcaacccctgacccccatgcctcaggatactcctcaatagccatcgctgtagtatatccaaagacaaccatcattccccctaaataaattaaaaaaactattaaacccatataacctcccccaaaattcagaataataacacacccgaccacaccgctaacaatcaatactaaacccccataaataggagaaggcttagaagaaaaccccacaaaccccattactaaacccacactcaacagaaacaaagcatacatcattattctcgcacggactacaaccacgaccaatgatatgaaaaaccatcgttgtatttcaactacaagaacaccaatgaccccaatacgcaaaattaaccccctaataaaattaattaaccactcattcatcgacctccccaccccatccaacatctccgcatgatgaaacttcggctcactccttggcgcctgcctgatcctccaaatcaccacaggactattcctagccatgcactactcaccagacgcctcaaccgccttttcatcaatcgcccacatcactcgagacgtaaattatggctgaatcatccgctaccttcacgccaatggcgcctcaatattctttatctgcctcttcctacacatcgggcgaggcctatattacggatcatttctctactcagaaacctgaaacatcggcattatcctcctgcttgcaactatagcaacagccttcataggctatgtcctcccgtgaggccaaatatcattctgaggggccacagtaattacaaacttactatccgccatcccatacattgggacagacctagttcaatgaatctgaggaggctactcagtagacagtcccaccctcacacgattctttacctttcacttcatcttacccttcattattgcagccctagcagcactccacctcctattcttgcacgaaacgggatcaaacaaccccctaggaatcacctcccattccgataaaatcaccttccacccttactacacaatcaaagacgccctcggcttacttctcttccttctctccttaatgacattaacactattctcaccagacctcctaggcgacccagacaattataccctagccaaccccttaaacacccctccccacatcaagcccgaatgatatttcctattcgcctacacaattctccgatccgtccctaacaaactaggaggcgtccttgccctattactatccatcctcatcctagcaataatccccatcctccacatatccaaacaacaaagcataatatttcgcccactaagccaatcactttattgactcctagccgcagacctcctcattctaacctgaatcggaggacaaccagtaagctacccttttaccatcattggacaagtagcatccgtactatacttcacaacaatcctaatcctaataccaactatctccctaattgaaaacaaaatactcaaatgggcctgtccttgtagtataaactaatacaccagtcttgtaaaccggagatgaaaaccttcttccaaggacaaatcagagaaaaagtctttaactccaccattagcacccaaagctaagattctaatttaaactattctctgttctttcatggggaagcagatttgggtaccacccaagtattgactcacccatcaacaaccgctatgtatttcgtacattactgccagccaccatgaatattgtacggtaccataaatacttgaccacctgtagtacataaaaacccaatccacatcaaaactccctccccatgcttacaagcaagtacagcaatcaaccttcaactatcacacatcaactgcaactccaaagccacccctcacccactaggataccaacaaacctacccacccttaacagtacatagcacataaagccatttatcgtacatagcacattacagtcaaatcccttctcgtccccatggatgacccccctcagataggggtcccttgaccaccatcctccgtgaaatcaatatcccgcacaagagtgctactctcctcgctccgggcccataacacttgggggtagctaaagtgaactgtatccgacatctggttcctacttcagggtcataaagcctaaatagcccacacgttccccttaaataagacatcacgatg

SEQ ID NO: 213 - DNA, 16570 bp, Homo sapiens mitochondrial
  3108: "n" refers to a nucleotide at position 3107 of the Cambridge Reference Sequence (CRS, Anderson et al. 1981 Nature 290:457-465), later determined to be absent from the human mtDNA sequence according to the revised CRS (rCRS, Andrews et al. 1999 Nature Genetics 23:147); "n" therefore represents a single nucleotide deletion at a position corresponding to nucleotide 3107 of SEQ ID NO:1 as provided herein.
gatcacaggtctatcaccctattaaccactcacgggagctctccatgcatttggtattttcgtctggggggtgtgcacgcgatagcattgcgagacgctggagccggagcaccctatgtcgcagtatctgtctttgattcctgcctcatcctattatttatcgcacctacgttcaatattacaggcgaacatacttactaaagtgtgttaattaattaatgcttgtaggacataataataacaattgaatgtctgcacagccgctttccacacagacatcataacaaaaaatttccaccaaaccccccctcccccgccttctggccacagcacttaaacacatctctgccaaaccccaaaaacaaagaaccctaacaccagcctaaccagatttcaaattttatcttttggcggtatgcacttttaacagtcaccccccaactaacacattattttcccctcccactcccatactactaatctcatcaacacaacccccgcccatcctacccagcacacacacaccgctgctaaccccataccccgaaccaaccaaaccccaaagacaccccccacagtttatgtagcttacctcctcaaagcaatacactgaaaatgtttagacgggctcacatcaccccataaacaaataggtttggtcctagcctttctattagctcttagtaagattacacatgcaagcatccccgttccagtgagttcaccctctaaatcaccacgatcaaaagggacaagcatcaagcacgcagcaatgcagctcaaaacgcttagcctagccacacccccacgggaaacagcagtgattaacctttagcaataaacgaaagtttaactaagctatactaaccccagggttggtcaatttcgtgccagccaccgcggtcacacgattaacccaagtcaatagaagccggcgtaaagagtgttttagatcaccccctccccaataaagctaaaactcacctgagttgtaaaaaactccagttgacacaaaatagactacgaaagtggctttaacatatctgaacacacaatagctaagacccaaactgggattagataccccactatgcttagccctaaacctcaacagttaaatcaacaaaactgctcgccagaacactacgagccacagcttaaaactcaaaggacctggcggtgcttcatatccctctagaggagcctgttctgtaatcgataaaccccgatcaacctcaccacctcttgctcagcctatataccgccatcttcagcaaaccctgatgaaggctacaaagtaagcgcaagtacccacgtaaagacgttaggtcaaggtgtagcccatgaggtggcaagaaatgggctacattttctaccccagaaaactacgatagcccttatgaaacttaagggtcgaaggtggatttagcagtaaactgagagtagagtgcttagttgaacagggccctgaagcgcgtacacaccgcccgtcaccctcctcaagtatacttcaaaggacatttaactaaaacccctacgcatttatatagaggagacaagtcgtaacatggtaagtgtactggaaagtgcacttggacgaaccagagtgtagcttaacacaaagcacccaacttacacttaggagatttcaacttaacttgaccgctctgagctaaacctagccccaaacccactccaccttactaccagacaacctcagccaaaccatttacccaaataaagtataggcgatagaaattgaaacctggcgcaatagatatagtaccgcaagggaaagatgaaaaattataaccaagcataatatagcaaggactaacccctataccttctgcataatgaattaactagaaataactttgcaaggagagccaaagctaagacccccgaaaccagacgagctacctaagaacagctaaaagagcacacccgtctatgtagcaaaatagtgggaagatttataggtagaggcgacaaacctaccgagcctggtgatagctggttgtccaagatagaatcttagttcaactttaaatttgcccacagaaccctctaaatccccttgtaaatttaactgttagtccaaagaggaacagctctttggacactaggaaaaaaccttgtagagagagtaaaaaatttaacacccatagtaggcctaaaagcagccaccaattaagaaagcgttcaagctcaacacccactacctaaaaaatcccaaacatataactgaactcctcacacccaattggaccaatctatcaccctatagaagaactaatgttagtataagtaacatgaaaacattctcctccgcataagcctgcgtcagattaaaacactgaactgacaattaacagcccaatatctacaatcaaccaacaagtcattattaccctcactgtcaacccaacacaggcatgctcataaggaaaggttaaaaaaagtaaaaggaactcggcaaatcttaccccgcctgtttaccaaaaacatcacctctagcatcaccagtattagaggcaccgcctgcccagtgacacatgtttaacggccgcggtaccctaaccgtgcaaaggtagcataatcacttgttccttaaatagggacctgtatgaatggctccacgagggttcagctgtctcttacttttaaccagtgaaattgacctgcccgtgaagaggcgggcatgacacagcaagacgagaagaccctatggagctttaatttattaatgcaaacagtacctaacaaacccacaggtcctaaactaccaaacctgcattaaaaatttcggttggggcgacctcggagcagaacccaacctccgagcagtacatgctaagacttcaccagtcaaagcgaactactatactcaattgatccaataacttgaccaacggaacaagttaccctagggataacagcgcaatcctattctagagtccatatcaacaatagggtttacgacctcgatgttggatcaggacatcccgatggtgcagccgctattaaaggttcgtttgttcaacgattaaagtcctacgtgatctgagttcagaccggagtaatccaggtcggtttctatctacnttcaaattcctccctgtacgaaaggacaagagaaataaggcctacttcacaaagcgccttcccccgtaaatgatatcatctcaacttagtattatacccacacccacccaagaacagggtttgttaagatggcagagcccggtaatcgcataaaacttaaaactttacagtcagaggttcaattcctcttcttaacaacatacccatggccaacctcctactcctcattgtacccattctaatcgcaatggcattcctaatgcttaccgaacgaaaaattctaggctatatacaactacgcaaaggccccaacgttgtaggcccctacgggctactacaacccttcgctgacgccataaaactcttcaccaaagagcccctaaaacccgccacatctaccatcaccctctacatcaccgccccgaccttagctctcaccatcgctcttctactatgaacccccctccccatacccaaccccctggtcaacctcaacctaggcctcctatttattctagccacctctagcctagccgtttactcaatcctctgatcagggtgagcatcaaactcaaactacgccctgatcggcgcactgcgagcagtagcccaaacaatctcatatgaagtcaccctagccatcattctactatcaacattactaataagtggctcctttaacctctccacccttatcacaacacaagaacacctctgattactcctgccatcatgacccttggccataatatgatttatctccacactagcagagaccaaccgaacccccttcgaccttgccgaaggggagtccgaactagtctcaggcttcaacatcgaatacgccgcaggccccttcgccctattcttcatagccgaatacacaaacattattataataaacaccctcaccactacaatcttcctaggaacaacatatgacgcactctcccctgaactctacacaacatattttgtcaccaagaccctacttctaacctccctgttcttatgaattcgaacagcatacccccgattccgctacgaccaactcatacacctcctatgaaaaaacttcctaccactcaccctagcattacttatatgatatgtctccatacccattacaatctccagcattccccctcaaacctaagaaatatgtctgataaaagagttactttgatagagtaaataataggagcttaaacccccttatttctaggactatgagaatcgaacccatccctgagaatccaaaattctccgtgccacctatcacaccccatcctaaagtaaggtcagctaaataagctatcgggcccataccccgaaaatgttggttatacccttcccgtactaattaatcccctggcccaacccgtcatctactctaccatctttgcaggcacactcatcacagcgctaagctcgcactgattttttacctgagtaggcctagaaataaacatgctagcttttattccagttctaaccaaaaaaataaaccctcgttccacagaagctgccatcaagtatttcctcacgcaagcaaccgcatccataatccttctaatagctatcctcttcaacaatatactctccgggcaatgaaccataaccaatactaccaatcaatactcatcattaataatcataatggctatagcaataaaactaggaatagccccctttcacttctgagtcccagaggttacccaaggcacccctctgacatccggcctgcttcttctcacatgacaaaaactagcccccatctcaatcatataccaaatctctccctcactaaacgtaagccttctcctcactctctcaatcttatccatcatagcaggcagttgaggtggattaaaccaaacccagctacgcaaaatcttagcatactcctcaattacccacataggatgaataatagcagttctaccgtacaaccctaacataaccattcttaatttaactatttatattatcctaactactaccgcattcctactactcaacttaaactccagcaccacgaccctactactatctcgcacctgaaacaagctaacatgactaacacccttaattccatccaccctcctctccctaggaggcctgcccccgctaaccggctttttgcccaaatgggccattatcgaagaattcacaaaaaacaatagcctcatcatccccaccatcatagccaccatcaccctccttaacctctacttctacctacgcctaatctactccacctcaatcacactactccccatatctaacaacgtaaaaataaaatgacagtttgaacatacaaaacccaccccattcctccccacactcatcgcccttaccacgctactcctacctatctccccttttatactaataatcttatagaaatttaggttaaatacagaccaagagccttcaaagccctcagtaagttgcaatacttaatttctgtaacagctaaggactgcaaaaccccactctgcatcaactgaacgcaaatcagccactttaattaagctaagcccttactagaccaatgggacttaaacccacaaacacttagttaacagctaagcaccctaatcaactggcttcaatctacttctcccgccgccgggaaaaaaggcgggagaagccccggcaggtttgaagctgcttcttcgaatttgcaattcaatatgaaaatcacctcggagctggtaaaaagaggcctaacccctgtctttagatttacagtccaatgcttcactcagccattttacctcacccccactgatgttcgccgaccgttgactattctctacaaaccacaaagacattggaacactatacctattattcggcgcatgagctggagtcctaggcacagctctaagcctccttattcgagccgagctgggccagccaggcaaccttctaggtaacgaccacatctacaacgttatcgtcacagcccatgcatttgtaataatcttcttcatagtaatacccatcataatcggaggctttggcaactgactagttcccctaataatcggtgcccccgatatagcgtttccccgcataaacaacataagcttctgactcttacctccctctctcctactcctgctcgcatctgctatagtggaggccggagcaggaacaggttgaacagtctaccctcccttagcagggaactactcccaccctggagcctccgtagacctaaccatcttctccttacacctagcaggtgtctcctctatcttaggggccatcaatttcatcacaacaattatcaatataaaaccccctgccataacccaataccaaacgcccctcttcgtctgatccgtcctaatcacagcagtcctacttctcctatctctcccagtcctagctgctggcatcactatactactaacagaccgcaacctcaacaccaccttcttcgaccccgccggaggaggagaccccattctataccaacacctattctgatttttcggtcaccctgaagtttatattcttatcctaccaggcttcggaataatctcccatattgtaacttactactccggaaaaaaagaaccatttggatacataggtatggtctgagctatgatatcaattggcttcctagggtttatcgtgtgagcacaccatatatttacagtaggaatagacgtagacacacgagcatatttcacctccgctaccataatcatcgctatccccaccggcgtcaaagtatttagctgactcgccacactccacggaagcaatatgaaatgatctgctgcagtgctctgagccctaggattcatctttcttttcaccgtaggtggcctgactggcattgtattagcaaactcatcactagacatcgtactacacgacacgtactacgttgtagctcacttccactatgtcctatcaataggagctgtatttgccatcataggaggcttcattcactgatttcccctattctcaggctacaccctagaccaaacctacgccaaaatccatttcactatcatattcatcggcgtaaatctaactttcttcccacaacactttctaggcctatccggaatgccccgacgttactcggactaccccgatgcatacaccacatgaaacatcctatcatctgtaggctcattcatttctctaacagcagtaatattaataattttcatgatttgagaagccttcgcttcgaagcgaaaagtcctaatagtagaagaaccctccataaacctggagtgactatatggatgccccccaccctaccacacattcgaagaacccgtatacataaaatctagacaaaaaaggaaggaatcgaaccccccaaagctggtttcaagccaaccccatggcctccatgactttttcaaaaaggtattagaaaaaccatttcataactttgtcaaagttaaattataggctaaatcctatatatcttaatggcacatgcagcgcaagtaggtctacaagacgctacttcccctatcatagaagagcttatcacctttcatgatcacgccctcataatcattttccttatctgcttcctagtcctgtatgcccttttcctaacactcacaacaaaactaactaatactaacatctcagacgctcaggaaatagaaaccgtctgaactatcctgcccgccatcatcctagtcctcatcgccctcccatccctacgcatcctttacataacagacgaggtcaacgatccctcccttaccatcaaatcaattggccaccaatggtactgaacctacgagtacaccgactacggcggactaatcttcaactcctacatacttcccccattattcctagaaccaggcgacctgcgactccttgacgttgacaatcgagtagtactcccgattgaagcccccattcgtataataattacatcacaagacgtcttgcactcatgagctgtccccacattaggcttaaaaacagatgcaattcccggacgtctaaaccaaaccactttcaccgctacacgaccgggggtatactacggtcaatgctctgaaatctgtggagcaaaccacagtttcatgcccatcgtcctagaattaattcccctaaaaatctttgaaatagggcccgtatttaccctatagcaccccctctaccccctctagagcccactgtaaagctaacttagcattaaccttttaagttaaagattaagagaaccaacacctctttacagtgaaatgccccaactaaatactaccgtatggcccaccataattacccccatactccttacactattcctcatcacccaactaaaaatattagacacaaactaccacctacctccctcaccaaagcccataaaaataaaaaattataacaaaccctgagaaccaaaatgaacgaaaatctgttcgcttcattcattgcccccacaatcctaggcctacccgccacagtactgatcattctatttccccctctattgatccccacctccaaatatctcatcaacaaccgactaatcaccacccaacaatgactaatcaaactaatctcaaaacaaatgatagccatacacaacactaaaggacgaacctgatctcttatactagtatccttaatcatttttattgccacaactaacctcctcggactcctgcctcactcatttacaccaaccacccaactatctataaacctagccatggccatccccttatgagcgggcgcagtgattataggctttcgctctaagattaaaaatgccctagcccacttcttaccacaaggcacacctacaccccttatccccatactagttattatcgaaaccatcagcctactcattcaaccaatagccctggccgtacgcctaaccgctaacattactgcaggccacctactcatgcacctaattggaagcgccaccctagcaatatcaaccattaaccttccctctacacttatcatcttcacaattctaattctactgactatcctagaaatcgctgtcgccttaatccaagcctacgttttcacacttctagtaagcctctacctgcacgacaacacataatgacccaccaatcacatgcctatcatatagtaaaacccagcccatgacccctaacaggggccctctcagccctcctaatgacctccggcctagccatgtgatttcacttccactccataacgctcctcatactaggcctactaaccaacacactaaccatataccaatgatggcgcgatgtaacacgagaaagcacataccaaggccaccacacaccacctgtccaaaaaggccttcgatacgggataatcctatttattacctcagaagtttttttcttcgcaggatttttctgagccttttaccactccagcctagcccctaccccccaactaggagggcactggcccccaacaggcatcaccccgctaaatcccctagaagtcccactcctaaacacatccgtattactcgcatcaggagtatcaatcacctgagctcaccatagtctaatagaaaacaaccgaaaccaaataattcaagcactgcttattacaattttactgggtctctattttaccctcctacaagcctcagagtacttcgagtctcccttcaccatttccgacggcatctacggctcaacattttttgtagccacaggcttccacggacttcacgtcattattggctcaactttcctcactatctgcttcatccgccaactaatatttcactttacatccaaacatcactttggcttcgaagccgccgcctgatactggcattttgtagatgtggtttgactatttctgtatgtctccatctattgatgagggtcttactcttttagtataaatagtaccgttaacttccaattaactagttttgacaacattcaaaaaagagtaataaacttcgccttaattttaataatcaacaccctcctagccttactactaataattattacattttgactaccacaactcaacggctacatagaaaaatccaccccttacgagtgcggcttcgaccctatatcccccgcccgcgtccctttctccataaaattcttcttagtagctattaccttcttattatttgatctagaaattgccctccttttacccctaccatgagccctacaaacaactaacctgccactaatagttatgtcatccctcttattaatcatcatcctagccctaagtctggcctatgagtgactacaaaaaggattagactgagctgaattggtatatagtttaaacaaaacgaatgatttcgactcattaaattatgataatcatatttaccaaatgcccctcatttacataaatattatactagcatttaccatctcacttctaggaatactagtatatcgctcacacctcatatcctccctactatgcctagaaggaataatactatcgctgttcattatagctactctcataaccctcaacacccactccctcttagccaatattgtgcctattgccatactagtctttgccgcctgcgaagcagcggtgggcctagccctactagtctcaatctccaacacatatggcctagactacgtacataacctaaacctactccaatgctaaaactaatcgtcccaacaattatattactaccactgacatgactttccaaaaaacacataatttgaatcaacacaaccacccacagcctaattattagcatcatccccctactattttttaaccaaatcaacaacaacctatttagctgttccccaaccttttcctccgaccccctaacaacccccctcctaatactaactacctgactcctacccctcacaatcatggcaagccaacgccacttatccagtgaaccactatcacgaaaaaaactctacctctctatactaatctccctacaaatctccttaattataacattcacagccacagaactaatcatattttatatcttcttcgaaaccacacttatccccaccttggctatcatcacccgatgaggcaaccagccagaacgcctgaacgcaggcacatacttcctattctacaccctagtaggctcccttcccctactcatcgcactaatttacactcacaacaccctaggctcactaaacattctactactcactctcactgcccaagaactatcaaactcctgagccaacaacttaatatgactagcttacacaatagcttttatagtaaagatacctctttacggactccacttatgactccctaaagcccatgtcgaagcccccatcgctgggtcaatagtacttgccgcagtactcttaaaactaggcggctatggtataatacgcctcacactcattctcaaccccctgacaaaacacatagcctaccccttccttgtactatccctatgaggcataattataacaagctccatctgcctacgacaaacagacctaaaatcgctcattgcatactcttcaatcagccacatagccctcgtagtaacagccattctcatccaaaccccctgaagcttcaccggcgcagtcattctcataatcgcccacggacttacatcctcattactattctgcctagcaaactcaaactacgaacgcactcacagtcgcatcataatcctctctcaaggacttcaaactctactcccactaatagctttttgatgacttctagcaagcctcgctaacctcgccttaccccccactattaacctactgggagaactctctgtgctagtaaccacgttctcctgatcaaatatcactctcctacttacaggactcaacatactagtcacagccctatactccctctacatatttaccacaacacaatggggctcactcacccaccacattaacaacataaaaccctcattcacacgagaaaacaccctcatgttcatacacctatcccccattctcctcctatccctcaaccccgacatcattaccgggttttcctcttgtaaatatagtttaaccaaaacatcagattgtgaatctgacaacagaggcttacgaccccttatttaccgagaaagctcacaagaactgctaactcatgcccccatgtctaacaacatggctttctcaacttttaaaggataacagctatccattggtcttaggccccaaaaattttggtgcaactccaaataaaagtaataaccatgcacactactataaccaccctaaccctgacttccctaattccccccatccttaccaccctcgttaaccctaacaaaaaaaactcatacccccattatgtaaaatccattgtcgcatccacctttattatcagtctcttccccacaacaatattcatgtgcctagaccaagaagttattatctcgaactgacactgagccacaacccaaacaacccagctctccctaagcttcaaactagactacttctccataatattcatccctgtagcattgttcgttacatggtccatcatagaattctcactgtgatatataaactcagacccaaacattaatcagttcttcaaatatctactcattttcctaattaccatactaatcttagttaccgctaacaacctattccaactgttcatcggctgagagggcgtaggaattatatccttcttgctcatcagttgatgatacgcccgagcagatgccaacacagcagccattcaagcaatcctatacaaccgtatcggcgatatcggtttcatcctcgccttagcatgatttatcctacactccaactcatgagacccacaacaaatagcccttctaaacgctaatccaagcctcaccccactactaggcctcctcctagcagcagcaggcaaatcagcccaattaggtctccacccctgactcccctcagccatagaaggccccaccccagtctcagccctactccactcaagcactatagttgtagcaggaatcttcttactcatccgcttccaccccctagcagaaaatagcccactaatccaaactctaacactatgcttaggcgctatcaccactctgttcgcagcagtctgcgcccttacacaaaatgacatcaaaaaaatcgtagccttctccacttcaagtcaactaggactcataatagttacaatcggcatcaaccaaccacacctagcattcctgcacatctgtacccacgccttcttcaaagccatactatttatgtgctccgggtccatcatccacaaccttaacaatgaacaagatattcgaaaaataggaggactactcaaaaccatacctctcacttcaacctccctcaccattggcagcctagcattagcaggaatacctttcctcacaggtttctactccaaagaccacatcatcgaaaccgcaaacatatcatacacaaacgcctgagccctatctattactctcatcgctacctccctgacaagcgcctatagcactcgaataattcttctcaccctaacaggtcaacctcgcttccccacccttactaacattaacgaaaataaccccaccctactaaaccccattaaacgcctggcagccggaagcctattcgcaggatttctcattactaacaacatttcccccgcatcccccttccaaacaacaatccccctctacctaaaactcacagccctcgctgtcactttcctaggacttctaacagccctagacctcaactacctaaccaacaaacttaaaataaaatccccactatgcacattttatttctccaacatactcggattctaccctagcatcacacaccgcacaatcccctatctaggccttcttacgagccaaaacctgcccctactcctcctagacctaacctgactagaaaagctattacctaaaacaatttcacagcaccaaatctccacctccatcatcacctcaacccaaaaaggcataattaaactttacttcctctctttcttcttcccactcatcctaaccctactcctaatcacataacctattcccccgagcaatctcaattacaatatatacaccaacaaacaatgttcaaccagtaactactactaatcaacgcccataatcatacaaagcccccgcaccaataggatcctcccgaatcaaccctgacccctctccttcataaattattcagcttcctacactattaaagtttaccacaaccaccaccccatcatactctttcacccacagcaccaatcctacctccatcgctaaccccactaaaacactcaccaagacctcaacccctgacccccatgcctcaggatactcctcaatagccatcgctgtagtatacccaaagacaaccatcattccccctaaataaattaaaaaaactattaaacccatataacctcccccaaaattcagaataataacacacccgaccacaccgctaacaatcaatactaaacccccataaataggagaaggcttagaagaaaaccccacaaaccccattactaaacccacactcaacagaaacaaagcatacatcattattctcgcacggactacaaccacgaccaatgatatgaaaaaccatcgttgtatttcaactacaagaacaccaatgaccccaatacgcaaaattaaccccctaataaaactaattaaccactcattcatcgacctccccaccccatccaacatctccgcatgatgaaacttcggctcactccttggcgcctgcctgatcctccaaatcaccacaggactattcctagccatgcactactcaccagacgcctcaaccgccttttcatcaatcgcccacatcactcgagacgtaaattatggctgaatcatccgctaccttcacgccaatggcgcctcaatattctttatctgcctcttcctacacatcggacgaagcctatattacggatcatttctctactcagaaacctgaaacatcggcattatcctcctgcttgcaactatagcaacagccttcataggctatgtcctcccatgaggccaaatatcattctgaggggccacagtaattacaaacttactatccgccatcccatacattgggacagacctagttcaatgaatctgaggaggctactcagtagacagtcccaccctcacacgattctttacctttcacttcatcttacccttcattattgcagccctagcagcactccacctcctattcttgcacgaaacaggatcaaacaaccccctaggaatcacctcccattccgataaaatcaccttccacccttactacacaatcaaagacgccctcggcttacttctcttccttctctccttaatgacattaacactattctcacctgacctcctaggcgacccagacaattataccctagccaaccccttaaacacccctccccacatcaagcccgaatgatatttcctattcgcctacacaattctccgatccgtccctaacaaactaggaggcgtccttgccctattactatccatcctcatcctagcaataatccccatcctccatatatccaaacaacaaagcataatattccgcccactaagccaatcactttattgactcctagccgcagacctcctcattctaacctgaatcggaggacaaccagtaagctacccttttaccatcattggacaagtagcatccgtactatacttcacaacaatcctaatcctaataccaactatctccctaattgaaaacaaaatactcaaatgggcctgtccttgtagtataaactaatacaccagtcttgtaaaccggagatgaaaacctttttccaaggacaaatcagagaaaaagtctttaactccaccattagcacccaaagctaagattctaatttaaactattctctgttctttcatggggaagcagatttgggtaccacccaagtattgactcacccatcaacaaccgctatgtatttcgtacattactgccagccaccatgaatattgtacggtaccataaatacttgaccacctgtagtacataaaaacccaatccacatcaaaaccccctccccatgcttacaagcaagtacagcaatcaaccttcaactatcacacatcaactgcaactccaaagccacccctcacccactaggataccaacaaacctacccaccctcaacagtacatagtacataaaaccatttaccgtacatagcacattacagtcaaatcccttctcgtccccatggatgacccccctcagataggggtcccttgaccaccatcctccgtgaaatcaatatcccgcacaagagtgctactctcctcgctccgggcccataacacttgggggtagctaaagtgaactgtatccgacatctggttcctacttcagggtcataaagcctaaatagcccacacgttccccttaaataagacatcacgatg

SEQ ID NO: 214 - DNA, 16559 bp, Homo sapiens mitochondrial
  3106: "n" refers to a nucleotide at position 3107 of the Cambridge Reference Sequence (CRS, Anderson et al. 1981 Nature 290:457-465), later determined to be absent from the human mtDNA sequence according to the revised CRS (rCRS, Andrews et al. 1999 Nature Genetics 23:147); "n" therefore represents a single nucleotide deletion at a position corresponding to nucleotide 3107 of SEQ ID NO:1 as provided herein.
gatcacaggtctatcaccctattaaccactcacgggagctctccatgcatttggtattttcgtctggggggtgtgcacgcgatagcattgcgagacgctggagccggagcaccctatgtcgcagtatctgtctttgattcctgcctcatcctattatttatcgcacctacgttcaatattacaggcgaacatacttactaaagtgtattaattaattaatgcttgtaggacataataataacaattgaatgtctgcacagccgctttccacacagacatcataacaaaaaatttccaccaaaccccccctcccccgccttctggccacagcacttaaacacatctctgccaaaccccaaaaacaaagaaccctaacaccagcctaaccagatttcaaattttatcttttggcggtatgcacttttaacagtcaccccccaactaacacattattttcccctcccactcccatactactaatctcatcaatacaacccccacccatcctacccagcacacacaccgctgctaaccccataccccgaaccaaccaaaccccaaagacaccccccacagtttatgtagcttacctcctcaaagcaatacactgaaaatgtttagacgggctcacatcaccccataaacaaataggtttggtcctagcctttctattagctcttagtaagattacacatgcaagcatccccgttccagtgagttcaccctctaaatcaccacgatcaaaagggacaagcatcaagcacgcagcaatgcagctcaaaacgcttagcctagccacacccccacgggaaacagcagtgattagcctttagcaataaacgaaagtttaactaagctatactaaccccagggttggtcaatttcgtgccagccaccgcggtcacacgattaacccaagtcaatagaagccggcgtaaagagtgttttagatcaccccctccccaataaagctaaaactcacctgagttgtaaaaaactccagttgacacaaaatagactacgaaagtggctttaacatatctgaacacacaatagctaagacccaaactgggattagataccccactatgcttagccctaaacctcaacagttaaatcaacaaaactgctcgccagaacactacgagccacagcttaaaactcaaaggacctggcggtgcttcatatccctctagaggagcctgttctgtaatcgataaaccccgatcaacctcaccacctcttgctcagcctatataccgccatcttcagcaaaccctgatgaaggctacaaagtaagcgcaagtacccacgtaaagacgttaggtcaaggtgtagcccatgaggtggcaagaaatgggctacattttctaccccagaaaactacgatagcccttatgaaacttaagggtcgaaggtggatttagcagtaaactgagagtagagtgcttagttgaacagggccctgaagcgcgtacacaccgcccgtcaccctcctcaagtatacttcaaaggacatttaactaaaacccctacgcatttatatagaggagacaagtcgtaacatggtaagtgtactggaaagtgcacttggacgaaccagagtgtagcttaacacaaagcacccaacttacacttaggagatttcaacttaacttgaccgctctgagctaaacctagccccaaacccactccaccttactaccagacaaccttagccaaaccatttacccaaataaagtataggcgatagaaattgaaacctggcgcaatagatatagtaccgcaagggaaagatgaaaaattataaccaagcataatatagcaaggactaacccctataccttctgcataatgaattaactagaaataactttgcaaggagagccaaagctaagacccccgaaaccagacgagctacctaagaacagctaaaagagcacacccgtctatgtagcaaaatagtgggaagatttataggtagaggcgacaaacctaccgagcctggtgatagctggttgtccaagatagaatcttagttcaactttaaatttgcccacagaaccctctaaatccccttgtaaatttaactgttagtccaaagaggaacagctctttggacactaggaaaaaaccttgtagagagagtaaaaaatttaacacccatagtaggcctaaaagcagccaccaattaagaaagcgttcaagctcaacacccactacctaaaaaatcccaaacatataactgaactcctcacacccaattggaccaatctatcaccctatagaagaactaatgttagtataagtaacatgaaaacattctcctccgcataagcctgcgtcagattaaaacactgaactgacaattaacagcccaatatctacaatcaaccaacaagtcattattaccctcactgtcaacccaacacaggcatgctcataaggaaaggttaaaaaaagtaaaaggaactcggcaaatcttaccccgcctgtttaccaaaaacatcacctctagcatcaccagtattagaggcaccgcctgcccagtgacacatgtttaacggccgcggtaccctaaccgtgcaaaggtagcataatcacttgttccttaaatagggacctgtatgaatggctccacgagggttcagctgtctcttacttttaaccagtgaaattgacctgcccgtgaagaggcgggcatgacacagcaagacgagaagaccctatggagctttaatttattaatgcaaacagtacctaacaaacccacaggtcctaaactaccaaacctgcattaaaaatttcggttggggcgacctcggagcagaacccaacctccgagcagtacatgctaagacttcaccagtcaaagcgaactactatactcaattgatccaataacttgaccaacggaacaagttaccctagggataacagcgcaatcctattctagagtccatatcaacaatagggtttacgacctcgatgttggatcaggacatcccgatggtgcagccgctattaaaggttcgtttgttcaacgattaaagtcctacgtgatctgagttcagaccggagtaatccaggtcggtttctatctacnttcaaattcctccctgtacgaaaggacaagagaaataaggcctacttcacaaagcgccttcccccgtaaatgatatcatctcaacttagtattatacccacacccacccaagaacagggtttgttaagatggcagagcccggtaatcgcataaaacttaaaactttacagtcagaggttcaattcctcttcttaacaacatacccatggccaacctcctactcctcattgtacccattctaatcgcaatggcattcctaatgcttaccgaacgaaaaattctaggctatatacaactacgcaaaggccccaacgttgtaggcccctacgggctactacaacccttcgctgacgccataaaactcttcaccaaagagcccctaaaacccgccacatctaccatcaccctctacatcaccgccccgaccttagctctcaccatcgctcttctactatgaacccccctccccatacccaaccccctggtcaacctcaacctaggcctcctatttattctagccacctctagcctagccgtttactcaatcctctgatcagggtgagcatcaaactcaaactacgccctgatcggcgcactgcgagcagtagcccaaacaatctcatatgaagtcaccctagccatcattctactatcaacattactaataagtggctcctttaacctctccacccttatcacaacacaagaacacctctgattactcctgccatcatgacccttggccataatatgatttatctccacactagcagagaccaaccgaacccccttcgaccttgccgaaggggagtccgaactagtctcaggcttcaacatcgaatacgccgcaggccccttcgccctattcttcatagccgaatacacaaacattattataataaacaccctcaccactacaatcttcctaggaacaacatatgacgcactctcccctgaactctacacaacatattttgtcaccaagaccctacttctaacctccctgttcttatgaattcgaacagcatacccccgattccgctacgaccaactcatacacctcctatgaaaaaacttcctaccactcaccctagcattacttatatgatatgtctccatacccattacaatctccagcattccccctcaaacctaagaaatatgtctgataaaagagttactttgatagagtaaataataggagcttaaacccccttatttctaggactatgagaatcgaacccatccctgagaatccaaaattctccgtgccacctatcacaccccatcctaaagtaaggtcagctaaataagctatcgggcccataccccgaaaatgttggttatacccttcccgtactaattaatcccctggcccaacccgtcatctactctaccatctttgcaggcacactcatcacagcgctaagctcgcactgattttttacctgagtaggcctagaaataaacatgctagcttttattccagttctaaccaaaaaaataaaccctcgttccacagaagctgccatcaagtatttcctcacgcaagcaaccgcatccataatccttctaatagctatcctcttcaacaatatactctccggacaatgaaccataaccaatactaccaatcaatactcatcattaataatcataatggctatagcaataaaactaggaatagccccctttcacttctgagtcccagaagttacccaaggcacccctctgacatccggcctgcttcttctcacatgacaaaaactagcccccatctcaatcatataccaaatctctccctcactaaacgtaagccttctcctcactctctcaatcttatccatcatagcaggcagttgaggtggattaaaccaaacccagctacgcaaaatcttagcatactcctcaattacccacataggatgaataatagcagttctaccgtacaaccctaacataaccattcttaatttaactatttatattatcctaactactaccgcattcctactactcaacttaaactccagcaccacgaccctactactatctcgcacctgaaacaagctaacatgactaacacccttaattccatccaccctcctctccctaggaggcctgcccccgctaaccggctttttgcccaaatgggccattatcgaagaattcacaaaaaacaatagcctcatcatccccaccatcatagccaccatcaccctccttaacctctacttctacctacgcctaatctactccacctcaatcacactactccccatatctaacaacgtaaaaataaaatgacagtttgaacatacaaaacccaccccattcctccccacactcatcgcccttaccacgctactcctacctatctccccttttatactaataatcttatagaaatttaggttaaatacagaccaagagccttcaaagccctcagtaagttgcaatacttaatttctgtaacagctaaggactgcaaaaccccactctgcatcaactgaacgcaaatcagccactttaattaagctaagcccttactagaccaatgggacttaaacccacaaacacttagttaacagctaagcaccctaatcaactggcttcaatctacttctcccgccgccgggaaaaaaggcgggagaagccccggcaggtttgaagctgcttcttcgaatttgcaattcaatatgaaaatcacctcggagctggtaaaaagaggcctaacccctgtctttagatttacagtccaatgcttcactcagccattttacctcacccccactgatgttcgccgaccgttgactattctctacaaaccacaaagacattggaacactatacctattattcggcgcatgagctggagtcctaggcacagctctaagcctccttattcgagccgaactgggccagccaggcaaccttctaggtaacgaccacatctacaacgttatcgtcacagcccatgcatttgtaataatcttcttcatagtaatacccatcataatcggaggctttggcaactgactagttcccctaataatcggtgcccccgatatggcgtttccccgcataaacaacataagcttctgactcctacctccctctctcctactcctgctcgcatctgctatagtggaggccggagcaggaacaggttgaacagtctaccctcccttagcagggaactactcccaccctggagcctccgtagacctaaccatcttctccttacacctagcaggtgtctcctctatcttaggggccatcaatttcatcacaacaattatcaacataaaaccccctgccataacccaataccaaacgcccctcttcgtctgatccgtcctaatcacagcagtcctacttctcctatctctcccagtcctagctgctggcatcactatactactaacagaccgcaacctcaacaccaccttcttcgaccccgccggaggaggagaccccattctataccaacacctattctgatttttcggtcaccctgaagtttatattcttatcctaccaggcttcggaataatctcccatattgtaacttactactccggaaaaaaagaaccatttggatacataggtatggtctgagctatgatatcaattggcttcctagggtttatcgtgtgagcacaccatatatttacagtaggaatagacgtagacacacgagcatatttcacctccgctaccataatcatcgctatccccaccggcgtcaaagtatttagctgactcgccacactccacggaagcaatatgaaatgatctgctgcagtgctctgagccctaggattcatctttcttttcaccgtaggtggcctgactggcattgtattagcaaactcatcactagacatcgtactacacgacacgtactacgttgtagctcacttccactatgtcctatcaataggagctgtatttgccatcataggaggcttcattcactgatttcccctattctcaggctacaccctagaccaaacctacgccaaaatccatttcactatcatattcatcggcgtaaatctaactttcttcccacaacactttctcggcctatccggaatgccccgacgttactcggactaccccgatgcatacaccacatgaaacatcctatcatctgtaggctcattcatttctctaacagcagtaatattaataattttcatgatttgagaagccttcgcttcgaagcgaaaagtcctaatagtagaagaaccctccataaacctggagtgactatatggatgccccccaccctaccacacattcgaagaacccgtatacataaaatctagacaaaaaaggaaggaatcgaaccccccaaagctggtttcaagccaaccccatggcctccatgactttttcaaaaaggtattagaaaaaccatttcataactttgtcaaagttaaattataggctaaatcctatatatcttaatggcacatgcagcgcaagtaggtctacaagacgctacttcccctatcatagaagagcttatcacctttcatgatcacgccctcataatcattttccttatctgcttcctagtcctgtatgcccttttcctaacactcacaacaaaactaactaatactaacatctcagacgctcaggaaatagaaaccgtctgaactatcctgcccgccatcatcctagtcctcatcgccctcccatccctacgcatcctttacataacagacgaggtcaacgatccctcccttaccatcaaatcaattggccaccaatggtactgaacctacgagtacaccgactacggcggactaatcttcaactcctacatacttcccccattattcctagaaccaggcgacctgcgactccttgacgttgacaatcgagtagtactcccgattgaagcccccattcgtataataattacatcacaagacgtcttgcactcatgagctgtccccacattaggcttaaaaacagatgcaattcccggacgtctaaaccaaaccactttcaccgctacacgaccgggggtatactacggtcaatgctctgaaatctgtggagcaaaccacagtttcatgcccatcgtcctagaattaattcccctaaaaatctttgaaatagggcccgtatttaccctatagcaccccctctagagcccactgtaaagctaacttagcattaaccttttaagttaaagattaagagaaccaacacctctttacagtgaaatgccccaactaaatactaccgtatggcccaccataattacccccatactccttacactattcctcatcacccaactaaaaatattaaacacaaactaccacctacctccctcaccaaagcccataaaaataaaaaattataacaaaccctgagaaccaaaatgaacgaaaatctgttcgcttcattcattgcccccacaatcctaggcctacccgccgcagtactgatcattctatttccccctctattgatccccacctccaaatatctcatcaacaaccgactaatcaccacccaacaatgactaatcaaactaacctcaaaacaaatgataaccatacacaacactaaaggacgaacctgatctcttatactagtatccttaatcatttttattgccacaactaacctcctcggactcctgcctcactcatttacaccaaccacccaactatctataaacctagccatggccatccccttatgagcgggcgcagtgattataggctttcgctctaagattaaaaatgccctagcccacttcttaccacaaggcacacctacaccccttatccccatactagttattatcgaaaccatcagcctactcattcaaccaatagccctggccgtacgcctaaccgctaacattactgcaggccacctactcatgcacctaattggaagcgccaccctagcaatatcaaccattaaccttccctctacacttatcatcttcacaattctaattctactgactatcctagaaatcgctgtcgccttaatccaagcctacgttttcacacttctagtaagcctctacctgcacgacaacacataatgacccaccaatcacatgcctatcatatagtaaaacccagcccatgacccctaacaggggccctctcagccctcctaatgacctccggcctagccatgtgatttcacttccactccataacgctcctcatactaggcctactaaccaacacactaaccatataccaatgatggcgcgatgtaacacgagaaagcacataccaaggccaccacacaccacctgtccaaaaaggccttcgatacgggataatcctatttattacctcagaagtttttttcttcgcaggatttttctgagccttttaccactccagcctagcccctaccccccaattaggagggcactggcccccaacaggcatcaccccgctaaatcccctagaagtcccactcctaaacacatccgtattactcgcatcaggagtatcaatcacctgagctcaccatagtctaatagaaaacaaccgaaaccaaataattcaagcactgcttattacaattttactgggtctctattttaccctcctacaagcctcagagtacttcgagtctcccttcaccatttccgacggcatctacggctcaacattttttgtagccacaggcttccacggacttcacgtcattattggctcaactttcctcactatctgcttcatccgccaactaatatttcactttacatccaaacatcactttggcttcgaagccgccgcctgatactggcattttgtagatgtggtttgactatttctgtatgtctccatctattgatgagggtcttactcttttagtataaatagtaccgttaacttccaattaactagttttgacaacattcaaaaaagagtaataaacttcgccttaattttaataatcaacaccctcctagccttactactaataattattacattttgactaccacaactcaacggctacatagaaaaatccaccccttacgagtgcggcttcgaccctatatcccccgcccgcgtccctttctccataaaattcttcttagtagctattaccttcttattatttgatctagaaattgccctccttttacccctaccatgagccctacaaacaactaacctgccactaatagttatgtcatccctcttattaatcatcatcctagccctaagtctggcctatgagtgactacaaaaaggattagactgaaccgaattggtatatagtttaaacaaaacgaatgatttcgactcattaaattatgataatcatatttaccaaatgcccctcatttacataaatattatactagcatttaccatctcacttctaggaatactagtatatcgctcacacctcatatcctccctactatgcctagaaggaataatactatcgctgttcattatagctactctcataaccctcaacacccactccctcttagccaatattgtgcctattgccatactagtctttgccgcctgcgaagcagcggtgggcctagccctactagtctcaatctccaacacatatggcctagactacgtacataacctaaacctactccaatgctaaaactaatcgtcccaacaattatattactaccactgacatgactttccaaaaaacacataatttgaatcaacacaaccacccacagcctaattattagcatcatccctctactattttttaaccaaatcaacaacaacctatttagctgttccccaaccttttcctccgaccccctaacaacccccctcctaatactaactacctgactcctacccctcacaatcatggcaagccaacgccacttatccagtgaaccactatcacgaaaaaaactctacctctctatactaatctccctacaaatctccttaattataacattcacagccacagaactaatcatattttatatcttcttcgaaaccacacttatccccaccttggctatcatcacccgatgaggcaaccagccagaacgcctgaacgcaggcacatacttcctattctacaccctagtaggctcccttcccctactcatcgcactaatttacactcacaacaccctaggctcactaaacattctactactcactctcactgcccaagaactatcaaactcctgagccaacaacttaatatgactagcttacacaatagcttttatagtaaagatacctctttacggactccacttatgactccctaaagcccatgtcgaagcccccatcgctgggtcaatagtacttgccgcagtactcttaaaactaggcggctatggtataatacgcctcacactcattctcaaccccctgacaaaacacatagcctaccccttccttgtactatccctatgaggcataattataacaagctccatctgcctacgacaaacagacctaaaatcgctcattgcatactcttcaatcagccacatagccctcgtagtaacagccattctcatccaaaccccctgaagcttcaccggcgcagtcattctcataatcgcccacggacttacatcctcattactattctgcctagcaaactcaaactacgaacgcactcacagtcgcatcataatcctctctcaaggacttcaaactctactcccactaatagctttttgatgacttctagcaagcctcgctaacctcgccttaccccccactattaacctactgggagaactctctgtgctagtaaccacgttctcctgatcaaacatcactctcctacttacaggactcaacatactagtcacagccctatactccctctacatatttaccacaacacaatggggctcactcacccaccacattaacaacataaaaccctcattcacacgagaaaacaccctcatgttcatacacctatcccccattctcctcctatccctcaaccccgacatcattaccgggttttcctcttgtaaatatagtttaaccaaaacatcagattgtgaatctgacaacagaggcttacgaccccttatttaccgagaaagctcacaagaactgctaactcatgcccccatgtctaacaacatggctttctcaacttttaaaggataacagctatccattggtcttaggccccaaaaattttggtgcaactccaaataaaagtaataaccatgcacactactataaccaccctaaccctgacttccctaattccccccatccttaccaccctcgttaaccctaacaaaaaaaactcatacccccattatgtaaaatccattgtcgcatccacctttattatcagtctcttccccacaacaatattcatgtgcctagaccaagaagttattatctcgaactgacactgagccacaacccaaacaacccagctctccctaagcttcaaactagactacttctccataatattcatccctgtagcattgttcgttacatggtccatcatagaattctcactgtgatatataaactcagacccaaacattaatcagttcttcaaatatctactcatcttcctaattaccatactaatcttagttaccgctaacaacctattccaactgttcatcggctgagagggcgtaggaattatatccttcttgctcatcagttgatgatacgcccgagcagatgccaacacagcagccattcaagcaatcctatacaaccgtatcggcgatatcggtttcatcctcgccttagcatgatttatcctacactccaactcatgagacccacaacaaatagcccttctaaacgctaatccaagcctcaccccactactaggcctcctcctagcagcagcaggcaaatcagcccaattaggtctccacccctgactcccctcagccatagaaggccccaccccagtctcagccctactccactcaagcactatagttgtagcaggaatcttcttactcatccgcttccaccccctagcagaaaatagcccactaatccaaactctaacactatgcttaggcgctatcaccactctgttcgcagcagtctgcgcccttacacaaaatgacatcaaaaaaatcgtagccttctccacttcaagtcaactaggactcataatagttacaatcggcatcaaccaaccacacctagcattcctgcacatctgtacccacgccttcttcaaagccatactatttatgtgctccgggtccatcatccacaaccttaacaatgaacaagatattcgaaaaataggaggactactcaaaaccatacctctcacttcaacctccctcaccattggcagcctagcattagcaggaatacctttcctcacaggtttctactccaaagaccacatcatcgaaaccgcaaacatatcatacacaaacgcctgagccctatctattactctcatcgctacctccctaacaagcgcctatagcactcgaataattcttctcaccctaacaggtcaacctcgcttccccacccttactaacattaacgaaaataaccccaccctactaaaccccattaaacgcctggcagccggaagcctattcgcaggatttctcattactaacaacatttcccccgcatcccccttccaaacaacaatccccctctacctaaaactcacagccctcgctgtcactttcctaggacttctaacagccctagacctcaactacctaaccaacaaacttaaaataaaatccccactatgcacattttatttctccaacatactcggattctaccctagcatcacacaccgcacaatcccctatctaggccttcttacgagccaaaacctgcccctactcctcctagacctaacctgactagaaaagctattacctaaaacaatttcacagcaccaaatctccacctccatcatcacctcaacccaaaaaggcataattaaactttacttcctctctttcttcttcccactcatcctaaccctactcctaatcacataacctattcccccgagcaatctcaattacaatatatacaccaacaaacaatgttcaaccagtaactactactaatcaacgcccataatcatacaaagcccccgcaccaataggatcctcccgaatcaaccctgacccctctccttcataaattattcagcttcctacactattaaagtttaccacaaccaccaccccatcatactctttcacccacagcaccaatcctacctccatcgctaaccccactaaaacactcaccaagacctcaacccctgacccccatgcctcaggatactcctcaatagccatcgctgtagtatatccaaagacaaccatcattccccctaaataaattaaaaaaactattaaacccatataacctcccccaaaattcagaataataacacacccgaccacaccgctaacaatcaatactaaacccccataaataggagaaggcttagaagaaaaccccacaaaccccattactaaacccacactcaacagaaacaaagcatacatcattattctcgcacggactacaaccacgaccaatgatatgaaaaaccatcgttgtatttcaactacaagaacaccaatgaccccaatacgcaaaattaaccccctaataaaattaattaaccactcattcatcgacctccccaccccatccaacatctccgcatgatgaaacttcggctcactccttggcgcctgcctgatcctccaaatcaccacaggactattcctagccatgcactactcaccagacgcctcaaccgccttttcatcaatcgcccacatcactcgagacgtaaattatggctgaatcatccgctaccttcacgccaatggcgcctcaatattctttatctgcctcttcctacacatcgggcgaggcctatattacggatcatttctctactcagaaacctgaaacatcggcattatcctcctgcttgcaactatagcaacagccttcataggctatgtcctcccgtgaggccaaatatcattctgaggggccacagtaattacaaacttactatccgccatcccatacattgggacagacctagttcaatgaatctgaggaggctactcagtagacagtcccaccctcacacgattctttacctttcacttcatcttgcccttcattattgcagccctagcagcactccacctcctattcttgcacgaaacgggatcaaacaaccccctaggaatcacctcccattccgataaaatcaccttccacccttactacacaatcaaagacgccctcggcttacttctcttccttctctccttaatgacattaacactattctcaccagacctcctaggcgacccagacaattataccctagccaaccccttaaatacccctccccacatcaagcccgaatgatatttcctattcgcctacacaattctccgatccgtccctaacaaactaggaggcgtccttgccctattactatccatcctcatcctagcaataatccccatcctccatatatccaaacaacaaagcataatatttcgcccactaagccaatcactttattgactcctagccgcagacctcctcattctaacctgaatcggaggacaaccagtaagctacccttttaccatcattggacaagtagcatccgtactatacttcacaacaatcctaatcctaataccaactatctccctaattgaaaacaaaatactcaaatgggcctgtccttgtagtataaactaatacaccagtcttgtaaaccggagatgaaaacctttttccaaggacaaatcagagaaaaagtctttaactccaccattagcacccaaagctaagattctaatttaaactattctctgttctttcatggggaagcagatttgggtaccacccaagtattgactcacccatcaacaaccgctatgtatttcgtacattactgccagccaccatgaatattgtacggtaccacaaatacttgaccacctgtagtacataaaaacccaatccacatcaaacccccccccccatgcttacaagcaagtacagcaaccaaccctcaactatcacacatcaactgcaactccaaagccacccctcacccactaggataccaacaaacctacccacccttaacagtacatagtacataaagccatttaccgtacatagcacattacagtcaaatcccttctcgtccccatggatgacccccctcagataggggtcccttgaccaccatcctccgtgaaatcaatatcccgcacaagagtgctactctcctcgctccgggcccataacacttgggggtagctaaagtgaactgtatccgacatctggttcctacttcagggccataaagcctaaatagcccacacgttccccttaaataagacatcacgatg

SEQ ID NO: 215 - DNA, 16570 bp, Homo sapiens mitochondrial
  3108: "n" refers to a nucleotide at position 3107 of the Cambridge Reference Sequence (CRS, Anderson et al. 1981 Nature 290:457-465), later determined to be absent from the human mtDNA sequence according to the revised CRS (rCRS, Andrews et al. 1999 Nature Genetics 23:147); "n" therefore represents a single nucleotide deletion at a position corresponding to nucleotide 3107 of SEQ ID NO:1 as provided herein.
gatcacaggtctatcaccctattaaccactcacgggagctctccatgcatttggtattttcgtctggggggtgtgcacgcgatagcattgcgagacgctggagccggagcaccctatgtcgcagtatctgtctttgattcctgcctcatctcattatttatcgcacctacgttcaatattacaggcgaacatacttactaaagtgtgttaattaattaatgcttgtaggacataataataacaattgaatgtctgcacagccgctttccacacagacatcataacaaaaaatttccaccaaaccccccctcccccgccttctggccacagcacttaaacacatctctgccaaaccccaaaaacaaagaaccctaacaccagcctaaccagatttcaaattttatcttttggcggtatgcacttttaacagtcaccccccaactaacacattattttcccctcccactcccatactactaatctcatcaacacaacccccgcccatcctacccagcacacacacaccgctgctaaccccataccccgaaccaaccaaaccccaaagacaccccccacagtttatgtagcttacctcctcaaagcaatacactgaaaatgtttagacgggctcacatcaccccataaacaaataggtttggtcctagcctttctattagctcttagtaagattacacatgcaagcatccccgttccagtgagttcaccctctaaatcaccacgatcaaaagggacaagcatcaagcacgcagcaatgcagctcaaaacgcttagcctagccacacccccacgggaaacagcagtgattaacctttagcaataaacgaaagtttaactaagctatactaacctcagggttggtcaatttcgtgccagccaccgcggtcacacgattaacccaagtcaatagaagccggcgtaaagagtgttttagatcaccccctccccaataaagctaaaactcacctgagttgtaaaaaactccagttgacacaaaatagactacgaaagtggctttaacatatctgaacacacaatagctaagacccaaactgggattagataccccactatgcttagccctaaacctcaacagttaaatcaacaaaactgctcgccagaacactacgagccacagcttaaaactcaaaggacctggcggtgcttcatatccctctagaggagcctgttctgtaatcgataaaccccgatcaacctcaccacctcttgctcagcctatataccgccatcttcagcaaaccctgatgaaggctacaaagtaagcgcaagtacccacgtaaagacgttaggtcaaggtgtagcccatgaggtggcaagaaatgggctacattttctaccccagaaaactacgatagcccttatgaaacttaagggtcgaaggtggatttagcagtaaactgagagtagagtgcttagttgaacagggccctgaagcgcgtacacaccgcccgtcaccctcctcaagtatacttcaaaggacatttaactaaaacccctacgcatttatatagaggagacaagtcgtaacatggtaagtgtactggaaagtgcacttggacgaaccagagtgtagcttaacacaaagcacccaacttacacttaggagatttcaacttaacttgaccgctctgagctaaacctagccccaaacccactccaccttactaccagacaaccttagccaaaccatttacccaaataaagtataggcgatagaaattgaaacctggcgcaatagatatagtaccgcaagggaaagatgaaaaattataaccaagcataatatagcaaggactaacccctataccttctgcataatgaattaactagaaataactttgcaaggagagccaaagctaagacccccgaaaccagacgagctacctaagaacagctaaaagagcacacccgtctatgtagcaaaatagtgggaagatttataggtagaggcgacaaacctaccgagcctggtgatagctggttgtccaagatagaatcttagttcaactttaaatttgcccacagaaccctctaaatccccttgtaaatttaactgttagtccaaagaggaacagctctttggacactaggaaaaaaccttgtagagagagtaaaaaatttaacacccatagtaggcctaaaagcagccaccaattaagaaagcgttcaagctcaacacccactacctaaaaaatcccaaacatataactgaactcctcacacccaattggaccaatctatcaccctatagaagaactaatgttagtataagtaacatgaaaacattctcctccgcataagcctgcgtcagattaaaacactgaactgacaattaacagcccaatatctacaatcaaccaacaagtcattattaccctcactgtcaacccaacacaggcatgctcataaggaaaggttaaaaaaagtaaaaggaactcggcaaatcttaccccgcctgtttaccaaaaacatcacctctagcatcaccagtattagaggcaccgcctgcccagtgacacatgtttaacggccgcggtaccctaaccgtgcaaaggtagcataatcacttgttccttaaatagggacctgtatgaatggctccacgagggttcagctgtctcttacttttaaccagtgaaattgacctgcccgtgaagaggcgggcatgacacagcaagacgagaagaccctatggagctttaatttattaatgcaaacagtacctaacaaacccacaggtcctaaactaccaaacctgcattaaaaatttcggttggggcgacctcggagcagaacccaacctccgagcagtacatgctaagacttcaccagtcaaagcgaactactatactcaattgatccaataacttgaccaacggaacaagttaccctagggataacagcgcaatcctattctagagtccatatcaacaatagggtttacgacctcgatgttggatcaggacatcccgatggtgcagccgctatcaaaggttcgtttgttcaacgattaaagtcctacgtgatctgagttcagaccggagtaatccaggtcggtttctatctacnttcaaattcctccctgtacgaaaggacaagagaaataaggcctacttcacaaagcgccttcccccgtaaatgatatcatctcaacttagtattatacccacacccacccaagaacagggtttgttaagatggcagagcccggtaatcgcataaaacttaaaactttacagtcagaggttcaattcctcttcttaacaacatacccatggccaacctcctactcctcattgtacccattctaatcgcaatggcattcctaatgcttaccgaacgaaaaattctaggctatatacaactacgcaaaggccccaacgttgtaggcccctacgggctactacaacccttcgctgacgccataaaactcttcaccaaagagcccctaaaacccgccacatctaccatcaccctctacatcaccgccccgaccttagctctcaccatcgctcttctactatgaacccccctccccatacccaaccccctggtcaacctcaacctaggcctcctatttattctagccacctctagcctagccgtttactcaatcctctgatcagggtgagcatcaaactcaaactacgccctgatcggcgcactacgagcagtagcccaaacaatctcatatgaagtcaccctagccatcattctactatcaacattactaataagtggctcctttaacctctccacccttatcacaacacaagaacacctctgattactcctgccatcatgacccttggccataatatgatttatctccacactagcagagaccaaccgaacccccttcgaccttgccgaaggggagtccgaactagtctcaggcttcaacatcgaatacgccgcaggccccttcgccctattcttcatagccgaatacacaaacattattataataaacaccctcaccactacaatcttcctaggaacaacatatgacgcactctcccctgaactctacacaacatattttgtcaccaagaccctacttctaacctccctgttcttatgaattcgaacagcatacccccgattccgctacgaccaactcatacacctcctatgaaaaaacttcctaccactcaccctagcattacttatatgatatgtctccatacccattacaatctccagcattccccctcaaacctaagaaatatgtctgataaaagagttactttgatagagtaaataataggagcttaaacccccttatttctaggactatgagaatcgaacccatccctgagaatccaaaattctccgtgccacctatcacaccccatcctaaagtaaggtcagctaaataagctatcgggcccataccccgaaaatgttggttatacccttcccgtactaattaatcccctggcccaacccatcatctactctaccatctttgcaggcacactcatcacagcgctaagctcgcactgattttttacctgagtaggcctagaaataaacatgctagcttttattccagttctaaccaaaaaaataaaccctcgttccacagaagctgccatcaagtatttcctcacgcaagcaaccgcatccataatccttctaatagctatcctcttcaacaatatactctccggacaatgaaccataaccaatactaccaatcaatactcatcattaataatcataatggctatagcaataaaactaggaatagccccctttcacttctgagtcccagaggttacccaaggcacccctctgacatccggcctgcttcttctcacatgacaaaaactagcccccatctcaatcatataccaaatctctccctcactaaacgtaagccttctcctcactctctcaatcttatccatcatagcaggcagttgaggtggattaaaccaaacccagctacgcaaaatcttagcatactcctcaattacccacataggatgaataatagcagttctaccgtacaaccctaacataaccattcttaatttaactatttatattatcctaactactaccgcattcctactactcaacttaaactccagcaccacgaccctactactatctcgcacctgaaacaagctaacatgactaacacccttaattccatccaccctcctctccctaggaggcctgcccccgctaaccggctttttgcccaaatgggccattatcgaagaattcacaaaaaacaatagcctcatcatccccaccatcatagccaccatcaccctccttaacctctacttctacctacgcctaatctactccacctcaatcacactactccccatatctaacaacgtaaaaataaaatgacagtttgaacatacaaaacccaccccattcctccccacactcatcgcccttaccacgctactcctacctatctccccttttatactaataatcttatagaaatttaggttaaatacagaccaagagccttcaaagccctcagtaagttgcaatacttaatttctgtaacagctaaggactgcaaaaccccactctgcatcaactgaacgcaaatcagccactttaattaagctaagcccttactagaccaatgggacttaaacccacaaacacttagttaacagctaagcaccctaatcaactggcttcaatctacttctcccgccgccgggaaaaaaggcgggagaagccccggcaggtttgaagctgcttcttcgaatttgcaattcaatatgaaaatcacctcggagctggtaaaaagaggcctaacccctgtctttagatttacagtccaatgcttcactcagccattttacctcacccccactgatgttcgccgaccgttgactattctctacaaaccacaaagacattggaacactatacctattattcggcgcatgagctggagtcctaggcacagctctaagcctccttattcgagccgagctgggccagccaggcaaccttctaggtaacgaccacatctacaacgttatcgtcacagcccatgcatttgtaataatcttcttcatagtaatacccatcataatcggaggctttggcaactgactagttcccctaataatcggtgcccccgatatggcgtttccccgcataaacaacataagcttctgactcttacctccctctctcctactcctgctcgcatctgctatagtggaggccggagcaggaacaggttgaacagtctaccctcccttagcagggaactactcccaccctggagcctccgtagacctaaccatcttctccttacacctagcaggtgtctcctctatcttaggggccatcaatttcatcacaacaattatcaatataaaaccccctgccataacccaataccaaacgcccctcttcgtctgatccgtcctaatcacagcagtcctacttctcctatctctcccagtcctagctgctggcatcactatactactaacagaccgcaacctcaacaccaccttcttcgaccccgccggaggaggagaccccattctataccaacacctattctgatttttcggtcaccctgaagtttatattcttatcctaccaggcttcggaataatctcccatattgtaacttactactccggaaaaaaagaaccatttggatacataggtatggtctgagctatgatatcaattggcttcctagggtttatcgtgtgagcacaccatatatttacagtaggaatagacgtagacacacgagcatatttcacctccgctaccataatcatcgctatccccaccggcgtcaaagtatttagctgactcgccacactccacggaagcaatatgaaatgatctgctgcagtgctctgagccctaggattcatctttcttttcaccgtaggtggcctgactggcattgtattagcaaactcatcactagacatcgtactacacgacacgtactacgttgtagctcacttccactatgtcctatcaataggagctgtatttgccatcataggaggcttcattcactgatttcccctattctcaggctacaccctagaccaaacctacgccaaaatccatttcactatcatattcatcggcgtaaatctaactttcttcccacaacactttctcggcctatccggaatgccccgacgttactcggactaccccgatgcatacaccacatgaaacatcctatcatctgtaggctcattcatttctctaacagcagtaatattaataattttcatgatttgagaagccttcgcttcgaagcgaaaagtcctaatagtagaagaaccctccataaacctggagtgactatatggatgccccccaccctaccacacattcgaagaacccgtatacataaaatctagacaaaaaaggaaggaatcgaaccccccaaagctggtttcaagccaaccccatggcctccatgactttttcaaaaaggtattagaaaaaccatttcataactttgtcaaagttaaattataggctaaatcctatatatcttaatggcacatgcaacgcaagtaggtctacaagacgctacttcccctatcatagaagagcttatcacctttcatgatcacgccctcataatcattttccttatctgcttcctagtcctgtatgcccttttcctaacactcacaacaaaactaactaatactaacatctcagacgctcaggaaatagaaaccgtctgaactatcctgcccgccatcatcctagtcctcatcgccctcccatccctacgcatcctttacataacagacgaggtcaacgatccctcccttaccatcaaatcaattggccaccaatggtactgaacctacgagtacaccgactacggcggactaatcttcaactcctacatacttcccccattattcctagaaccaggcgacctgcgactccttgacgttgacaatcgagtagtactcccgattgaagcccccattcgtataataattacatcacaagacgtcttgcactcatgagctgtccccacattaggcttaaaaacagatgcaattcccggacgtctaaaccaaaccactttcaccgctacacgaccgggggtatactacggtcaatgctctgaaatctgtggagcaaaccacagtttcatgcccatcgtcctagaattaattcccctaaaaatctttgaaatagggcccgtatttaccctatagcaccccctctaccccctctagagcccactgtaaagctaacttagcattaaccttttaagttaaagattaagagaaccaacacctctttacagtgaaatgccccaactaaatactaccgtatggcccaccataattacccccatactccttacactattcctcatcacccaactaaaaatattaaacacaaactaccacctacctccctcaccaaagcccataaaaataaaaaattataacaaaccctgagaaccaaaatgaacgaaaatctgttcgcttcattcattgcccccacaatcctaggcctacccgccgcagtactgatcattctatttccccctctattgatccccacctccaaatatctcatcaacaaccgactaatcaccacccaacaatgactaatcaaactaacctcaaaacaaatgatagccatacacaacactaaaggacgaacctgatctcttatactagtatccttaatcatttttattgccacaactaacctcctcggactcctgcctcactcatttacaccaaccacccaactatctataaacctagccatggccatccccttatgagcgggcgcagtgattataggctttcgctctaagattaaaaatgccctagcccacttcttaccacaaggcacacctacaccccttatccccatactagttattatcgaaaccatcagcctactcattcaaccaatagccctggccgtacgcctaaccgctaacattactgcaggccacctactcatgcacctaattggaagcgccaccctagcaatatcaaccattaaccttccctctacacttatcatcttcacaattctaattctactgactatcctagaaatcgctgtcgccttaatccaagcctacgttttcacacttctagtaagcctctacctacacgacaacacataatgacccaccaatcacatgcctatcatatagtaaaacccagcccatgacccctaacaggggccctctcagccctcctaatgacctccggcctagccatgtgatttcacttccactccataacgctcctcatactaggcctactaaccaacacactaaccatataccaatgatggcgcgatgtaacacgagaaagcacataccaaggccaccacacaccacctgtccaaaaaggccttcgatacgggataatcctatttattacctcagaagtttttttcttcgcaggatttttctgagccttttaccactccagcctagcccctaccccccaactaggagggcactggcccccaacaggcatcaccccgctaaatcccctagaagtcccactcctaaacacatccgtattactcgcatcaggagtatcaatcacctgagctcaccatagtctaatagaaaacaaccgaaaccaaataattcaagcactgcttattacaattttactgggtctctattttaccctcctacaagcctcagagtacttcgagtctcccttcaccatttccgacggcatctacggctcaacattttttgtagccacaggcttccacggacttcacgtcattattggctcaactttcctcactatctgcttcatccgccaactaatatttcactttacatccaaacatcactttggcttcgaagccgccgcctgatactggcattttgtagatgtggtttgactatttctgtatgtctccatctattgatgagggtcttactcttttagtataaatagtaccgttaacttccaattaactagttttgacaacattcaaaaaagagtaataaacttcgccttaattttaataatcaacaccctcctagccttactactaataattattacattttgactaccacaactcaacggctacatagaaaaatccaccccttacgagtgcggcttcgaccctatatcccccgcccgcgtccctttctccataaaattcttcttagtagctattaccttcttattatttgatctagaaattgccctccttttacccctaccatgagccctacaaacaactaacctgccactaatagttatgtcatccctcttattaatcatcatcctagccctaagtctggcctatgagtgactacaaaaaggattagactgagctgaattggtatatagtttaaacaaaacgaatgatttcgactcattaaattatgataatcatatttaccaaatgcccctcatttacataaatattatactagcatttaccatctcacttctaggaatactagtatatcgctcacacctcatatcctccctactatgcctagaaggaataatactatcgctgttcattatagctactctcataaccctcaacacccactccctcttagccaatattgtgcctattgccatactagtctttgccgcctgcgaagcagcggtgggcctagccctactagtctcaatctccaacacatatggcctagactacgtacataacctaaacctactccaatgctaaaactaatcgtcccaacaattatattactaccactgacatgactttccaaaaaacacataatttgaattaacacaaccacccacagcctaattattagcatcatccccctactattttttaaccaaatcaacaacaacctatttagctgttccccaaccttttcctccgaccccctaacaacccccctcctaatactaactacctgactcctacccctcacaatcatggcaagccaacgccacttatccagtgaaccactatcacgaaaaaaactctacctctctatactaatctccctacaaatctccttaattataacattcacagccacagaactaatcatattttatatcttcttcgaaaccacacttatccccaccttggctatcatcacccgatgaggcaaccagccagaacgcctgaacgcaggcacatacttcctattctacaccctagtaggctcccttcccctactcatcgcactaatttacactcacaacaccctaggctcactaaacattctactactcactctcactgcccaagaactatcaaactcctgagccaacaacttaatatgactagcttacacaatagcttttatagtaaagatacctctttacggactccacttatgactccctaaagcccatgtcgaagcccccatcgctgggtcaatagtacttgccgcagtactcttaaaactaggcggctatggtataatacgcctcacactcattctcaaccccctgacaaaacacatagcctaccccttccttgtactatccctatgaggcataattataacaagctccatctgcctacgacaaacagacctaaaatcgctcattgcatactcttcaatcagccacatagccctcgtagtaacagccattctcatccaaaccccctgaagcttcaccggcgcagtcattctcataatcgcccacggacttacatcctcattactattctgcctagcaaactcaaactacgaacgcactcacagtcgcatcataatcctctctcaaggacttcaaactctactcccactaatagctttttgatgacttctagcaagcctcgctaacctcgccttaccccccactattaacctactgggagaactctctgtgctagtaaccacgttctcctgatcaaatatcactctcctacttacaggactcaacatactagtcacagccctatactccctctacatatttaccacaacacaatggggctcactcacccaccacattaacaacataaaaccctcattcacacgagaaaacaccctcatgttcatacacctatcccccattctcctcctatccctcaaccccgacatcattaccgggttttcctcttgtaaatatagtttaaccaaaacatcagattgtgaatctgacaacagaggcttacgaccccttatttaccgagaaagctcacaagaactgctaactcatgcccccatgtctaacaacatggctttctcaacttttaaaggataacagctatccattggtcttaggccccaaaaattttggtgcaactccaaataaaagtaataaccatgcacactactataaccaccctaaccctgacttccctaattccccccatccttaccaccctcgttaaccctaacaaaaaaaactcatacccccattatgtaaaatccattgtcgcatccacctttattatcagtctcttccccacaacaatattcatgtgcctagaccaagaagttattatctcgaactgacactgagccacaacccaaacaacccagctctccctaagcttcaaactagactacttctccataatattcatccctgtagcattgttcgttacatggtccatcatagaattctcactgtgatatataaactcagacccaaacattaatcagttcttcaaatatctactcattttcctaattaccatactaatcttagttaccgctaacaacctattccaactgttcatcggctgagagggcgtaggaattatatccttcttgctcatcagttgatgatacgcccgagcagatgccaacacagcagccattcaagcaatcctatacaaccgtatcggcgatatcggtttcatcctcgccttagcatgatttatcctacactccaactcatgagacccacaacaaatagcccttctaaacgctaatccaagcctcaccccactactaggcctcctcctagcagcagcaggcaaatcagcccaattaggtctccacccctgactcccctcagccatagaaggccccaccccagtctcagccctactccactcaagcactatagttgtagcaggaatcttcttactcatccgcttccaccccctagcagaaaatagcccactaatccaaactctaacactatgcttaggcgctatcaccactctgttcgcagcagtctgcgcccttacacaaaatgacatcaaaaaaatcgtagccttctccacctcaagtcaactaggactcataatagttacaatcggcatcaaccaaccacacctagcattcctgcacatctgtacccacgccttcttcaaagccatactatttatgtgctccgggtccatcatccacaaccttaacaatgaacaagatattcgaaaaataggaggactactcaaaaccatacctctcacttcaacctccctcaccattggcagcctagcattagcaggaatacctttccttacaggtttctactccaaagaccacatcatcgaaaccgcaaacatatcatacacaaacgcctgagccctatctattactctcatcgctacctccctgacaagcgcctatagcactcgaataattcttctcactctaacaggtcaacctcgcttccccacccttactaacattaacgaaaataaccccaccctactaaaccccattaaacgcctggcagccggaagcctattcgcaggatttctcattactaacaacatttcccccgcatcccccttccaaacaacaatccccctctacctaaaactcacagccctcgctgtcactttcctaggacttctaacagccctagacctcaactacctaaccaacaaacttaaaataaaatccccactatgcacattttatttctccaacatactcggattctaccctagcatcacacaccgcacaatcccctatctaggccttcttacgagccaaaacctgcccctactcctcctagacctaacctgactagaaaagctattacctaaaacaatttcacagcaccaaatctccacctccatcatcacctcaacccaaaaaggcataattaaactttacttcctctctttcttcttcccactcatcctaaccctactcctaatcacataacctattcccccgagcaatctcaattacaatatatacaccaacaaacaatgttcaaccagtaactactactaatcaacgcccataatcatacaaagcccccgcaccaataggatcctcccgaatcaaccctgacccctctccttcataaattattcagcttcctacactattaaagtttaccacaaccaccaccccatcatactctttcacccacagcaccaatcctacctccatcgctaaccccactaaaacactcaccaagacctcaacccctgacccccatgcctcaggatactcctcaatagccatcgctgtagtatatccaaagacaaccatcattccccctaaataaattaaaaaaactattaaacccatataacctcccccaaaattcagaataataacacacccgaccacaccgctaacaaccaatactaaacccccataaataggagaaggcttagaagaaaaccccacaaaccccattactaaacccacactcaacagaaacaaagcatacatcattattctcgcacggactacaaccacgaccaatgatatgaaaaaccatcgttgtatttcaactacaagaacaccaatgaccccaatacgcaaaattaaccccctaataaaactaattaaccactcattcatcgacctccccaccccatccaacatctccgcatgatgaaacttcggctcactccttggcgcctgcctgatcctccaaatcaccacaggactattcctagccatgcactactcaccagacgcctcaaccgccttttcatcaatcgcccacatcactcgagacgtaaattatggctgaatcatccgctaccttcacgccaatggcgcctcaatattctttatctgcctcttcctacacatcggacgaggcctatattacggatcatttctctactcagaaacctgaaacatcggcattatcctcctgcttgcaactatagcaacagccttcataggctatgtcctcccgtgaggccaaatatcattctgaggggccacagtaattacaaacttactatccgccatcccatacattgggacagacctagttcaatgaatctgaggaggctactcagtagacagtcccaccctcacacgattctttacctttcacttcatcttacccttcattattgcaaccctagcagcactccacctcctattcttgcacgaaacgggatcaaacaaccccctaggaatcacctcccattccgataaaatcaccttccacccttactacacaatcaaagacgccctcggcttacttctcttccttctctccttaatgacattaacactattctcaccagacctcctaggcgacccagacaattataccctagccaaccccttaaacacccctccccacatcaagcccgaatgatatttcctattcgcctacacaattctccgatccgtccctaacaaactaggaggcgtccttgccctattactatccatcctcatcctagcaataatccccatcctccatatatccaaacaacaaagcataatatttcgcccactaagccaatcactttattgactcctagccgcagacctcctcattctaacctgaatcggaggacaaccagtaagctacccttttaccatcattggacaagtagcatccgtactatacttcacaacaatcctaatcctaataccaactatctccctaattgaaaacaaaatactcaaatgggcctgtccttgtagtataaactaatacaccagtcttgtaaaccggagatgaaaacctttttccaaggacaaatcagagaaaaagtctttaactccaccattagcacccaaagctaagattctaatttaaactattctctgttctttcatggggaagcagatttgggtaccacccaagtattgactcacccatcaacaaccgctatgtatttcgtacattactgccagccaccatgaatattgtacggtaccataaatacttgaccacctgtagtacataaaaacccaatccacatcaaaaccccctccccatgcttacaagcaagtacagcaatcaaccttcaactatcacacatcaactgcaactccaaagccacctctcacccactaggataccaacaaacctacccacccttaacagtacatagtacataaagccatttaccgtacatagcacattacagtcaaatcccttctcgcccccatggatgacccccctcagataggagtcccttgaccaccatcctccgtgaaatcaatatcccgcacaagagtgctactctcctcgctccgggcccataacacttgggggtagctaaagtgaactgtatccgacatctggttcctacttcagggccataaagcctaaatagcccacacgttccccttaaataagacatcacgatg

SEQ ID NO: 216 - DNA, 16569 bp, Homo sapiens mitochondrial
  3107: "n" refers to a nucleotide at position 3107 of the Cambridge Reference Sequence (CRS, Anderson et al. 1981 Nature 290:457-465), later determined to be absent from the human mtDNA sequence according to the revised CRS (rCRS, Andrews et al. 1999 Nature Genetics 23:147); "n" therefore represents a single nucleotide deletion at a position corresponding to nucleotide 3107 of SEQ ID NO:1 as provided herein.
gatcacaggtctatcaccctattaaccactcacgggagctctccatgcatttggtattttcgtctggggggtgtgcacgcgatagcattgcgagacgctggagccggagcaccctatgtcgcagtatctgtctttgattcctgcctcatcccattatttatcgcacctacgttcaatattatagtcgaacatacctactaaagtgtgttaattaattaatgcttgtaggacataataataacaattaaatgtctgcacagccgctttccacacagacatcataacaaaaaatttccaccaaaccccccctcccccccgcttctggccacagcacttaaacacatctctgccaaaccccgaaaacaaagaaccctaacaccagcctaaccagatttcaaattttatcttttggcggtatgcacttttaacagtcaccccccaactaacacattattttcccctcccactcccatactactaatctcatcaatacaacccccgcccatcctacccagcacacacaccgctgctaaccccataccccgaaccaaccaaaccccaaagacaccccccacagtttatgtagcttacctcctcaaagcaatacactgaaaatgtttagacgggctcacatcaccccataaacaaataggtttggtcctagcctttctattagctcttagtaagattacacatgcaagcatccccactccagtgagttcaccctctaaatcaccacgatcaaaagggacaagcatcaagcacgcaacaatgcagctcaaaacgcttagcctagccacacccccacgggaaacagcagtgataaacctttagcaataaacgaaagtttaactaagctatactaaccccagggttggtcaatttcgtgccagccaccgcggtcacacgattaacccaagtcaatagaagccggcgtaaagagtgttttagatcaccccctccccaataaagctaaaactcacctgagttgtaaaaaactccagttgacacaaaataaactacgaaagtggctttaacatatctgaacacacaatagctaagacccaaactgggattagataccccactatgcttagccctaaacctcaacagttaaatcaacaaaactgctcgccagaacactacgagccacagcttaaaactcaaaggacctggcggtgcttcatatccctctagaggagcctgttctgtaatcgataaaccccgatcaacctcaccacctcttgctcagcctatataccgccatcttcagcaaaccctgatgaaggctacaaagtaagcgcaagtacccacgtaaagacgttaggtcaaggtgtagcccatgaggtggcaagaaatgggctacattttctaccccagaaaactacgatagcccttatgaaacttaagggtcgaaggtggatttagcagtaaactaagagtagagtgcttagttgaacagggccctgaagcgcgtacacaccgcccgtcaccctcctcaagtatacttcaaaggacatttaactaaaacccctacgcatttatatagaggagacaagtcgtaacatggtaagtgtactggaaagtgcacttggacgaaccagagtgtagcttaacacaaagcacccaacttacacttaggagatttcaacttaacttgaccgctctgagctaaacctagccccaaacccactccaccttactaccagacaaccttagccaaaccatttacccaaacaaagtataggcgatagaaattgaaacccggcgcaatagatatagtaccgcaagggaaagatgaaaaattataaccaagcataatatagcaaggactaacccctataccttctgcataatgaattaactagaaataactttgcaaggagagccaaagctaagacccccgaaaccagacgagctacctaagaacagctaaaagagcacacccgtctatgtagcaaaatagtgggaagatttataggtagaggcgacaaacctaccgagcctggtgatagctggttgtccaagatagaatcttagttcaactttaaatttgcccacagaaccctctaaatccccttgtaaatttaactgttagtccaaagaggaacagctctttggacactaggaaaaaaccttgtagagagagtaaaaaatttaacacccatagtaggcctaaaagcagccaccaattaagaaagcgttcaagctcaacacccactacctaaaaaatcccaaacatataactgaactcctcacacccaattggaccaatctatcaccctatagaagaactaatgttagtataagtaacatgaaaacattctcctccgcataagcctgcgtcagatcaaaacactgaactgacaattaacagcccaatatctacaatcaaccaacaagtcattattaccctcactgtcaacccaacacaggcatgctcataaggaaaggttaaaaaaagtaaaaggaactcggcaaatcttaccccgcctgtttaccaaaaacatcacctctagcatcaccagtattagaggcaccgcctgcccagtgacacatgtttaacggccgcggtaccctaaccgtgcaaaggtagcataatcacttgttccttaaatagggacctgtatgaatggctccacgagggttcagctgtctcttacttttaaccagtgaaattgacctgcccgtgaagaggcgggcatgacacagcaagacgagaagaccctatggagctttaatttattaatgcaaacaatacctaacagacccacaggtcctaaactaccaaacctgcattaaaaatttcggttggggcgacctcggagcagaacccaacctccgagcagtacatgctaagacttcaccagtcaaagcgaactaccatactcaattgatccaataacttgaccaacggaacaagttaccctagggataacagcgcaatcctattctagagtccatatcaacaatagggtttacgacctcgatgttggatcaggacatcccgatggtgcagccgctattaaaggttcgtttgttcaacgattaaagtcctacgtgatctgagttcagaccggagtaatccaggtcggtttctatctacnttcaaattcctccctgtacgaaaggacaagagaaataaggcctacttcacaaagcgccttcccccgtaaatgatatcatctcaacttagtattatacccacacccacccaagaacagggtttgttaagatggcagagcccggtaatcgcataaaacttaaaactttacagtcagaggttcaattcctcttcttaacaacacacccatggccaacctcctactcctcattgtacccattctaatcgcaatggcattcctaatgcttaccgaacgaaaaattctaggctatatacaactacgcaaaggccccaacgttgtaggcccctacgggctactacaacccttcgctgacgccataaaactcttcaccaaagagcccctaaaacccgccacatctaccatcaccctctacatcaccgccccgaccttagctctcaccatcgctcttctactatgaacccccctccccatacccaaccccctggttaacctcaacctaggcctcctatttattctagccacctctagcctagccgtttactcaatcctctgatcaggatgagcatcaaactcaaactacgccctaatcggcgcactgcgagcagtagcccaaacaatctcatatgaagtcaccctagccatcattctactatcaacattactaataagtggctcctttaacctctccacccttatcacaacacaagaacacctctgattactcctgccatcatgacccttggccataatatgatttatctccacactagcagagaccaaccgaacccccttcgaccttgccgaaggggagtccgaactagtctcaggcttcaacatcgaatacgccgcaggccccttcgccctattcttcatagccgaatacacaaacattattataataaacaccctcaccactacaatcttcctaggaacaacatatgacgcactctcccctgaactctacacaacatattttgtcaccaagaccctacttctgacctccctgttcttatgaattcgaacagcatacccccgattccgctacgaccaactcatacacctcctatgaaaaaacttcctaccactcaccctagcattacttatatgatatgtctccatacccattacaatctccagcattccccctcaaacctaagaaatatgtctgataaaagagttactttgatagagtaaataataggagcttaaacccccttatttctaggactatgagaatcgaacccatccctgagaatccaaaattctccgtgccacctatcacaccccatcctaaagtaaggtcagctaaataagctatcgggcccataccccgaaaatgttggttatacccttcccgtactaattaatcccctggcccaacccgtcatctactctaccatctttgcaggcacactcatcacagcgctaagctcgcactgattttttacctgagtaggcctagaaataaacatgctagcttttattccagttctaaccaaaaaaataaaccctcgttccacagaagctgccatcaagtatttcctcacgcaagcaaccgcatccataatccttctaatagctatcctcttcaacaatatactctccggacaatgaaccataaccaatactaccaatcaatactcatcattaataatcataatggctatagcaataaaactaggaatagccccctttcacttctgagtcccagaggttacccaaggcacccctctgacatccggcctgcttcttctcacatgacaaaaactagcccccatctcaatcatataccaaatctctccctcactaaacgtaagccttctcctcactctctcaatcttatccatcatagcaggcagttgaggtggattaaaccaaacccagctacgcaaaatcttagcatactcctcaattacccacataggatggataatagcaattctaccgtacaaccctaacataaccattcttaatttaactatttatattatcctaactactaccgcattcctactactcaacttaaactccagcaccacgaccctactactatctcgcacctgaaacaagctaacatgactaacacccttaattccatccaccctcctctccctaggaggcctgcccccgctaaccggctttttgcccaaatgggccattatcgaagaattcacaaaaaacaatagcctcatcatccccaccatcatagccaccatcaccctccttaacctctacttctacctacgcctaatctactccacctcaatcacactactccccatatccaacaacgtaaaaataaaatgacagtttgaacatacaaaacccaccccattcctccccacactcatcgcccttaccacgctactcctacctatctccccttttatactaataatcttatagaaatttaggttaaatacagaccaagagccttcaaagccctcagtaagttgcaatacttaatttctgtaacagctaaggactgcaaaaccccactctgcatcaactgaacgcaaatcagccactttaattaagctaagccctcactagaccaatgggacttaaacccacaaacacttagttaacagctaagcaccctaatcaactggcttcaatctacttctcccgccgccgggaaaaaaggcgggagaagccccggcaggtttgaagctgcttcttcgaatttgcaattcaatatgaaaatcacctcggagctggtaaaaagaggcctaacccctgtctttagatttacagtccaatgcttcactcagccattttacctcacccccactgatgttcgccgaccgttgactattctctacaaaccacaaagacattggaacactatacctattattcggcgcatgagctggagtcctaggcacagctctaagcctccttattcgagccgagctgggccagccaggcaaccttctaggtaacgaccacatctacaacgttatcgtcacagcccatgcatttgtaataatcttcttcatagtaatacccatcataatcggaggctttggcaactgactagttcccctaataatcggtgcccccgatatggcgtttccccgcataaacaacataagcttctgactcttacctccctctctcctactcctgctcgcatctgctatagtggaggccggagcaggaacaggttgaacagtctaccctcccttagcagggaactactcccaccctggagcctccgtagacctaaccatcttctccttacacctagcaggtgtctcctctatcctaggggccatcaatttcatcacaacaattatcaatataaaaccccctgccataacccaataccaaacgcccctcttcgtctgatccgtcctaatcacagcagtcctacttctcctatctctcccagtcctagctgctggcatcactatactactaacagaccgcaaccttaacaccaccttcttcgaccccgccggaggaggagaccccattctataccaacacctattctgatttttcggtcaccctgaagtttatattcttatcctaccaggcttcggaataatctcccatattgtaacttactactccggaaaaaaagaaccatttggatacataggtatggtctgagctatgatatcaattggcttcctagggtttatcgtgtgagcacaccatatatttacagtaggaatagacgtagacacacgagcatatttcacctccgccaccataatcatcgctatccccaccggcgtcaaagtatttagctgactcgccacactccacggaagcaatatgaaatgatctgctgcagtgctctgagccctaggattcatctttcttttcaccgtaggtggcctgactggcattgtattagcaaactcatcgctagacatcgtactacacgacacgtactacgttgtagctcacttccactatgtcctatcaataggggctgtatttgccatcataggaggcttcattcactgatttcccctattctcaggctacaccctagaccaaacctacgccaaaatccatttcgctatcatattcatcggcgtaaatctaactttcttcccacaacactttctcggcctatccggaatgccccgacgttactcggactaccccgatgcatacaccacatgaaatatcctatcatctgtaggctcattcatttctctaacagcagtaatattaataattttcatgatttgagaagccttcgcttcgaagcgaaaagtcctaatagtagaagaaccctccataaacctggagtgactacatggatgccccccaccctaccacacattcgaagaacccgtatacataaaatctagacaaaaaaggaaggaatcgaaccccccaaagctggtttcaagccaaccccatggcctccatgactttttcaaaaagatattagaaaaaccatttcataactttgtcaaagttaaattataggctaaatcctatatatcttaatggcacatgcagcgcaagtaggtctacaagacgctacttcccctatcatagaagagcttatcacctttcatgatcacgccctcataatcattttccttatctgcttcctagtcctgtatgcccttttcctaacactcacaacaaaactaactaatactaacatctcagacgctcaggaaatagaaaccgtctgaactatcctgcccgccatcatcctagtcctcatcgccctcccatccctacgcatcctttacataacagacgaggtcaacgatccctctcttaccatcaaatcaattggccaccaatggtactgaacctacgagtacaccgactacggcggactaatcttcaactcctacatacttcccccattattcctagaaccaggcgacctgcgactccttgacgttgacaatcgagtagtactcccgattgaagcccccattcgtataataattacatcacaagacgtcttgcactcatgagctgtccccacattaggcttaaaaacagatgcaattcccggacgtctaaaccaaaccactttcaccgctacacgaccgggggtatactacggtcaatgctctgaaatctgtggagcaaaccacagtttcatgcccatcgtcctagaattaattcccctaaaaatctttgaaatggggcccgtatttaccctatagcaccccctctaccccctctagagcccactgtaaagctaacttagcattaaccttttaagttaaagattaagagaaccaacacctctttacagtgaaatgccccaactaaatactaccgtatggcccaccataattacccccatactccttacactattcctcatcacccaactaaaaatattaaacacaaactaccacttacctccctcaccaaagcccataaaaataaaaaattataacaaaccctgagaaccaaaatgaacgaaaatctgttcgcttcattcattgcccccacaatcctaggcctacccgccgcagtactgatcattctatttccccctctattgatccccacctccaaatatctcatcaacaaccgactaattaccacccaacaatgactaatcaaactaacctcaaaacaaatgatagccatacacaacactaaaggacgaacctgatctcttatactagtatccttaatcatttttattgccacaactaacctcctcggactcctgcctcactcatttacaccaaccacccaactatctataaacctagccatggccatccccttatgagcgggcgcagtgattataggctttcgctctaagattaaaaatgccctagcccacttcttaccacaaggcacacctacaccccttatccccatactagttattatcgaaaccatcagcctactcattcaaccaatagccctggccgtacgcctaaccgctaacattactgcaggccacctactcatgcacctaattggaagcgccaccctagcaatatcaaccattaaccttccctctacacttatcatcttcacaattctaattctactgactatcctagaaatcgctgtcgccttaatccaagcctacgttttcacacttctagtaagcctctacctgcacgacaacacataatgacccaccaatcacatgcctatcatatagtaaaacccagcccatgacccctaacaggggccctctcagccctcctaatgacctccggcctagccatgtgatttcacttccactccataacgctcctcatactaggcctactaaccaacacactaaccatataccaatgatggcgcgatgtaacacgagaaagcacataccaaggccaccacacaccacctgtccaaaaaggccttcgatacgggataatcctatttattacctcagaagtttttttcttcgcaggatttttctgagccttttaccactccagcctagcccctaccccccaactaggagggcactggcccccaacaggcatcaccccgctaaatcccctagaagtcccactcctaaacacatccgtattactcgcatcaggagtatcaatcacctgagctcaccatagtctaatagaaaacaaccgaaaccaaataattcaagcactgcttattacaattttactgggtctctattttaccctcctacaagcctcagagtacttcgagtctcccttcaccatttccgacggcatctacggctcaacattttttgtagccacaggcttccacggacttcacgtcattattggctcaactttcctcactatctgcttcatccgccaactaatatttcactttacatccaaacatcactttggcttcgaagccgccgcctgatactggcattttgtagatgtggtttgactatttctgtatgtctccatctattgatgagggtcttactcttttagtataaatagtaccgttaacttccaattaactagttttgacaacattcaaaaaagagtaataaacttcgccttaattttaataatcaacaccctcctagccttactactaataattattacattttgactaccacaactcaacggctacatagaaaaatccaccccttacgagtgcggcttcgaccctatatcccccgcccgcgtccctttctccataaaattcttcttagtagctattaccttcttattatttgatctagaaattgccctccttttacccctaccatgagccctacaaacaactaacctgccactaatagttatgtcatccctcttattaatcatcatcctagccctaagtctggcctatgagtgactacaaaaaggattagactgagccgaattggtatatagtttaaacaaaacgaatgatttcgactcattaaattatgataatcatatttaccaaatgcccctcatttacataaatattatactagcatttaccatctcacttctaggaatactagtatatcgctcacacctcatatcctccctactatgcctagaaggaataatactatcgctgttcattatagctactctcataaccctcaacacccactccctcttagccaatattgtgcctattgccatactagtctttgccgcctgcgaagcagcggtaggcctagccctactagtctcaatctccaacacatatggcctagactacgtacataacctaaacctactccaatgctaaaactaatcgtcccaacaattatattactaccactgacatgactctccaaaaaacacataatttgaatcaacacaaccacccacagcctaattattagcatcatccccctactattttttaaccaaatcaacaacaacctatttagctgttccccaaccttttcctccgaccccctaacaacccccctcctaatactaactacctgactcctacccctcacaatcatggcaagccaacgccacttatccagtgaaccactatcacgaaaaaaactctacctctctatactaatctccctacaaatctccttaattataacattcacagccacagaactaatcatattttatatcttcttcgaaaccacacttatccccaccttggctatcatcacccgatgaggcaaccagccagaacgcctgaacgcaggcacatacttcctattctacaccctagtaggctcccttcccctactcatcgcactaatttacactcacaacaccctaggctcactaaacattctactactcactctcactgcccaagaactatcaaactcctgagccaacaacttaatatgactagcttacacaatagcttttatagtaaagatacctctttacggactccacttatgactccctaaagcccatgtcgaagcccccatcgctgggtcaatagtacttgccgcagtactcttaaaactaggcggctatggtataatacgcctcacactcattctcaaccccctgacaaaacacatagcctaccccttccttgtactatccctatgaggcataattataacaagctccatctgcctacgacaaacagacctaaaatcgctcattgcatactcttcaatcagccacatagccctcgtagtaacagccattctcatccaaaccccctgaagcttcaccggcgcagtcattctcataatcgcccacggacttacatcctcattactattctgcctagcaaactcaaactacgaacgcactcacagtcgcatcataatcctctctcaaggacttcaaactctactcccactaatagctttttgatgacttctagcaagcctcgctaacctcgccttaccccccactattaacctactgggagaactctctgtgctagtaaccacgttctcctgatcaaatatcactctcctacttacaggactcaacatactagtcacagccctatactccctctacatatttaccacaacacaatggggctcactcacccaccacattaacaacataaaaccctcattcacacgagaaaacaccctcatgttcatacacctatcccccattctcctcctatccctcaaccccgacatcattaccgggttttcctcttgtaaatatagtttaaccaaaacatcagattgtgaatctgacaacagaggcttacgaccccttatttaccgagaaagctcacaagaactgctaactcatgcccccatgtctaacaacatggctttctcaacttttaaaggataacagctatccattggtcttaggccccaaaaattttggtgcaactccaaataaaagtaataaccatgcacactactataaccaccctaaccctgacttccctaattccccccatccttaccaccctcgttaaccctaacaaaaaaaactcatacccccattatgtaaaatccattgtcgcatccacctttattatcagtctcttccccacaacaatattcatgtgcctagaccaagaagtcattatctcgaactgacactgagccacaacccaaacaacccagctctccctaagcttcaaactagactacttctccataatattcatccctgtagcattgttcgttacatggtccatcatagaattctcactgtgatatataaactcagacccaaacattaatcagttcttcaaatatctactcattttcctaattaccatactaatcttagttaccgctaacaacctattccaactgttcatcggctgagagggcgtaggaattatatccttcttgctcatcagttgatgatacgcccgagcagatgccaacacagcagccattcaagcaatcctatacaaccgtatcggcgatatcggtttcatcctcgccttagcatgatttatcctacactccaactcatgagacccacaacaaatagcccttctaaacgctaatccaagcctcaccccactactaggcctcctcctagcagcagcaggcaaatcagcccaattaggtctccacccctgactcccctcagccatagaaggccccaccccagtctcagccctactccactcaagcactatagttgtagcaggagtcttcttactcatccgcttccaccccctagcagaaaatagcccactaatccaaactctaacactatgcttaggcgctatcaccactctgttcgcagcagtctgcgcccttacacaaaatgacatcaaaaaaatcgtagccttctccacttcaagtcaactaggactcataatagttacaatcggcatcaaccaaccacacctagcattcctgcacatctgtacccacgccttcttcaaagccatactatttatgtgctccgggtccatcatccacaaccttaacaatgaacaagatattcgaaaaataggaggactactcaaaaccatacctctcacttcaacctccctcaccattggcagcctagcattagcaggaatacctttcctcacaggtttctattccaaagaccacatcatcgaaaccgcaaacatatcatacacaaacgcctgagccctatctattactctcatcgctacctccctgacaagcgcctatagcactcgaataattcttctcaccctaacaggtcaacctcgcttccctacccttactaacattaacgaaaataaccccaccctactaaaccccattaaacgcctggcagccggaagcctattcgcaggatttctcattactaacaacatttcccccgcatcccccttccaaacaacaatccccctccacctaaaactcacagccctcgctgtcactttcctaggacttctaacagccctagacctcaactacctaaccaacaaacttaaaataaaatacccactatgcacattttatttctccaacatactcggattctaccctagcatcacacaccgcacaatcccctatctaggccttcttacgagccaaaacctgcccctactcctcctagacctaacctgactagaaaagctattacctaaaacaatttcacagcaccaaatctccgcctccatcatcacctcaacccaaaaaggcataattaaactttacttcctctctttcttcttcccactcatcctaaccctactcctaatcacataacctattcccccgagcaatctcaattacaacatatacaccaacaaacaatgttcagccagtaactactactaatcaacgcccataatcatacaaagcccccgcaccaataggatcctcccgaatcaaccctgacccctctccttcataaattattcagcttcctacactattaaagtttaccacaaccaccaccccatcatactctttcacccacagcaccaatcctacctccatcgctaaccccactaaaacactcaccaagacctcaacccctgacccccatgcctcaggatactcctcaatagccatcgctgtagtatatccaaagacaaccatcattccccctaaataaattaaaaaaactattaaacccatataacctcccccaaaattcagaataataacacacccaaccacaccgctaacaatcaatactaaacccccataaataggagaaggcttagaagaaaaccccacaaaccccattactaaacccacactcaacagaaacaaagcatacatcattattctcgcacggactacaaccacgaccaatgatatgaaaaaccatcgttgtatttcaactacaagaacaccaatgaccccaatacgcaaaattagccccctaataaaattaattaaccactcattcatcgacctccccaccccatccaacatctccgcatgatgaaacttcggctcactccttggcgcctgcctgatcctccaaatcaccacaggactattcctagccatgcactactcaccagacgcctcaaccgccttttcatcaatcgcccacatcactcgagacgtaaattatggctgaatcatccgctaccttcacgccaatggcgcctcaatattctttatctgcctcttcctacacatcgggcgaggcctatattacggatcatttctctactcagaaacctgaaacatcggcattatcctcctgcttgcaaccatagcaacagccttcataggctatgtcctcccgtgaggccaaatatcattctgaggggccacagtaattacaaacttactatccgccatcccatacattgggacagacctagttcaatgaatctgaggaggctactcagtagacagtcccaccctcacacgattctttacctttcacttcatcttgcccttcattattgcagccctagcagcactccacctcctattcttgcacgaaacgggatcaaacaaccccctaggaatcacctcccattccgataaaatcaccttccacccttactacacaatcaaagacgccctcggcttacttctcttccttctctccttaatgacattaacactattctcaccagacctcctaggcgacccagacaattataccctagccaaccccttaaacacccctccccacatcaagcccgaatgatatttcctattcgcctacacaattctccgatccgtccctaacaaactaggaggcgtccttgccctattactatccatcctcatcctagcaataatccccatcctccatatatccaaacaacaaagcataatatttcgcccactaagccaatcactttattgactcctagccgcagacctcctcattctaacctgaatcggaggacaaccagtaagctacccttttaccatcattggacaagtagcatccgtactatacttcacaacaatcctaatcctaataccaactatctccctaattgaaaacaaaatactcaaatgggcctgtccttgtagtataaactaatacaccagtcttgtaaaccggagatgaaaacctttttccaaggacaaatcagagaaaaagtctttaactccaccattagcacccaaagctaagattctaatttaaactattctctgttctttcatggggaagcagatttgggtaccacccaagtattgactcacccatcaacaaccgctatgtatttcgtacattactgccagccaccatgaatattgcacggtaccataaatacttgaccacctgtagtacataaaaacccaatccacatcaaaaccccccccccatgcttacaagcaagtacagcaatcaaccttcaactatcacacatcaactgcaactccaaagccaccccttacccattaggatatcaacaaacctacccgcccttaacagtacatagcacataaagccatttaccgtacatagcacattacagtcaaatcccttctcgtccccatggatgacccccctcagataggggtcccttgaccaccatcctccgtgaaatcaatatcccgcacaagagtgctactctcctcgctccgggcccataacacttgggggtagctaaagtgaactgtatccgacatctggttcctacttcagggccataaagcctaaatagcccacacgttccccttaaataagacatcacgatg

SEQ ID NO: 217 - DNA, 16562 bp, Homo sapiens mitochondrial
  3109: "n" refers to a nucleotide at position 3107 of the Cambridge Reference Sequence (CRS, Anderson et al. 1981 Nature 290:457-465), later determined to be absent from the human mtDNA sequence according to the revised CRS (rCRS, Andrews et al. 1999 Nature Genetics 23:147); "n" therefore represents a single nucleotide deletion at a position corresponding to nucleotide 3107 of SEQ ID NO:1 as provided herein.
gatcacaggtctatcaccctattaaccactcacgggagctctccatgcatttggtattttcgtctggggggtgtgcacgcgatagcattgcgagacgctggagccggagcaccctatgtcgcagtatctgtctttgattcctgcctcattctattatttatcgcacctacgttcaatattacaggcgagcatacttactgaagtgtgttaattaattaatgcttgtaggacataataataacaattgaatgtctgcacagccgctttccacacagacatcataacaaaaaatttccaccaaaccccccctcccccccgcttctggccacagcacttaaacacatctctgccaaaccccaaaaacaaagaaccctaacaccagcctaaccagatttcaaattttatcttttggcggtatgcacttttaacagtcaccccccaactaacacattattttcccctcccactcccatactactaatctcatcaatacaacccccgcccatcctacccagcacacacacaccgctgctaaccccataccccgaaccaaccaaaccccaaagacaccccccacagtttatgtagcttacctcctcaaagcaatacactgaaaatgtttagacgggctcacatcaccccataaacaaataggtttggtcctagcctttctattagctcttagtaagattacacatgcaagcatccccgttccagtgagttcaccctctaaatcaccacgatcaaaagggacaagcatcaagcacgcagcaatgcagctcaaaacgcttagcctagccacacccccacgggaaacagcagtgattaacctttagcaataaacgaaagtttaactaagctatactaaccccagggttggtcaatttcgtgccagccaccgcggtcacacgattaacccaagtcaatagaagccggcgtaaagagtgttttagatcaccccctccccaataaagctaaaactcacctgagttgtaaaaaactccagttgacacaaaatagactacgaaagtggctttaacatatctgaacacacaatagctaagacccaaactgggattagataccccactatgcttagccctaaacctcaacagttaaatcaacaaaactgctcgccagaacactacgagccacagcttaaaactcaaaggacctggcggtgcttcatatccctctagaggagcctgttctgtaatcgataaaccccgatcaacctcaccacctcttgctcagcctatataccgccatcttcagcaaaccctgatgaaggctacaaagtaagcgcaagtacccacgtaaagacgttaggtcaaggtgtagcccatgaggtggcaagaaatgggctacattttctaccccagaaaactacgatagcccttatgaaacttaagggtcgaaggtggatttagcagtaaactgagagtagagtgcttagttgaacagggccctgaagcgcgtacacaccgcccgtcaccctcctcaagtatacttcaaaggacatttaactaaaacccctacgcatttatatagaggagacaagtcgtaacatggtaagtgtactggaaagtgcacttggacgaaccagagtgtagcttaacacaaagcacccaacttacacttaggagatttcaacttaacttgaccgctctgagctaaacctagccccaaacccactccaccttactaccagacaaccttagccaaaccatttacccaaataaagtataggcgatagaaattgaaacctggcgcaatagatatagtaccgcaagggaaagatgaaaaattataaccaagcataatatagcaaggactaacccctataccttctgcataatgaattaactagaaataactttgcaaggagagccaaagctaagacccccgaaaccagacgagctacctaagaacagctaaaagagcacacccgtctatgtagcaaaatagtgggaagatttataggtagaggcgacaaacctaccgagcctggtgatagctggttgtccaagatagaatcttagttcaactttaaatttgcccacagaaccctctaaatccccttgtaaatttaactgttagtccaaagaggaacagctctttggacactaggaaaaaaccttgtagagagagtaaaaaatttaacacccatagtaggcctaaaagcagccaccaattaagaaagcgttcaagctcaacacccactacctaaaaaatcccaaacatataactgaactcctcacacccaattggaccaatctatcaccctatagaagaactaatgttagtataagtaacatgaaaacattctcctccgcataagcctgcgtcagatcaaaacactgaactgacaattaacagcccaatatctacaatcaaccaacaagtcattattaccctcactgtcaacccaacacaggcatgctcataaggaaaggttaaaaaaagtaaaaggaactcggcaaatcttaccccgcctgtttaccaaaaacatcacctctagcatcaccagtattagaggcaccgcctgcccagtgacacatgtttaacggccgcggtaccctaaccgtgcaaaggtagcataatcacttgttccttaaatagggacctgtatgaatggctccacgagggttcagctgtctcttacttttaaccagtgaaattgacctgcccgtgaagaggcgggcatgacacagcaagacgagaagaccctatggagctttaatttattaatgcaaacagtacctaacaaacccacaggtcctaaactaccaaacctgcattaaaaatttcggttggggcgacctcggagcagaacccaacctccgagcagtacatgctaagacttcaccagtcaaagcgaactactatactcaattgatccaataacttgaccaacggaacaagttaccctagggataacagcgcaatcctattctagagtccatatcaacaatagggtttacgacctcgatgttggatcaggacatcccgatggtgcagccgctattaaaggttcgtttgttcaacgattaaagtcctacgtgatctgagttcagaccggagtaatccaggtcggtttctatctacnttcaaattcctccctgtacgaaaggacaagagaaataaggcctacttcacaaagcgccttcccccgtaaatgatatcatctcaacttagtattatacccacacccacccaagaacagggtttgttaagatggcagagcccggtaatcgcataaaacttaaaactttacagtcagaggttcaattcctcttcttaacaacatacccatggccaacctcctactcctcattgtacccattctaatcgcaatggcattcctaatgcttaccgaacgaaaaattctaggctatatacaactacgcaaaggccccaacgttgtaggcccctacgggctactacaacccttcgctgacgccataaaactcttcaccaaagagcccctaaaacccgccacatctaccatcaccctctacatcaccgccccgaccttagctctcaccatcgctcttctactatgaacccccctccccatacccaaccccctggtcaacctcaacctaggcctcctatttattctagccacctctagcctagccgtttactcaatcctctgatcagggtgagcatcaaactcaaactacgccctgatcggcgcactgcgagcagtagcccaaacaatctcatatgaagtcaccctagccatcattctactatcaacattactaataagtggctcctttaacctctccacccttatcacaacacaagaacacctctgattactcctgccatcatgacccttggccataatatgatttatctccacactagcagagaccaaccgaacccccttcgaccttgccgaaggggagtccgaactagtctcaggcttcaacatcgaatacgccgcaggccccttcgccctattcttcatagccgaatacacaaacattattataataaacaccctcaccactacaatcttcctaggaacaacatatgacgcactctcccctgaactctacacaacatattttgtcaccaagaccctacttctaacctccctgttcttatgaattcgaacagcatacccccgattccgctacgaccaactcatacacctcctatgaaaaaacttcctaccactcaccctagcattacttatatgatatgtctccatacccattacaatctccagcattccccctcaaacctaagaaatatgtctgataaaagagttactttgatagagtaaataataggagcttaaacccccttatttctaggactatgagaatcgaacccatccctgagaatccaaaattctccgtgccacctatcacaccccgtcctaaagtaaggtcagctaaataagctatcgggcccataccccgaaaatgttggttatacccttcccgtactaattaatcccctggcccaacccgtcatctactctaccatctttgcaggcacactcatcacagcgctaagctcgcactgattttttacctgagtaggcctagaaataaacatgctagcttttattccagttctaaccaaaaaaataaaccctcgttccacagaagctgccatcaagtatttcctcacgcaagcaaccgcatccataatccttctaatagctatcctcttcaacaatatactctccggacaatgaaccataaccaatactaccaatcaatactcatcattaataatcataatggctatagcaataaaactaggaatagccccctttcacttctgagtcccagaggttacccaaggcacccctctgacatccggcctgcttcttctcacatgacaaaaactagcccccatctcaatcatataccaaatctctccctcactaaacgtaagccttctcctcactctctcaatcttatccatcatagcaggcagttgaggtggattaaaccaaacccagctacgcaaaatcttagcatactcctcaattacccacataggatgaataatagcagttctaccgtacaaccctaacataaccattcttaatttaactatttatattatcctaactactaccgcattcctactactcaacttaaactccagcaccacgaccctactactatctcgcacctgaaacaagctaacatgactaacacccttaattccatccaccctcctctccctaggaggcctgcccccgctaaccggctttttgcccaaatgggccattatcgaagaattcacaaaaaacaatagcctcatcatccccaccatcatagccaccatcaccctccttaacctctacttctacctacgcctaatctactccacctcaatcacactactccccatatctaacaacgtaaaaataaaatgacagtttgaacatacaaaacccaccccattcctccccacactcatcgcccttaccacgctactcctacctatctccccttttatactaataatcttatagaaatttaggttaaatacagaccaagagccttcaaagccctcagtaagttgcaatacttaatttctgtaacagctaaggactgcaaaaccccactctgcatcaactgaacgcaaatcagccactttaattaagctaagcccttactagaccaatgggacttaaacccacaaacacttagttaacagctaagcaccctaatcaactggcttcaatctacttctcccgccgccgggaaaaaaggcgggagaagccccggcaggtttgaagctgcttcttcgaatttgcaattcaatatgaaaatcacctcggagctggtaaaaagaggcctaacccctgtctttagatttacagtccaatgcttcactcagccattttacctcacccccactgatgttcgccgaccgttgactattctctacaaaccacaaagacattggaacactatacctattattcggcgcatgagctggagtcctaggcacagctctaagcctccttattcgagccgagctgggccagccaggcaaccttctaggtaacgaccacatctacaacgttatcgtcacagcccatgcatttgtaataatcttcttcatagtaatacccatcataatcggaggctttggcaactgactagttcccctaataatcggtgcccccgatatggcgtttccccgcataaacaacataagcttctgactcttacccccctctctcctactcctgctcgcatctgctatagtggaggccggagcaggaacaggttgaacagtctaccctcccttagcagggaactactcccaccctggagcctccgtagacctaaccatcttctccttacacctagcaggtgtctcctctatcttaggggccatcaatttcatcacaacaattatcaatataaaaccccctgccataacccaataccaaacgcccctcttcgtctgatccgtcctaatcacagcagtcctacttctcctatctctcccagtcctagctgctggcatcactatactactaacagaccgcaacctcaacaccaccttcttcgaccccgccggaggaggagaccctattctataccaacacctattctgatttttcggtcaccctgaagtttatattcttatcctaccaggcttcggaataatctcccatattgtaacttactactccggaaaaaaagaaccatttggatacataggtatggtctgagctatgatatcaattggcttcctagggtttatcgtgtgagcacaccatatatttacagtaggaatagacgtagacacacgagcatatttcacctccgctaccataatcatcgctatccccaccggcgtcaaagtatttagctgactcgccacactccacggaagcaatatgaaatgatctgctgcagtgctctgagccctaggattcatctttcttttcaccgtaggtggcctgactggcattgtattagcaaactcatcactagacatcgtactacacgacacgtactacgttgtagctcacttccactatgtcctatcaataggagctgtatttgccatcataggaggcttcattcactgatttcccctattctcaggctacaccctagaccaaacctacgccaaaatccatttcactatcatattcatcggcgtaaatctaactttcttcccacaacactttctcggcctatccggaatgccccgacgttactcggactaccccgatgcatacaccacatgaaacatcctatcatctgtaggctcattcatttctctaacagcagtaatattaataattttcatgatttgagaagccttcgcttcgaagcgaaaagtcctaatagtagaagaaccctccataaacctggagtgactatatggatgccccccaccctaccacacattcgaagaacccgtatacataaaatctagacaaaaaaggaaggaatcgaaccccccaaagctggtttcaagccaaccccatggcctccatgactttttcaaaaaggtattagaaaaaccatttcataactttgtcaaagttaaattataggctaaatcctatatatcttaatggcacatgcagcgcaagtaggtctacaagacgctacttcccctatcatagaagagcttatcacctttcatgatcacgccctcataatcattttccttatctgcttcctagtcctgtatgcccttttcctaacactcacaacaaaactaactaatactaacatctcagacgctcaggaaatagaaaccgtctgaactatcctgcccgccatcatcctagtcctcatcgccctcccatccctacgcatcctttacataacagacgaggtcaacgatccctcccttaccatcaaatcaattggccaccaatggtactgaacctacgagtacaccgactacggcggactaatcttcaactcctacatacttcccccattattcctagaaccaggcgacctgcgactccttgacgttgacaatcgagtagtactcccgattgaagcccccattcgtataataattacatcacaagacgtcttgcactcatgagctgtccccacattaggcttaaaaacagatgcaattcccggacgtctaaaccaaaccactttcaccgctacacgaccgggggtatactacggtcaatgctctgaaatctgtggagcaaaccacagtttcatgcccatcgtcctagaattaattcccctaaaaatctttgaaatagggcccgtatttaccctatagcaccccctctagagcccactgtaaagctaacttagcattaaccttttaagttaaagattaagagaaccaacacctctttacagtgaaatgccccaactaaatactaccgtatggcccaccataattacccccatactccttacactattcctcatcacccaactaaaaatattaaacacaaactaccacctacctccctcaccaaagcccataaaaataaaaaattataacaaaccctgagaaccaaaatgaacgaaaatctgttcgcttcattcattgcccccacaatcctaggcctacccgccgcagtactgatcattctatttccccctctattgatccccacctccaaatatctcatcaacaaccgactaatcaccacccaacaatgactaatcaaactaacctcaaaacaaatgatagccatacacaacactaaaggacgaacctgatctcttatactagtatccttaatcatttttattgccacaactaacctcctcggactcctgcctcactcatttacaccaaccacccaactatctataaacctagccatggccatccccttatgagcgggcgcagtgattataggctttcgctctaagattaaaaatgccctagcccacttcttaccacaaggcacacctacaccccttatccccatactagttattatcgaaaccatcagcctactcattcaaccaatagccctggccgtacgcctaaccgctaacattactgcaggccacctactcatgcacctaattggaagcgccaccctagcaatatcaaccattaaccttccctctacacttatcatcttcacaattctaattctactgactatcctagaaatcgctgtcgccttaatccaagcctacgttttcacacttctagtaagcctctacctgcacgacaacacataatgacccaccaatcacatgcctatcatatagtaaaacccagcccatgacccctaacaggggccctctcagccctcctaatgacctccggcctagccatgtgatttcacttccactccataacgctcctcatactaggcctactaaccaacacactaaccatataccaatgatggcgcgatgtaacacgagaaagcacataccaaggccaccacacaccacctgtccaaaaaggccttcgatacgggataatcctatttattacctcagaagtttttttcttcgcaggatttttctgagccttttaccactccagcctagcccctaccccccaactaggagggcactggcccccaacaggcatcaccccgctaaatcccctagaagtcccactcctaaacacatccgtattactcgcatcaggagtatcaatcacctgagctcaccatagtctaatagaaaacaaccgaaaccaaataattcaagcactgcttattacaattttactgggtctctattttaccctcctacaagcctcagagtacttcgagtctcccttcaccatttccgacggcatctacggctcaacattttttgtagccacaggcttccacggacttcacgtcattattggctcaactttcctcactatctgcttcatccgccaactaatatttcactttacatccaaacatcactttggcttcgaagccgccgcctgatactggcattttgtagatgtggtttgactatttctgtatgtctccatctattgatgagggtcttactcttttagtataaatagtaccgttaacttccaattaactagttttgacaacattcaaaaaagagtaataaacttcgccttaattttaataatcaacaccctcctagccttactactaataattattacattttgactaccacaactcaacggctacatagaaaaatccaccccttacgagtgcggcttcgaccctatatcccccgcccgcgtccctttctccataaaattcttcttagtagctattaccttcttattatttgatctagaaattgccctccttttacccctaccatgagccctacaaacaactaacctgccactaatagttatgtcatccctcttattaatcatcatcctagccctaagtctggcctatgagtgactacaaaaaggattagactgagccgaattggtatatagtttaaacaaaacgaatgatttcgactcattaaattatgataatcatatttaccaaatgcccctcatttacataaatattatactagcatttaccatctcacttctaggaatactagtatatcgctcacacctcatatcctccctactatgcctagaaggaataatactatcgctgttcattatagctactctcataaccctcaacacccactccctcttagccaatattgtgcctattgccatactagtctttgccgcctgcgaagcagcggtgggcctagccctactagtctcaatctccaacacatatggcctagactacgtacataacctaaacctactccaatgctaaaactaatcgtcccaacaattatattactaccactgacatgactttccaaaaagcacataatttgaatcaacacaaccacccacagcctaattattagcatcatccccctactattttttaaccaaatcaacaacaacctatttagctgttccccaaccttttcctccgaccccctaacaacccccctcctaatactaactacctgactcctacccctcacaatcatggcaagccaacgccacttatccagtgaaccactatcacgaaaaaaactctacctctctatactaatctccctacaaatctccttaattataacattcacagccacagaactaatcatattttatatcttcttcgaaaccacacttatccccaccttggctatcatcacccgatgaggcaaccagccagaacgcctgaacgcaggcacatacttcctattctacaccctagtaggctcccttcccctactcatcgcactaatttacactcacaacaccctaggctcactaaacattctactactcactctcactgcccaagaactatcaaactcctgagccaacaacttaatatgactagcttacacaatagcttttatagtaaagatacctctttacggactccacttatgactccctaaagcccatgtcgaagcccccatcgctgggtcaatagtacttgccgcagtactcttaaaactaggcggctatggtataatacgcctcacactcattctcaaccccctgacaaaacacatagcctaccccttccttgtactatccctatgaggcataattataacaagctccatctgcctacgacaaacagacctaaaatcgctcattgcatactcttcaatcagccacatagccctcgtagtaacagccattctcatccaaaccccctgaagcttcaccggcgcagtcattctcataatcgcccacggacttacatcctcattactattctgcctagcaaactcaaactacgaacgcactcacagtcgcatcataatcctctctcaaggacttcaaactctactcccactaatagctttttgatgacttctagcaagcctcgctaacctcgccttaccccccactattaacctactgggagaactctctgtgctagtaaccacgttctcctgatcaaatatcactctcctacttacaggactcaacatactagtcacagccctatactccctctacatatttaccacaacacaatggggctcactcacccaccacattaacaacataaaaccctcattcacacgagaaaacaccctcatgttcatacacctatcccccattctcctcctatccctcaaccccgacatcattaccgggttttcctcttgtaaatatagtttaaccaaaacatcagattgtgaatctgacaacagaggcttacgaccccttatttaccgagaaagctcacaagaactgctaactcatgcccccatgtctaacaacatggctttctcaacttttaaaggataacagctatccattggtcttaggccccaaaaattttggtgcaactccaaataaaagtaataaccatgcacactactataaccaccctaaccctgacttccctaattccccccatccttaccaccctcgttaaccctaacaaaaaaaactcatacccccattatgtaaaatccattgtcgcatccacctttattatcagtctcttccccacaacaatattcatgtgcctagaccaagaagttattatctcgaactgacactgagccacaacccaaacaacccagctctccctaagcttcaaactagactacttctccataatattcatccctgtagcattgttcgttacatggtccatcatagaattctcactgtgatatataaactcagacccaaacattaatcagttcttcaaatatctactcattttcctaattaccatactaatcttagttaccgctaacaacctattccaactgttcatcggctgagagggcgtaggaattatatccttcttgctcatcagttgatgatacgcccgagcagatgccaacacagcagccattcaagcaatcctatacaaccgtatcggcgatatcggtttcatcctcgccttagcatgatttatcctacactccaactcatgagacccacaacaaatagcccttctaaacgctaatccaagcctcaccccactactaggcctcctcctagcagcagcaggcaaatcagcccaattaggtctccacccctgactcccctcagccatagaaggccccaccccagtctcagccctactccactcaagcactatagttgtagcaggaatcttcttactcatccgcttccaccccctagcagaaaatagcccactaatccaaactctaacactatgcttaggcgctatcaccactctgttcgcagcagtctgcgcccttacacaaaatgacatcaaaaaaatcgtagccttctccacttcaagtcaactaggactcataatagttacaatcggcatcaaccaaccacacctagcattcctgcacatctgtacccacgccttcttcaaagccatactatttatgtgctccgggtccatcatccacaaccttaacaatgaacaagatattcgaaaaataggaggactactcaaaaccatacctctcacttcaacctccctcaccattggcagcctagcattagcaggaatacctttcctcacaggtttctactccaaagaccacatcatcgaaaccgcaaacatatcatacacaaacgcctgagccctatctattactctcatcgctacctccctgacaagcgcctatagcactcgaataattcttctcaccctaacaggtcaacctcgcttccccacccttactaacattaacgaaaataaccccaccctactaaaccccattaaacgcctggcagccggaagcctattcgcaggatttctcattactaacaacatttcccccgcatcccccttccaaacaacaatccccctctacctaaaactcacagccctcgctgtcactttcctaggacttctaacagccctagacctcaactacctaaccaacaaacttaaaataaaatccccactatgcacattttatttctccaacatactcggattctaccctagcatcacacaccgcacaatcccctatctaggccttcttacgagccaaaacctgcccctactcctcctagacctaacctgactagaaaagctattacctaaaacaatttcacagcaccaaatctccacctccatcatcacctcaacccaaaaaggcataattaaactttacttcctctctttcttcttcccactcatcctaaccctactcctaatcacataacctgttcccccgagcaatctcaattacaatatatacaccaacaaacaatgttcaaccagtaaccactactaatcaacgcccataatcatacaaagcccccgcaccaataggatcctcccgaatcaaccctgacccctctccttcataaattattcagcttcctacactattaaagtttaccacaaccaccaccccatcatactctttcacccacagcaccaatcctacctccatcgctaaccccactaaaacactcaccaagacctcaacccctgacccccatgcctcaggatactcctcaatagccatcgctgtagtatatccaaagacaaccatcattccccctaaataaattaaaaaaactattaaacccatataacctcccccaaaattcagaataataacacacccgaccacaccgctaacaatcaatactaaacccccataaataggagaaggcttagaagaaaaccccacaaaccccattactaaacccacactcaacagaaacaaagcatacatcattattctcgcacggactacaaccacgaccaatgatatgaaaaaccatcgttgtatttcaactacaagaacaccaatgaccccaatacgcaaaattaaccccctaataaaattaattaaccactcattcatcgacctccccaccccatccaacatctccgcatgatgaaacttcggctcactccttggcgcctgcctgatcctccaaatcaccacaggactattcctagccatgcactactcaccagacgcctcaaccgccttttcatcaatcgcccacatcactcgagacgtaaattatggctgaatcatccgctaccttcacgccaatggcgcctcaatattctttatctgcctcttcctacacatcgggcgaggcctatattacggatcatttctctactcagaaacctgaaacatcggcattatcctcctgcttgcaactatagcaacagccttcataggctatgtcctcccgtgaggccaaatatcattctgaggggccacagtaattacaaacttactatccgccatcccatacattgggacagacctagttcaatgaatctgaggaggctactcagtagacagtcccaccctcacacgattctttacctttcacttcatcttacccttcattattgcagccctagcagcactccacctcctattcttgcacgaaacgggatcaaacaaccccctaggaatcacctcccattccgataaaatcaccttccacccttactacacaatcaaagacgccctcggcttacttctcttccttctctccttaatgacattaacactattctcaccagacctcctaggcgacccagacaattataccctagccaaccccttaaacacccctccccacatcaagcccgaatgatatttcctattcgcctacacaattctccgatccgtccctaacaaactaggaggcgtccttgccctattactatccatcctcatcctagcaataatccccatcctccacatatccaaacaacaaagcataatatttcgcccactaagccaatcactttattgactcctagccgcagacctcctcattctaacctgaatcggaggacaaccagtaagctacccttttaccatcattggacaagtagcatccgtactatacttcacaacaatcctaatcctaataccaactatctccctaattgaaaacaaaatactcaaatgggcctgtccttgtagtataaactaatacaccagtcttgtaaaccggagatgaaaaccttcttccaaggacaaatcagagaaaaagtctttaactccaccattagcacccaaagctaagattctaatttaaactattctctgttctttcatggggaagcagatttgggtaccacccaagtattgactcacccatcaacaaccgctatgtatttcgtacattactgccagccaccatgaatattgtacggtaccataaatacttgaccacctgtagtacataaaaacccaatccacatcaaacccccccccccatgcttacaagcaagtacagcaatcaaccttcaactatcacacatcaactgcaactccaaagccactcctcacccactaggataccaacaaacctacccacccttaacagtacatagtacataaagccatttatcgtacatagcacattacagtcaaatcccttctcgtccccatggatgacccccctcagataggggtcccttgaccaccatcctccgtgaaatcaatatcccgcacaagagtgctactctcctcgctccgggcccataacacttgggggtagctaaagtgaactgtatccgacatctggttcctacttcagggtcataaagcctaaatagcccacacgttccccttaaataagacatcacgatg

SEQ ID NO: 218 - DNA, 16570 bp, Homo sapiens mitochondrial
  3108: "n" refers to a nucleotide at position 3107 of the Cambridge Reference Sequence (CRS, Anderson et al. 1981 Nature 290:457-465), later determined to be absent from the human mtDNA sequence according to the revised CRS (rCRS, Andrews et al. 1999 Nature Genetics 23:147); "n" therefore represents a single nucleotide deletion at a position corresponding to nucleotide 3107 of SEQ ID NO:1 as provided herein.
gatcacaggtctatcaccctattaaccactcacgggagctctccatgcatttggtattttcgtctggggggtgtgcacgcgatagcattgcgagacgctggagccggagcaccctatgtcgcagtatctgtctttgattcctgcctcattctattatttatcgcacctacgttcaatattacagacgagcatacttactgaagtgtgttaattaattaatgcttgtaggacataataataacaattgaatgtctgcacagccgctttccacacagacatcataacaaaaaatttccaccaaaccccccctcccccgccttctggccacagcacttaaacacatctctgccaaaccccaaaaacaaagaaccctaacaccagcctaaccagatttcaaattttatcttttggcggtatgcacttttaacagtcaccccccaactaacacattattttcccctcccactcccatactactaatctcatcaatacaacccccgcccatcctacccagcacacacacaccgctgctaaccccataccccgaaccaaccaaaccccaaagacaccccccacagtttatgtagcttacctcctcaaagcaatacactgaaaatgtttagacgggctcacatcaccccataaacaaataggtttggtcctagcctttctattagctcttagtaagattacacatgcaagcatccccgttccagtgagttcaccctctaaatcaccacgatcaaaagggacaagcatcaagcacgcagcaatgcagctcaaaacgcttagcctagccacacccccacgggaaacagcagtgattaacctttagcaataaacgaaagtttaactaagctatactaaccccagggttggtcaatttcgtgccagccaccgcggtcacacgattaacccaagtcaatagaagccggcgtaaagagtgttttagatcaccccctccccaataaagctaaaactcacctgagttgtaaaaaactccagttgacacaaaatagactacgaaagtggctttaacatatctgaacacacaatagctaagacccaaactgggattagataccccactatgcttagccctaaacctcaacagttaaatcaacaaaactgctcgccagaacactacgagccacagcttaaaactcaaaggacctggcggtgcttcatatccctctagaggagcctgttctgtaatcgataaaccccgatcaacctcaccacctcttgctcagcctatataccgccatcttcagcaaaccctgatgaaggctacaaagtaagcgcaagtacccacgtaaagacgttaggtcaaggtgtagcccatgaggtggcaagaaatgggctacattttctaccccagaaaactacgatagcccttatgaaacttaagggtcgaaggtggatttagcagtaaactgagagtagagtgcttagttgaacagggccctgaagcgcgtacacaccgcccgtcaccctcctcaagtatacttcaaaggacatttaactaaaacccctacgcatttatatagaggagacaagtcgtaacatggtaagtgtactggaaagtgcacttggacgaaccagagtgtagcttaacacaaagcacccaacttacacttaggagatttcaacttaacttgaccgctctgagctaaacctagccccaaacccactccaccttactaccagacaaccttagccaaaccatttacccaaataaagtataggcgatagaaattgaaacctggcgcaatagatatagtaccgcaagggaaagatgaaaaattataaccaagcataatatagcaaggactaacccctataccttctgcataatgaattaactagaaataactttgcaaggagagccaaagctaagacccccgaaaccagacgagctacctaagaacagctaaaagagcacacccgtctatgtagcaaaatagtgggaagatttataggtagaggcgacaaacctaccgagcctggtgatagctggttgtccaagatagaatcttagttcaactttaaatttgcccacagaaccctctaaatccccttgtaaatttaactgttagtccaaagaggaacagctctttggacactaggaaaaaaccttgtagagagagtaaaaaatttaacacccatagtaggcctaaaagcagccaccaattaagaaagcgttcaagctcaacacccactacctaaaaaatcccaaacatataactgaactcctcacacccaattggaccaatctatcaccctatagaagaactaatgttagtataagtaacatgaaaacattctcctccgcataagcctgcgtcagatcaaaacactgaactgacaattaacagcccaatatctacaatcaaccaacaagtcattattaccctcactgtcaacccaacacaggcatgctcataaggaaaggttaaaaaaagtaaaaggaactcggcaaatcttaccccgcctgtttaccaaaaacatcacctctagcatcaccagtattagaggcaccgcctgcccagtgacacatgtttaacggccgcggtaccctaaccgtgcaaaggtagcataatcacttgttccttaaatagggacctgtatgaatggctccacgagggttcagctgtctcttacttttaaccagtgaaattgacctgcccgtgaagaggcgggcatgacacagcaagacgagaagaccctatggagctttaatttattaatgcaaacagtacctaacaaacccacaggtcctaaactaccaaacctgcattaaaaatttcggttggggcgacctcggagcagaacccaacctccgagcagtacatgctaagacttcaccagtcaaagcgaactactatactcaattgatccaataacttgaccaacggaacaagttaccctagggataacagcgcaatcctattctagagtccatatcaacaatagggtttacgacctcgatgttggatcaggacatcccgatggtgcagccgctattaaaggttcgtttgttcaacgattaaagtcctacgtgatctgagttcagaccggagtaatccaggtcggtttctatctacnttcaaattcctccctgtacgaaaggacaagagaaataaggcctacttcacaaagcgccttcccccgtaaatgatatcatctcaacttagtattatacccacacccacccaagaacagggtttgttaagatggcagagcccggtaatcgcataaaacttaaaactttacagtcagaggttcaattcctcttcttaacaacatacccatggccaacctcctactcctcattgtacccattctaatcgcaatggcattcctaatgcttaccgaacgaaaaattctaggctatatacaactacgcaaaggccccaacgttgtaggcccctacggactactacaacccttcgctgacgccataaaactcttcaccaaagagcccctaaaacccgccacatctaccatcaccctctacatcaccgccccgaccttagctctcaccatcgctcttctactatgaacccccctccccatacccaaccccctggtcaacctcaacctaggcctcctatttattctagccacctctagcctagccgtttactcaatcctctgatcagggtgagcatcaaactcaaactacgccctgatcggcgcactgcgagcagtagcccaaacaatctcatatgaagtcaccctagccatcattctactatcaacattactaataagtggctcctttaacctctccacccttatcacaacacaagaacacctctgattactcctgccatcatgacccttggccataatatgatttatctccacactagcagagaccaaccgaacccccttcgaccttgccgaaggggagtccgaactagtctcaggcttcaacatcgaatacgccgcaggccccttcgccctattcttcatagccgaatacacaaacattattataataaacaccctcaccactacaatcttcctaggaacaacatatgacgcactctcccctgaactctacacaacatattttgtcaccaagaccctacttctaacctccctgttcttatgaattcgaacagcatacccccgattccgctacgaccaactcatacacctcctatgaaaaaacttcctaccactcaccctagcattacttatatgatatgtctccatacccattacaatctccagcattccccctcaaacctaagaaatatgtctgataaaagagttactttgatagagtaaataataggagcttaaacccccttatttctaggactatgagaatcgaacccatccctgagaatccaaaattctccgtgccacctatcacaccccatcctaaagtaaggtcagctaaataagctatcgggcccataccccgaaaatgttggttatacccttcccgtactaattaatcccctggcccaacccgtcatctactctaccatctttgcaggcacactcatcacagcgctaagctcgcactgattttttacctgagtaggcctagaaataaacatgctagcttttattccagttctaaccaaaaaaataaaccctcgttccacagaagctgccatcaagtatttcctcacgcaagcaaccgcatccataatccttctaatagctatcctcttcaacaatatactctccggacaatgaaccataaccaatactaccaatcaatactcatcattaataatcataatggctatagcaataaaactaggaatagccccctttcacttctgagtcccagaggttacccaaggcacccctctgacatccggcctgcttcttctcacatgacaaaaactagcccccatctcaatcatataccaaatctctccctcactaaacgtaagccttctcctcactctctcaatcttatccatcatagcaggcagttgaggtggattaaaccaaacccagctacgcaaaatcttagcatactcctcaattacccacataggatgaataatagcagttctaccgtacaaccctaacataaccattcttaatttaactatttatattatcctaactactaccgcattcctactactcaacttaaactccagcaccacgaccctactactatctcgcacctgaaacaagctaacatgactaacacccttaattccatccaccctcctctccctaggaggcctgcccccgctaaccggctttttgcccaaatgggccattatcgaagaattcacaaaaaacaatagcctcatcatccccaccatcatagccaccatcaccctccttaacctctacttctacctacgcctaatctactccacctcaatcacactactccccatatctaacaacgtaaaaataaaatgacagtttgaacatacaaaacccaccccattcctccccacactcatcgcccttaccacgctactcctacctatctccccttttatactaataatcttatagaaatttaggttaaatacagaccaagagccttcaaagccctcagtaagttgcaatacttaatttctgtaacagctaaggactgcaaaaccccactctgcatcaactgaacgcaaatcagccactttaattaagctaagcccttactagaccaatgggacttaaacccacaaacacttagttaacagctaagcaccctaatcaactggcttcaatctacttctcccgccgccgggaaaaaaggcgggagaagccccggcaggtttgaagctgcttcttcgaatttgcaattcaatatgaaaatcacctcggagctggtaaaaagaggcctaacccctgtctttagatttacagtccaatgcttcactcagccattttacctcacccccactgatgttcgccgaccgttgactattctctacaaaccacaaagacattggaacactatacctattattcggcgcatgagctggagtcctaggcacagctctaagcctccttattcgagccgagctgggccagccaggcaaccttctaggtaacgaccacatctacaacgttatcgtcacagcccatgcatttgtaataatcttcttcatagtaatacccatcataatcggaggctttggcaactgactagttcccctaataatcggtgcccccgatatggcgtttccccgcataaacaacataagcttctgactcttacccccctctctcctactcctgctcgcatctgctatagtggaggccggagcaggaacaggttgaacagtctaccctcccttagcagggaactactcccaccctggagcctccgtagacctaaccatcttctccttacacctagcaggtgtctcctctatcttaggggccatcaatttcatcacaacaattatcaatataaaaccccctgccataacccaataccaaacgcccctcttcgtctgatccgtcctaatcacagcagtcctacttctcctatctctcccagtcctagctgctggcatcactatactactaacagaccgcaacctcaacaccaccttcttcgaccccgccggaggaggagaccctattctataccaacacctattctgatttttcggtcaccctgaagtttatattcttatcctaccaggcttcggaataatctcccatattgtaacttactactccggaaaaaaagaaccatttggatacataggtatggtctgagctatgatatcaattggcttcctagggtttatcgtgtgagcacaccatatatttacagtaggaatagacgtagacacacgagcatatttcacctccgctaccataatcatcgctatccccaccggcgtcaaagtatttagctgactcgccacactccacggaagcaatatgaaatgatctgctgcagtgctctgagccctaggattcatctttcttttcaccgtaggtggcctgactggcattgtattagcaaactcatcactagacatcgtactacacgacacgtactacgttgtagctcacttccactatgtcctatcaataggagctgtatttgccatcataggaggcttcattcactgatttcccctattctcaggctacaccctagaccaaacctacgccaaaatccatttcactatcatattcatcggcgtaaatctaactttcttcccacaacactttctcggcctatccggaatgccccgacgttactcggactaccccgatgcatacaccacatgaaacatcctatcatctgtaggctcattcatttctctaacagcagtaatattaataattttcatgatttgagaagccttcgcttcgaagcgaaaagtcctaatagtagaagaaccctccataaacctggagtgactatatggatgccccccaccctaccacacattcgaagaacccgtatacataaaatctagacaaaaaaggaaggaatcgaaccccccaaagctggtttcaagccaaccccatggcctccatgactttttcaaaaaggtattagaaaaaccatttcataactttgtcaaagttaaattataggctaaatcctatatatcttaatggcacatgcagcgcaagtaggtctacaagacgctacttcccctatcatagaagagcttatcacctttcatgatcacgccctcataatcattttccttatctgcttcctagtcctgtatgcccttttcctaacactcacaacaaaactaactaatactaacatctcagacgctcaggaaatagaaaccgtctgaactatcctgcccgccatcatcctagtcctcatcgccctcccatccctacgcatcctttacataacagacgaggtcaacgatccctcccttaccatcaaatcaattggccaccaatggtactgaacctacgagtacaccgactacggcggactaatcttcaactcctacatacttcccccattattcctagaaccaggcgacctgcgactccttgacgttgacaatcgagtagtactcccgattgaagcccccattcgtataataattacatcacaagacgtcttgcactcatgagctgtccccacattaggcttaaaaacagatgcaattcccggacgtctaaaccaaaccactttcaccgctacacgaccgggggtatactacggtcaatgctctgaaatctgtggagcaaaccacagtttcatgcccatcgtcctagaattaattcccctaaaaatctttgaaatagggcccgtatttaccctatagcaccccctctaccccctctagagcccactgtaaagctaacttagcattaaccttttaagttaaagattaagagaaccaacacctctttacagtgaaatgccccaactaaatactaccgtatggcccaccataattacccccatactccttacactattcctcatcacccaactaaaaatattaaacacaaactaccacctacctccctcaccaaagcccataaaaataaaaaattataacaaaccctgagaaccaaaatgaacgaaaatctgttcgcttcattcattgcccccacaatcctaggcctacccgccgcagtactgatcattctatttccccctctattgatccccacctccaaatatctcatcaacaaccgattaatcaccacccaacaatgactaatcaaactaacctcaaaacaaatgatagccatacacaacactaaaggacgaacctgatctcttatactagtatccttaatcatttttattgccacaactaacctcctcggactcctgcctcactcatttacaccaaccacccaactatctataaacctagccatggccatccccttatgagcgggcgcagtgattataggctttcgctctaagattaaaaatgccctagcccacttcttaccacaaggcacacctacaccccttatccccatactagttattatcgaaaccatcagcctactcattcaaccaatagccctggccgtacgcctaaccgctaacattactgcaggccacctactcatgcacctaattggaagcgccaccctagcaatatcaaccattaaccttccctctacacttatcatcttcacaattctaattctactgactatcctagaaatcgctgtcgccttaatccaagcctacgttttcacacttctagtaagcctctacctgcacgacaacacataatgacccaccaatcacatgcctatcatatagtaaaacccagcccatgacccctaacaggggccctctcagccctcctaatgacctccggcctagccatgtgatttcacttccactccataacgctcctcatactaggcctactaaccaacacactaaccatataccaatgatggcgcgatgtaacacgagaaagcacataccaaggccaccacacaccacctgtccaaaaaggccttcgatacgggataatcctatttattacctcagaagtttttttcttcgcaggatttttctgagccttttaccactccagcctagcccctaccccccaactaggagggcactggcccccaacaggcatcaccccgctaaatcccctagaagtcccactcctaaacacatccgtattactcgcatcaggagtatcaatcacctgagctcaccatagtctaatagaaaacaaccgaaaccaaataattcaagcactgcttattacaattttactgggtctctattttaccctcctacaagcctcagagtacttcgagtctcccttcaccatttccgacggcatctacggctcaacattttttgtagccacaggcttccacggacttcacgtcattattggctcaactttcctcactatctgcttcatccgccaactaatatttcactttacatccaaacatcactttggcttcgaagccgccgcctgatactggcattttgtagatgtggtttgactatttctgtatgtctccatctattgatgagggtcttactcttttagtataaatagtaccgttaacttccaattaactagttttgacagcattcaaaaaagagtaataaacttcgccttaattttaataatcaacaccctcctagccttactactaataattattacattttgactaccacaactcaacggctacatagaaaaatccaccccttacgagtgcggcttcgaccctatatcccccgcccgcgtccctttctccataaaattcttcttagtagctattaccttcttattatttgatctagaaattgccctccttttacccctaccatgagccctacaaacaactaacctgccactaatagttatgtcatccctcttattaatcatcatcctagccctaagtctggcctatgagtgactacaaaaaggattagactgagccgaattggtatatagtttaaacaaaacgaatgatttcgactcattaaattatgataatcatatttaccaaatgcccctcatttacataaatattatactagcatttaccatctcacttctaggaatactagtatatcgctcacacctcatatcctccctactatgcctagaaggaataatactatcgctgttcattatagctactctcataaccctcaacacccactccctcttagccaatattgtgcctattgccatactagtctttgccgcctgcgaagcagcggtgggcctagccctactagtctcaatctccaacacatatggcctagactacgtacataacctaaacctactccaatgctaaaactaatcgtcccaacaattatattactaccactgacatgactttccaaaaagcacataatttgaatcaacacaaccacccacagcctaattattagcatcatccccctactattttttaaccaaatcaacaacaacctatttagctgttccccaaccttttcctccgaccccctaacaacccccctcctaatactaactacctgactcctacccctcacaatcatggcaagccaacgccacttatccagtgaaccactatcacgaaaaaaactctacctctctatactaatctccctacaaatctccttaattataacattcacagccacagaactaatcatattttatatcttcttcgaaaccacacttatccccaccttggctatcatcacccgatgaggcaaccagccagaacgcctgaacgcaggcacatacttcctattctacaccctagtaggctcccttcccctactcatcgcactaatttacactcacaacaccctaggctcactaaacattctactactcactctcactgcccaagaactatcaaactcctgagccaacaacttaatatgactagcttacacaatagcttttatagtaaagatacctctttacggactccacttatgactccctaaagcccatgtcgaagcccccatcgctgggtcaatagtacttgccgcagtactcttaaaactaggcggctatggtataatacgcctcacactcattctcaaccccctgacaaaacacatagcctaccccttccttgtactatccctatgaggcataattataacaagctccatctgcctacgacaaacagacctaaaatcgctcattgcatactcttcaatcagccacatagccctcgtagtaacagccattctcatccaaaccccctgaagcttcaccggcgcagtcattctcataatcgcccacggacttacatcctcattactattctgcctagcaaactcaaactacgaacgcactcacagtcgcatcataatcctctctcaaggacttcaaactctactcccactaatagctttttgatgacttctagcaagcctcgctaacctcgccttaccccccactattaacctactgggagaactctctgtgctagtaaccacgttctcctgatcaaatatcactctcctacttacaggactcaacatactagtcacagccctatactccctctacatatttaccacaacacaatggggctcactcacccaccacattaacaacataaaaccctcattcacacgagaaaacaccctcatgttcatacacctatcccccattctcctcctatccctcaaccccgacatcattaccgggttttcctcttgtaaatatagtttaaccaaaacatcagattgtgaatctgacaacagaggcttacgaccccttatttaccgagaaagctcacaagaactgctaactcatgcccccatgtctaacaacatggctttctcaacttttaaaggataacagctatccattggtcttaggccccaaaaattttggtgcaactccaaataaaagtaataaccatgcacactactataaccaccctaaccctgacttccctaattccccccatccttaccaccctcgttaaccctaacaaaaaaaactcatacccccattatgtaaaatccattgtcgcatccacctttattatcagtctcttccccacaacaatattcatgtgcctagaccaagaagttattatctcgaactgacactgagccacaacccaaacaacccagctctccctaagcttcaaactagactacttctccataatattcatccctgtagcattgttcgttacatggtccatcatagaattctcactgtgatatataaactcagacccaaacattaatcagttcttcaaatatctactcattttcctaattaccatactaatcttagttaccgctaacaacctattccaactgttcatcggctgagagggcgtaggaattatatccttcttgctcatcagttgatgatacgcccgagcagatgccaacacagcagccattcaagcaatcctatacaaccgtatcggcgatatcggtttcatcctcgccttagcatgatttatcctacactccaactcatgagacccacaacaaatagcccttctaaacgctaatccaagcctcaccccactactaggcctcctcctagcagcagcaggcaaatcagcccaattaggtctccacccctgactcccctcagccatagaaggccccaccccagtctcagccctactccactcaagcactatagttgtagcaggaatcttcttactcatccgcttccaccccctagcagaaaatagcccactaatccaaactctaacactatgcttaggcgctatcaccactctgttcgcagcagtctgcgcccttacacaaaatgacatcaaaaaaatcgtagccttctccacttcaagtcaactaggactcataatagttacaatcggcatcaaccaaccacacctagcattcctgcacatctgtacccacgccttcttcaaagccatactatttatgtgctccgggtccatcatccacaaccttaacaatgaacaagatattcgaaaaataggaggactactcaaaaccatacctctcacttcaacctccctcaccattggcagcctagcattagcaggaatacctttcctcacaggtttctactccaaagaccacatcatcgaaaccgcaaacatatcatacacaaacgcctgagccctatctattactctcatcgctacctccctgacaagcgcctatagcactcgaataattcttctcaccctaacaggtcaacctcgcttccccacccttactaacattaacgaaaataaccccaccctactaaaccccattaaacgcctggcagccggaagcctattcgcaggatttctcattactaacaacatttcccccgcatcccccttccaaacaacaatccccctctacctaaaactcacagccctcgctgtcactttcctaggacttctaacagccctagacctcaactacctaaccaacaaacttaaaataaaatccccactatgcacattttatttctccaacatactcggattctaccctagcatcacacaccgcacaatcccctatctaggccttcttacgagccaaaacctgcccctactcctcctagacctaacctgactagaaaagctattacctaaaacaatttcacagcaccaaatctccacctccatcatcacctcaacccaaaaaggcataattaaactttacttcctctctttcttcttcccactcatcctaaccctactcctaatcacataacctgttcccccgagcaatctcaattacaatatatacaccaacaaacaatgttcaaccagtaaccactactaatcaacgcccataatcatacaaagcccccgcaccaataggatcctcccgaatcaaccctgacccctctccttcataaattattcagcttcctacactattaaagtttaccacaaccaccaccccatcatactctttcacccacagcaccaatcctacctccatcgctaaccccactaaaacactcaccaagacctcaacccctgacccccatgcctcaggatactcctcaatagccatcgctgtagtatatccaaagacaaccatcattccccctaaataaattaaaaaaactattaaacccatataacctcccccaaaattcagaataataacacacccgaccacaccgctaacaatcaatactaaacccccataaataggagaaggcttagaagaaaaccccacaaaccccattactaaacccacactcaacagaaacaaagcatacatcattattctcgcacggactacaaccacgaccaatgatatgaaaaaccatcgttgtatttcaactacaagaacaccaatgaccccaatacgcaaaattaaccccctaataaaattaattaaccactcattcatcgacctccccaccccatccaacatctccgcatgatgaaacttcggctcactccttggcgcctgcctgatcctccaaatcaccacaggactattcctagccatgcactactcaccagacgcctcaaccgccttttcatcaatcgcccacatcactcgagacgtaaattatggctgaatcatccgctaccttcacgccaatggcgcctcaatattctttatctgcctcttcctacacatcgggcgaggcctatattacggatcatttctctactcagaaacctgaaacatcggcattatcctcctgcttgcaactatagcaacagccttcataggctatgtcctcccgtgaggccaaatatcattctgaggggccacagtaattacaaacttactatccgccatcccatacattgggacagacctagttcaatgaatctgaggaggctactcagtagacagtcccaccctcacacgattctttacctttcacttcatcttacccttcattattgcagccctagcagcactccacctcctattcttgcacgaaacgggatcaaacaaccccctaggaatcacctcccattccgataaaatcaccttccacccttactacacaatcaaagacgccctcggcttacttctcttccttctctccttaatgacattaacactattctcaccagacctcctaggcgacccagacaattataccctagccaaccccttaaacacccctccccacatcaagcccgaatgatatttcctattcgcctacacaattctccgatccgtccctaacaaactaggaggcgtccttgccctattactatccatcctcatcctagcaataatccccatcctccacatatccaaacaacaaagcataatatttcgcccactaagccaatcactttattgactcctagccgcagacctcctcattctaacctgaatcggaggacaaccagtaagctacccttttaccatcattggacaagtagcatccgtactatacttcacaacaatcctaatcctaataccaactatctccctaattgaaaacaaaatactcaaatgggcctgtccttgtagtataaactaatacaccagtcttgtaaaccggagatgaaaaccttcttccaaggacaaatcagagaaaaagtctttaactccaccattagcacccaaagctaagattctaatttaaactattctctgttctttcatggggaagcagatttgggtaccacccaagtattgactcacccatcaacaaccgctatgtatttcgtacattactgccagccaccatgaatattgtacggtaccataaatacttgaccacctgtagtacataaaaacccaatccacatcaaaactccccccccatgcttacaagcaagtacagcaatcaaccttcaactatcacacatcaactgcaactccaaagccacccctcacccactaggataccaacaaacctactcacccttaacagtacatagcacataaagccatttatcgtacatagcacattacagtcaaatcccttctcgtccccatggatgacccccctcagataggggtcccttgaccaccatcctccgtgaaatcaatatcccgcacaagagtgctactctcctcgctccgggcccataacacttgggggtagctaaagtgaactgtatccgacatctggttcctacttcagggccataaagcctaaatagcccacacgttccccttaaataagacatcacgatg

SEQ ID NO: 219 - DNA, 16571 bp, Homo sapiens mitochondrial
  3109: "n" refers to a nucleotide at position 3107 of the Cambridge Reference Sequence (CRS, Anderson et al. 1981 Nature 290:457-465), later determined to be absent from the human mtDNA sequence according to the revised CRS (rCRS, Andrews et al. 1999 Nature Genetics 23:147); "n" therefore represents a single nucleotide deletion at a position corresponding to nucleotide 3107 of SEQ ID NO:1 as provided herein.
gatcacaggtctatcaccctattaaccactcacgggagctctccatgcatttggtattttcgtctggggggtgtgcacgcgatagcattgcgagacgctggagccggagcaccctatgtcgcagtatctgtctttgattcctgcctcatcctattatttatcgcacctacgttcaatattacaggcgaacatacttactaaagtgtgttaattaattaatgcttgtaggacataataataacaattgaatgtctgcacagccgctttccacacagacatcataacaaaaaatttccaccaaaccccccctcccccccgcttctggccacagcacttaaacacatctctgccaaaccccaaaaacaaagaaccctaacaccagcctaaccagatttcaaattttatcttttggcggtatgcacttttaacagtcaccccccaactaacacattattttcccctcccactcccatactactaatctcatcaacacaacccccgcccatcctacccagcacacacacaccgctgctaaccccataccccgaaccaaccaaaccccaaagacaccccccacagtttatgtagcttacctcctcaaagcaatacactgaaaatgtttagacgggctcacatcaccccataaacaaataggtttggtcctagcctttctattagctcttagtaagattacacatgcaagcatccccgttccagtgagttcaccctctaaatcaccacgatcaaaagggacaagcatcaagcacgcagcaatgcagctcaaaacgcttagcctagccacacccccacgggaaacagcagtgattaacctttagcaataaacgaaagtttaactaagctatactaaccccagggttggtcaatttcgtgccagccaccgcggtcacacgattaacccaagtcaatagaagccggcgtaaagagtgttttagatcaccccctccccaataaagctaaaactcacctgagttgtaaaaaactccagttgacacaaaatagactacgaaagtggctttaacatatctgaacacacaatagctaagacccaaactgggattagataccccactatgcttagccctaaacctcaacagttaaatcaacaaaactgctcgccagaacactacgagccacagcttaaaactcaaaggacctggcggtgcttcatatccctctagaggagcctgttctgtaatcgataaaccccgatcaacctcaccacctcttgctcagcctatataccgccatcttcagcaaaccctgatgaaggctacaaagtaagcgcaagtacccacgtaaagacgttaggtcaaggtgtagcccatgaggtggcaagaaatgggctacattttctaccccagaaaactacgatagcccttatgaaacttaagggtcgaaggtggatttagcagtaaactgagagtagagtgcttagttgaacagggccctgaagcgcgtacacaccgcccgtcaccctcctcaagtatacttcaaaggacatttaactaaaacccctacgcatttatatagaggagacaagtcgtaacatggtaagtgtactggaaagtgcacttggacgaaccagagtgtagcttaacacaaagcacccaacttacacttaggagatttcaacttaacttgaccgctctgagctaaacctagccccaaacccactccaccttactaccagacaaccttagccaaaccatttacccaaataaagtataggcgatagaaattgaaacctggcgcaatagatatagtaccgcaagggaaagatgaaaaattataaccaagcataatatagcaaggactaacccctataccttctgcataatgaattaactagaaataactttgcaaggagagccaaagctaagacccccgaaaccagacgagctacctaagaacagctaaaagagcacacccgtctatgtagcaaaatagtgggaagatttataggtagaggcgacaaacctaccgagcctggtgatagctggttgtccaagatagaatcttagttcaactttaaatttgcccacagaaccctctaaatccccttgtaaatttaattgttagtccaaagaggaacagctctttggacactaggaaaaaaccttgtagagagagtaaaaaatttaacacccatagtaggcctaaaagcagccaccaattaagaaagcgttcaagctcaacacccactacctaaaaaatcccaaacatataactgaactcctcacacccaattggaccaatctatcaccctatagaagaactaatgttagtataagtaacatgaaaacattctcctccgcataagcctgcgtcagattaaaacactgaactgacaattaacagcccaatatctacaatcaaccaacaagtcattattaccctcactgtcaacccaacacaggcatgctcataaggaaaggttaaaaaaagtaaaaggaactcggcaaatcttaccccgcctgtttaccaaaaacatcacctctagcatcaccagtattagaggcaccgcctgcccagtgacacatgtttaacggccgcggtaccctaaccgtgcaaaggtagcataatcacttgttccttaaatagggacctgtatgaatggctccacgagggttcagctgtctcttacttttaaccagtgaaattgacctgcccgtgaagaggcgggcatgacacagcaagacgagaagaccctatggagctttaatttattaatgcaaacagtacctaacaaacccacaggtcctaaactaccaaacctgcattaaaaatttcggttggggcgacctcggagcagaacccaacctccgagcagtacatgctaagacttcaccagtcaaagcgaactactatactcaattgatccaataacttgaccaacggaacaagttaccctagggataacagcgcaatcctattctagagtccatatcaacaatagggtttacgacctcgatgttggatcaggacatcccaatggtgcagccgctattaaaggttcgtttgttcaacgattaaagtcctacgtgatctgagttcagaccggagtaatccaggtcggtttctatctacnttcaaattcctccctgtacgaaaggacaagagaaataaggcctacttcacaaagcgccttcccccgtaaatgatatcatctcaacttagtattatacccacacccacccaagaacagggtttgttaagatggcagagcccggtaatcgcataaaacttaaaactttacagtcagaggttcaattcctcttcttaacaacatacccatggccaacctcctactcctcattgtacccattctaatcgcaatggcattcctaatgcttaccgaacgaaaaattctaggctatatacaactacgcaaaggccccaacgttgtaggcccctacgggctactacaacccttcgctgacgccataaaactcttcaccaaagagcccctaaaacccgccacatctaccatcaccctctacatcaccgccccgaccttagctctcaccatcgctcttctactatgaacccccctccccatacccaaccccctggtcaacctcaacctaggcctcctatttattctagccacctctagcctagccgtttactcaatcctctgatcaggatgagcatcaaactcaaactacgccctgatcggcgcactgcgagcagtagcccaaacaatctcatatgaagtcaccctagccatcattctactatcaacattactaataagtggctcctttaacctctccacccttatcacaacacaagaacacctctgattactcctgccatcatgacccttggccataatatgatttatctccacactagcagagaccaaccgaacccccttcgaccttgccgaaggggagtccgaactagtctcaggcttcaacatcgaatacgccgcaggccccttcgccctattcttcatagccgaatacacaaacattattataataaacaccctcaccactacaatcttcctaggaacaacatatgacgcactctcccctgaactctacacaacatattttgtcaccaagaccctacttctaacctccctgttcttatgaattcgaacagcatacccccgattccgctacgaccaactcatacacctcctatgaaaaaacttcctaccactcaccctagcattacttatatgatatgtctccatacccattacaatctccagcattccccctcaaacctaagaaatatgtctgataaaagagttactttgatagagtaaataataggagcttaaacccccttatttctaggactatgagaatcgaacccatccctgagaatccaaaattctccgtgccacctatcacaccccatcctaaagtaaggtcagctaaataagctatcgggcccataccccgaaaatgttggttatacccttcccgtactaattaatcccctggcccaacccgtcatctactctaccatctttgcaggcacactcatcacagcgctaagctcgcactgattttttacctgagtaggcctagaaataaacatgctagcttttattccagttctaaccaaaaaaataaaccctcgttccacagaagctgccatcaagtatttcctcacgcaagcaaccgcatccataatccttctaatagctatcctcttcaacaatatactctccggacaatgaaccataaccaatactaccaatcaatactcatcattaataatcataatggctatagcaataaaactaggaatagccccctttcacttctgagtcccagaggttacccaaggcacccctctgacatccggcctgcttcttctcacatgacaaaaactagcccctatctcaatcatataccaaatctctccctcactaaacgtaagccttctcctcactctctcaatcttatccatcatagcaggcagttgaggtggattaaaccaaacccagctacgcaaaatcttagcatactcctcaattacccacataggatgaataatagcagttctaccgtacaaccctaacataaccattcttaatttaactatttatattatcctaactactaccgcattcctactactcaacttaaactccagcaccacgaccctactactatctcgcacctgaaacaagataacatgactaacacccttaattccatccaccctcctctccctaggaggcctgcccccgctaaccggctttttgcccaaatgggccattatcgaagaattcacaaaaaacaatagcctcatcatccccaccatcatagccaccatcaccctccttaacctctacttctacctacgcctaatctactccacctcaatcacactactccccatatctaacaacgtaaaaataaaatgacagtttgaacatacaaaacccaccccattcctccccacactcatcacccttaccacgctactcctacctatctccccttttatactaataatcttatagaaatttaggttaaatacagaccaagagccttcaaagccctcagtaagttgcaatacttaatttctgtaacagctaaggactgcaaaaccccactctgcatcaactgaacgcaaatcagccactttaattaagctaagcccttactagaccaatgggacttaaacccacaaacacttagttaacagctaagcaccctaatcaactggcttcaatctacttctcccgccgccgggaaaaaaggcgggagaagccccggcaggtttgaagctgcttcttcgaatttgcaattcaatatgaaaatcacctcggagctggtaaaaagaggcctaacccctgtctttagatttacagtccaatgcttcactcagccattttacctcacccccactgatgttcgccgaccgttgactattctctacaaaccacaaagacattggaacactatacctattattcggcgcatgagctggagtcctaggcacagctctaagcctccttattcgagccgagctgggccagccaggcaaccttctaggtaacgaccacatctacaacgttatcgtcacagcccatgcatttgtaataatcttcttcatagtaatacccatcataatcggaggctttggcaactgactagttcccctaataatcggtgcccccgatatggcgtttccccgcataaacaacataagcttctgactcttacctccctctctcctactcctgctcgcatctgctatagtggaggccggagcaggaacaggttgaacagtctaccctcccttagcagggaactactcccaccctggagcctccgtagacctaaccatcttctccttacacctagcaggtgtctcctctatcttaggggccatcaatttcatcacaacaattatcaatataaaaccccctgccataacccaataccaaacgcccctcttcgtctgatccgtcctaatcacagcagtcctacttctcctatctctcccagtcctagctgctggcatcactatactactaacagaccgcaacctcaacaccaccttcttcgaccccgccggaggaggagaccccattctataccaacacctattctgatttttcggtcaccctgaagtttatattcttatcctaccaggcttcggaataatctcccatattgtaacttactactccggaaaaaaagaaccatttggatacataggtatggtctgagctatgatatcaattggcttcctagggtttatcgtgtgagcacaccatatatttacagtaggaatagacgtagacacacgagcatatttcacctccgctaccataatcatcgctatccccaccggcgtcaaagtatttagctgactcgccacactccacggaagcaatatgaaatgatctgctgcagtgctctgagccctaggattcatctttcttttcaccgtaggtggcctgactggcattgtattagcaaactcatcactagacatcgtactacacgacacgtactacgttgtagctcacttccactatgtcctatcaataggagctgtatttgccatcataggaggcttcattcactgatttcccctattctcaggctacaccctagaccaaacctacgccaaaatccatttcactgtcatattcatcggcgtaaatctaactttcttcccacaacactttctcggcctatccggaatgccccgacgttactcggactaccccgatgcatacaccacatgaaacatcctatcatctgtaggctcattcatttctctaacagcagtaatattaataattttcatgatttgagaagccttcgcttcgaagcgaaaagtcctaatagtagaagaaccctccataaacctggagtgactatatggatgccccccaccctaccacacattcgaagaacccgtatacataaaatctagacaaaaaaggaaggaatcgaaccccccaaagctggtttcaagccaaccccatggcctccatgactttttcaaaaaggtattagaaaaaccatttcataactttgtcaaagttaaattataggctaaatcctatatatcttaatggcacatgcagcgcaagtaggtctacaagacgctacttcccctatcatagaagagcttatcacctttcatgatcacgccctcataatcattttccttatctgcttcctagtcctgtatgcccttttcctaacactcacaacaaaactaactaatactaacatctcagacgctcaggaaatagaaaccgtctgaactatcctgcccgccatcatcctagtcctcatcgccctcccatccctacgcatcctttacataacagacgaggtcaacgatccctcccttaccatcaaatcaattggccaccaatggtactgaacctacgagtacaccgactacggcggactaatcttcaactcctacatacttcccccattattcctagaaccaggcgacctgcgactccttgacgttgacaatcgagtagtactcccgattgaagcccccattcgtataataattacatcacaagacgtcttgcactcatgagctgtccccacattaggcttaaaaacagatgcaattcccggacgtctaaaccaaaccactttcaccgctacacgaccgggggtatactacggtcaatgctctgaaatctgtggagcaaaccacagtttcatgcccatcgtcctagaattaattcccctaaaaatctttgaaatagggcccgtatttaccctatagcaccccctctaccccctctagagcccactgtaaagctaacttagcattaaccttttaagttaaagattaagagaaccaacacctctttacagtgaaatgccccaactaaatactaccgtatggcccaccataattacccccatattccttacactattcctcatcacccaactaaaaatattaaacacaaactaccacctacctccctcaccaaagcccataaaaataaaaaattataacaaaccctgagaaccaaaatgaacgaaaatctgttcgcttcattcattgcccccacaatcctaggcctacccgccgcagtactgatcattctatttccccctctattgatccccacctccaaatatctcatcaacaaccgactaatcaccacccaacaatgactaatcaaactaacctcaaaacaaatgatagccatacacaacactaaaggacgaacctgatctcttatactagtatccttaatcatttttattgccacaactaacctcctcggactcctgcctcactcatttacaccaaccacccaactatctataaacctagccatggccatccccttatgagcgggcgcagtgattataggctttcgctctaagattaaaaatgccctagcccacttcttaccacaaggcacacctacaccccttatccccatactagttattatcgaaaccatcagcctactcattcaaccaatagccctggccgtacgcctaaccgctaacattactgcaggccacctactcatgcacctaattggaagcgccaccctagcaatatcaaccattaaccttccctctacacttatcatcttcacaattctaattctactgactatcctagaaatcgctgtcgccttaatccaagcctacgttttcacacttctagtaagcctctacctgcacgacaacacataatgacccaccaatcacatgcctatcatatagtaaaacccagcccatgacccctaacaggggccctctcagccctcctaatgacctccggcctagccatgtgatttcacttccactccataacgctcctcatactaggcctactaaccaacacactaaccatataccaatgatggcgcgatgtaacacgagaaagcacataccaaggccaccacacaccacctgtccaaaaaggccttcgatacgggataatcctatttattacctcagaagtttttttcttcgcaggatttttctgagccttttaccactccagcctagcccctaccccccaactaggagggcactggcccccaacaggcatcaccccgctaaatcccctagaagtcccactcctaaacacatccgtattactcgcatcaggagtatcaatcacctgagctcaccatagtctaatagaaaacaaccgaaaccaaataattcaagcactgcttattacaattttactgggtctctattttaccctcctacaagcctcagagtacttcgagtctcccttcaccatttccgacggcatctacggctcaacattttttgtagccacaggcttccacggacttcacgtcattattggctcaactttcctcactatctgcttcatccgccaactaatatttcactttacatccaaacatcactttggcttcgaagccgccgcctgatactggcattttgtagatgtggtttgactatttctgtatgtctccatctattgatgagggtcttactcttttagtataaatagtaccgttaacttccaattaactagttttgacaacattcaaaaaagagtaataaacttcgccttaattttaataatcaacaccctcctagccttactactaataattattacattttgactaccacaactcaacggctacatagaaaaatccaccccttacgagtgcggcttcgaccctatatcccccgcccgcgtccctttctccataaaattcttcttagtagctattaccttcttattatttgatctagaaattgccctccttttacccctaccatgagccctacaaacaactaacctgccactaatagttatgtcatccctcttattaatcatcatcctagccctaagtctggcctatgagtgactacaaaaaggattagactgagctgaattggtatatagtttaaacaaaacgaatgatttcgactcattaaattatgataatcatatttaccaaatgcccctcatttacataaatattatactagcatttaccatctcacttctaggaatactagtatatcgctcacacctcatatcctccctactatgcctagaaggaataatactatcgctgttcattatagctactctcataaccctcaacacccactccctcttagccaatattatgcctattgccatactagtctttgccgcctgcgaagcagcggtgggcctagccctactagtctcaatctccaacacatatggcctagactacgtacataacctaaacctactccaatgctaaaactaatcgtcccaacaattatattactaccactgacatgactttccaaaaaacacataatttgaatcaacacaaccacccacagcctaattattagcatcatccccctactattttttaaccaaatcaacaacaacctatttagctgttccccaaccttttcctccgaccccctaacaacccccctcctaatactaactacctgactcctacccctcacaatcatggcaagccaacgccacttatccagtgaaccactatcacgaaaaaaactctacctctctatactaatctccctacaaatctccttaattataacattcacagccacagaactaatcatattttatatcttcttcgaaaccacacttatccccaccttggctatcatcacccgatgaggcaaccagccagaacgcctgaacgcaggcacatacttcctattctacaccctagtaggctcccttcccctactcatcgcactaatttacactcacaacaccctaggctcactaaacattctactactcactctcactgcccaagaactatcaaactcctgagccaacaacttaatatgactagcttacacaatagcttttatagtaaagatacctctttacggactccacttatgactccctaaagcccatgtcgaagcccccatcgctgggtcaatagtacttgccgcagtactcttaaaactaggcggctatggtataatacgcctcacactcattctcaaccccctgacaaaacacatagcctaccccttccttgtactatccctatgaggcataattataacaagctccatctgcctacgacaaacagacctaaaatcgctcattgcatactcttcaatcagccacatagccctcgtagtaacagccattctcatccaaaccccctgaagcttcaccggcgcagtcattctcataatcgcccacggacttacatcctcattactattctgcctagcaaactcaaactacgaacgcactcacagtcgcatcataatcctctctcaaggacttcaaactctactcccactaatagctttttgatgacttctagcaagcctcgctaacctcgccttaccccccactattaacctactgggagaactctctgtgctagtaaccacgttctcctgatcaaatatcactctcctacttacaggactcaacatactagtcacagccctatactccctctacatatttaccacaacacaatggggctcactcacccaccacattaacaacataaaaccctcattcacacgagaaaacaccctcatgttcatacacctatcccccattctcctcctatccctcaaccccgacatcattaccgggttttcctcttgtaaatatagtttaaccaaaacatcagattgtgaatctgacaacagaggcttacgaccccttatttaccgagaaagctcacaagaactgctaactcatgcccccatgtctaacaacatggctttctcaacttttaaaggataacagctatccattggtcttaggccccaaaaattttggtgcaactccaaataaaagtaataaccatgcacactactataaccaccctaaccctgacttccctaattccccccatccttaccaccctcgttaaccctaacaaaaaaaactcatacccccattatgtaaaatccattgtcgcatccacctttattatcagtctcttccccacaacaatattcatgtgcctagaccaagaagttattatctcgaactgacactgagccacaacccaaacaacccagctctccctaagcttcaaactagactacttctccataatattcatccctgtagcattgttcgttacatggtccatcatagaattctcactgtgatatataaactcagacccaaacattaatcagttcttcaaatatctactcattttcctaattaccatactaatcttagttaccgctaacaacctattccaactgttcatcggctgagagggcgtaggaattatatccttcttgctcatcagttgatgatacgcccgagcagatgccaacacagcagccattcaagcaatcctatacaaccgtatcggcgatatcggtttcatcctcgccttagcatgatttatcctacactccaactcatgagacccacaacaaatagcccttctaaacgctaatccaagcctcaccccactactaggcctcctcctagcagcagcaggcaaatcagcccaattaggtctccacccctgactcccctcagccatagaaggccccaccccagtctcagccctactccactcaagcactatagttgtagcaggaatcttcttactcatccgcttccaccccctagcagaaaatagcccactaatccaaactctaacactatgcttaggcgctatcaccactctgttcgcagcagtctgcgcccttacacaaaatgacatcaaaaaaatcgtagccttctccacttcaagtcaactaggactcataatagttacaatcggcatcaaccaaccacacctagcattcctgcacatctgtacccacgccttcttcaaagccatactatttatgtgctccgggtccatcatccacaaccttaacaatgaacaagatattcgaaaaataggaggactactcaaaaccatacctctcacttcaacctccctcaccattggcagcctagcattagcaggaatacctttcctcacaggtttctactccaaagaccacatcatcgaaaccgcaaacatatcatacacaaacgcctgagccctatctattactctcatcgctacctccctgacaagcgcctatagcactcgaataattcttctcaccctaacaggtcaacctcgcttccccacccttactaacattaacgaaaataaccccaccctactaaaccccattaaacgcctggcagccggaagcctattcgcaggatttctcattactaacaacatttcccccgcatcccccttccaaacaacaatccccctctacctaaaactcacagccctcgctgtcactttcctaggacttctaacagccctagacctcaactacctaaccaacaaacttaaaataaaatccccactatgcacattttatttctccaacatactcggattctaccctagcatcacacaccgcacaatcccctatctaggccttcttacgagccaaaacctgcccctactcctcctagacctaacctgactagaaaagctattacctaaaacaatttcacagcaccaaatctccacctccatcatcacctcaacccaaaaaggcataattaaactttacttcctctctttcttcttcccactcatcctaaccctactcctaatcacataacctattcccccgagcaatctcaattacaatatatacaccaacaaacaatgttcaaccagtaactactactaatcaacgcccataatcatacaaagcccccgcaccaataggatcctcccgaatcaaccctgacccctctccttcataaattattcagcttcctacactattaaagtttaccacaaccaccaccccatcatactctttcacccacagcaccaatcctacctccatcgctaaccccactaaaacactcaccaagacctcaacccctgacccccatgcctcaggatactcctcaatagccatcgctgtagtatatccaaagacaaccatcattccccctaaataaattaaaaaaactattaaacccatataacctcccccaaaattcagaataataacacacccgaccacaccgctaacaatcaatactaaacccccataaataggagaaggcttagaagaaaaccccacaaaccccattactaaacccacactcaacagaaacaaagcatatatcattattctcgcacggactacaaccacgaccaatgatatgaaaaaccatcgttgtatttcaactacaagaacaccaatgaccccaatacgcaaaattaaccccctaataaaactaattaaccactcattcatcgacctccccaccccatccaacatctccgcatgatgaaacttcggctcactccttggcgcctgcctgatcctccaaatcaccacaggactattcctagccatgcactactcaccagacgcctcaaccgccttttcatcaatcgcccacatcactcgagacgtaaattatggctgaatcatccgctaccttcacgccaatggcgcctcaatattctttatctgcctcttcctacacatcggacgaggcctatattacggatcatttctctactcagaaacctgaaacatcggcattatcctcctgcttgcaactatagcaacagccttcataggctatgtcctcccgtgaggccaaatatcattctgaggggccacagtaattacaaacttactatccgccatcccatacattgggacagacctagttcaatgaatctgaggaggctactcagtagacagtcccaccctcacacgattctttacctttcacttcatcttacccttcattattgcagccctagcagcactccacctcctattcttgcacgaaacgggatcaaacaaccccctaggaatcacctcccattccgataaaatcaccttccacccttactacacaatcaaagacgccctcggcttacttctcttccttctctccttaatgacattaacactattctcaccagacctcctaggcgacccagacaattataccctagccaaccccttaaacacccctccccacatcaagcccgaatgatatttcctattcgcctacacaattctccgatccgtccctaacaaactaggaggcgtccttgccctattactatccatcctcatcctagcaataatccccatcctccatatatccaaacaacaaagcataatatttcgcccactaagccaatcactttattgactcctagccgcagacctcctcattctaacctgaatcggaggacaaccagtaagctacccttttaccatcattggacaagtagcatccgtactatacttcacaacaatcctaatcctaataccaactatctccctaattgaaaacaaaatactcaaatgggcctgtccttgtagtataaactaatacaccagtcttgtaaaccggagatgaaaacctttttccaaggacaaatcagagaaaaagtctttaactccaccattagcacccaaagctaagattctaatttaaactattctctgttctttcatggggaagcagatttgggtaccacccaagtattgactcacccatcaacaaccgctatgtatttcgtacattactgccagccaccatgaatattgtacagtaccataaatatttgaccacctgtagtacataaaaacccaatccacatcaaaaccccccccccatgcttacaagcaagtacagcaatcaaccctcaactatcacacatcaactgcaactccaaagccacccctcacccactaggataccaacaaacctacccacccttaacagtacatagtacataaagccattcaccgtacatagcacattacagtcaaatcccttctcgcccccatggatgacccccctcagataggggtcccttgaccaccatcctccgtgaaatcaatatcccgcacaagagtgctactctcctcgctccgggcccataacacttgggggtagctaaagtgaactgtatccgacatctggttcctacttcagggtcataaagcctaaatagcccacacgttccccttaaataagacatcacgatg

SEQ ID NO: 220 - DNA, 16570 bp, Homo sapiens mitochondrial
  3108: "n" refers to a nucleotide at position 3107 of the Cambridge Reference Sequence (CRS, Anderson et al. 1981 Nature 290:457-465), later determined to be absent from the human mtDNA sequence according to the revised CRS (rCRS, Andrews et al. 1999 Nature Genetics 23:147); "n" therefore represents a single nucleotide deletion at a position corresponding to nucleotide 3107 of SEQ ID NO:1 as provided herein.
gatcacaggtctatcaccctattaaccactcacgggagctctccatgcatttggtattttcgtctggggggtgtgcacgcgatagcattgcgagacgctggagccggagcaccctatgtcgcagtatctgtctttgattcctgcctcatcctattatttatcgcacctacgttcaatattacaggcgaacatacttactaaagtgtgttaattaattaatgcttgtaggacataataataacaattgaatgtctgcacagccgctttccacacagacatcataacaaaaaatttccaccaaaccccccctcccccgccttctggccacagcacttaaacacatctctgccaaaccccaaaaacaaagaaccctaacaccagcctaaccagatttcaaattttatcttttggcggtatgcacttttaacagtcaccccccaactaacacattattttcccctcccactcccatactactaatctcatcaatacaacccccgcccatcctacccagcacacacacaccgctgctaaccccataccccgaaccaaccaaaccccaaagacaccccccacagtttatgtagcttacctcctcaaagcaatacactgaaaatgtttagacgggctcacatcaccccataaacaaataggtttggtcctagcctttctattagctcttagtaagattacacatgcaagcatccccgttccagtgagttcaccctctaaatcaccacgatcaaaagggacaagcatcaagcacgcagcaatgcagctcaaaacgcttagcctagccacacccccacgggaaacagcagtgattaacctttagcaataaacgaaagtttaactaagctatactaaccccagggttggtcaatttcgtgccagccaccgcggtcacacgattaacccaagtcaatagaagccggcgtaaagagtgttttagatcaccccctccccaataaagctaaaactcacctgagttgtaaaaaactccagttgacacaaaatagactacgaaagtggctttaacatatctgaacacacaatagctaagacccaaactgggattagataccccactatgcttagccctaaacctcaacagttaaatcaacaaaactgctcgccagaacactacgagccacagcttaaaactcaaaggacctggcggtgcttcatatccctctagaggagcctgttctgtaatcgataaaccccgatcaacctcaccacctcttgctcagcctatataccgccatcttcagcaaaccctgatgaaggctacaaagtaagcgcaagtacccacgtaaagacgttaggtcaaggtgtagcccatgaggtggcaagaaatgggctacattttctaccccagaaaactacgatagcccttatgaaacttaagggtcgaaggtggatttagcagtaaactgagagtagagtgcttagttgaacagggccctgaagcgcgtacacaccgcccgtcaccctcctcaagtatacttcaaaggacatttaactaaaacccctacgcatttatatagaggagacaagtcgtaacatggtaagtgtactggaaagtgcacttggacgaaccagagtgtagcttaacacaaagcacccaacttacacttaggagatttcaacttaacttgaccgctctgagctaaacctagccccaaacccactccaccttactaccagacaaccttagccaaaccatttacccaaataaagtataggcgatagaaattgaaacctggcgcaatagatatagtaccgcaagggaaagatgaaaaattataaccaagcataatatagcaaggactaacccctataccttctgcataatgaattaactagaaataactttgcaaggagagccaaagctaagacccccgaaaccagacgagctacctaagaacagctaaaagagcacacccgtctatgtagcaaaatagtgggaagatttataggtagaggcgacaaacctaccgagcctggtgatagctggttgtccaagatagaatcttagttcaactttaaatttgcccacagaaccctctaaatccccttgtaaatttaactgttagtccaaagaggaacagctctttggacactaggaaaaaaccttgtagagagagtaaaaaatttaacacccatagtaggcctaaaagcagccaccaattaagaaagcgttcaagctcaacacccactacctaaaaaatcccaaacatataactgaactcctcacacccaattggaccaatctatcaccctatagaagaactaatgttagtataagtaacatgaaaacattctcctccgcataagcctgcgtcagattaaaacactgaactgacaattaacagcccaatatctacaatcaaccaacaagtcattattaccctcactgtcaacccaacacaggcatgctcataaggaaaggttaaaaaaagtaaaaggaactcggcaaatcttaccccgcctgtttaccaaaaacatcacctctagcatcaccagtattagaggcaccgcctgcccagtgacacatgtttaacggccgcggtaccctaaccgtgcaaaggtagcataatcacttgttccttaaatagggacctgtatgaatggctccacgagggttcagctgtctcttacttttaaccagtgaaattgacctgcccgtgaagaggcgggcatgacacagcaagacgagaagaccctatggagctttaatttattaatgcaaacagtacctaacaaacccacaggtcctaaactaccaaacctgcattaaaaatttcggttggggcgacctcggagcagaacccaacctccgagcagtacatgctaagacttcaccagtcaaagcgaactactatactcaattgatccaataacttgaccaacggaacaagttaccctagggataacagcgcaatcctattctagagtccatatcaacaatagggtttacgacctcgatgttggatcaggacatcccgatggtgcagccgctattaaaggttcgtttgttcaacgattaaagtcctacgtgatctgagttcagaccggagtaatccaggtcggtttctatctacnttcaaattcctccctgtacgaaaggacaagagaaataaggcctacttcacaaagcgccttcccccgtaaatgatatcatctcaacttagcattatacccacacccacccaagaacagggtttgttaagatggcagagcccggtaatcgcataaaacttaaaactttacagtcagaggttcaattcctcttcttaacaacatacccatggccaacctcctactcctcattgtacccattctaatcgcaatggcattcctaatgcttaccgaacgaaaaattctaggctatatacaactacgcaaaggccccaacgttgtaggcccctacgggctactacaacccttcgctgacgccataaaactcttcaccaaagagcccctaaaacccgccacatctaccatcaccctctacatcaccgccccgaccttagctctcaccatcgctcttctactatgaacccccctccccatacccaaccccctggtcaacctcaacctaggcctcctatttattctagccacctctagcctagccgtttactcaatcctctgatcagggtgagcatcaaactcaaactacgccctgatcggcgcactgcgagcagtagcccaaacaatctcatatgaagtcaccctagccatcattctactatcaacattactaataagtggctcctttaacctctccacccttatcacaacacaagaacacctctgattactcctgccatcatgacccttggccataatatgatttatctccacactagcagagaccaaccgaacccccttcgaccttgccgaaggggagtccgaactagtctcaggcttcaacatcgaatacgccgcaggccccttcgccctattcttcatagccgaatacacaaacattattataataaacaccctcaccactacaatcttcctaggaacaacatatgacgcactctcccctgaactctacacaacatattttgtcaccaagaccctacttctaacctccctgttcttatgaattcgaacagcatacccccgattccgctacgaccaactcatacacctcctatgaaaaaacttcctaccactcaccctagcattacttatatgatatgtctccatacccattacaatctccagcattccccctcaaacctaagaaatatgtctgataaaagagttactttgatagagtaaataataggagcttaaacccccttatttctaggactatgagaatcgaacccatccctgagaatccaaaattctccgtgccacctatcacaccccatcctaaagtaaggtcagctaaataagctatcgggcccataccccgaaaatgttggttatacccttcccgtactaattaatcccctggcccaacccgtcatctactctaccatctttgcaggcacactcatcacagcgctaagctcgcactgattttttacctgagtaggcctagaaataaacatgctagcttttattccagttctaaccaaaaaaataaaccctcgttccacagaagctgccatcaagtatttcctcacgcaagcaaccgcatccataatccttctaatagctatcctcttcaacaatatactctccggacaatgaaccataaccaatactaccaatcaatactcatcattaataatcataatggctatagcaataaaactaggaatagccccctttcacttctgagtcccagaggttacccaaggcacccctctgacatccggcctgcttcttctcacatgacaaaaactagcccccatctcaatcatataccaaatctctccctcactaaacgtaagccttctcctcactctctcaatcttatccatcatagcaggcagttgaggtggattaaaccaaacccagctacgcaaaatcttagcatactcctcaattacccacataggatgaataatagcagttctaccgtacaaccctaacataaccattcttaatttaactatttatattatcctaactactaccgcattcctactactcaacttaaactccagcaccacgaccctactactatctcgcacctgaaacaagctaacatgactaacacccttaattccatccaccctcctctccctaggaggcctgcccccgctaaccggctttttgcccaaatgggccattatcgaagaattcacaaaaaacaatagcctcatcatccccaccatcatagccaccatcaccctccttaacctctacttctacctacgcctaatctactccacctcaatcacactactccccatatctaacaacgtaaaaataaaatgacagtttgaacatacaaaacccaccccattcctccccacactcatcgcccttaccacgctactcctacctatctccccttttatactaataatcttatagaaatttaggttaaatacagaccaagagccttcaaagccctcagtaagttgcaatacttaatttctgtaacagctaaggactgcaaaaccccactctgcatcaactgaacgcaaatcagccactttaattaagctaagcccttactagaccaatgggacttaaacccacaaacacttagttaacagctaagcaccctaatcaactggcttcaatctacttctcccgccgccgggaaaaaaggcgggagaagccccggcaggtttgaagctgcttcttcgaatttgcaattcaatatgaaaatcacctcggagctggtaaaaagaggcctaacccctgtctttagatttacagtccaatgcttcactcagccattttacctcacccccactgatgttcgccgaccgttgactattctctacaaaccacaaagacattggaacactatacctattattcggcgcatgagctggagtcctaggcacagctctaagcctccttattcgagccgagctgggccagccaggcaaccttctaggtaacgaccacatctacaacgttatcgtcacagcccatgcatttgtaataatcttcttcatagtaatacccatcataatcggaggctttggcaactgactagttcccctaataatcggtgcccccgatatggcgtttccccgcataaacaacataagcttctgactcttacctccctctctcctactcctgctcgcatctgctatagtggaggccggagcaggaacaggttgaacagtctaccctcccttagcagggaactactcccaccctggagcctccgtagacctaaccatcttctccttacacctagcaggtgtctcctctatcttaggggccatcaatttcatcacaacaattatcaatataaaaccccctgccataacccaataccaaacgcccctcttcgtctgatccgtcctaatcacagcagtcctacttctcctatctctcccagtcctagctgctggcatcactatactactaacagaccgcaacctcaacaccaccttcttcgaccccgccggaggaggagaccccattctataccaacacctattctgatttttcggtcaccctgaagtttatattcttatcctaccaggcttcggaataatctcccatattgtaacttactactccggaaaaaaagaaccatttggatacataggtatggtctgagctatgatatcaattggcttcctagggtttatcgtgtgagcacaccatatatttacagtaggaatagacgtagacacacgagcatatttcacctccgctaccataatcatcgctatccccaccggcgtcaaagtatttagctgactcgccacactccacggaagcaatatgaaatgatctgctgcagtgctctgagccctaggattcatctttcttttcaccgtaggtggcctgactggcattgtattagcaaactcatcactagacatcgtactacacgacacgtactacgttgtagctcacttccactatgtcctatcaataggagctgtatttgccatcataggaggcttcattcactgatttcccctattctcaggctacaccctagaccaaacctacgccaaaatccatttcactatcatattcatcggcgtaaatctaactttcttcccacaacactttctcggcctatccggaatgccccgacgttactcggactaccccgatgcatacaccacatgaaacatcctatcatctgtaggctcattcatttctctaacagcagtaatattaataattttcatgatttgagaagccttcgcttcgaagcgaaaagtcctaatagtagaagaaccctccataaacctggagtgactatatggatgccccccaccctaccacacattcgaagaacccgtatacataaaatctagacaaaaaaggaaggaatcgaaccccccaaagctggtttcaagccaaccccatggcctccatgactttttcaaaaaggtattagaaaaaccatttcataactttgtcaaagttaaattataggctaaatcctatatatcttaatggcacatgcagcgcaagtaggtctacaagacgctacttcccctatcatagaagagcttatcacctttcatgatcacgccctcataatcattttccttatctgcttcctagtcctgtatgcccttttcctaacactcacaacaaaactaactaatactaacatctcagacgctcaggaaatagaaaccgtctgaactatcctgcccgccatcatcctagtcctcatcgccctcccatccctacgcatcctttacataacagacgaggtcaacgatccctcccttaccatcaaatcaattggccaccaatggtactgaacctacgagtacaccgactacggcggactaatcttcaactcctacatacttcccccattattcctagaaccaggcgacctgcgactccttgacgttgacaatcgagtagtactcccgattgaagcccccattcgtataataattacatcacaagacgtcttgcactcatgagctgtccccacattaggcttaaaaacagatgcaattcccggacgtctaaaccaaaccactttcaccgctacacgaccgggggtatactacggtcaatgctctgaaatctgtggagcaaaccacagtttcatgcccatcgtcctagaattaattcccctaaaaatctttgaaatagggcccgtatttaccctatagcaccccctctaccccctctagagcccactgtaaagctaacttagcattaaccttttaagttaaagattaagagaaccaacacctctttacagtgaaatgccccaactaaatactaccgtatggcccaccataattacccccatactccttacactattcctcatcacccaactaaaaatattaaacacaaactaccacctacctccctcaccaaagcccataaaaataaaaaattataacaaaccctgagaaccaaaatgaacgaaaatctgttcgcttcattcattgcccccacaatcctaggcctacccgccgcagtactgatcattctatttccccctctattgatccccacctccaaatatctcatcaacaaccgactaatcaccacccaacaatgactaatcaaactaacctcaaaacaaatgataaccatacacaacactaaaggacgaacctgatctcttatactagtatccttaatcatttttattgccacaactaacctcctcggactcctgcctcactcatttacaccaaccacccaactatctataaacctagccatggccatccccttatgagcgggcgcagtgattataggctttcgctctaagattaaaaatgccctagcccacttcttaccacaaggcacacctacaccccttatccccatactagttattatcgaaaccatcagcctactcattcaaccaatagccctggccgtacgcctaaccgctaacattactgcaggccacctactcatgcacctaattggaagcgccaccctagcaatatcaaccattaaccttccctctacacttatcatcttcacaattctaattctactgactatcctagaaatcgctgtcgccttaatccaagcctacgttttcacacttctagtaagcctctacctgcacgacaacacataatgacccaccaatcacatgcctatcatatagtaaaacccagcccatgacccctaacaggggccctctcagccctcctaatgacctccggcctagccatgtgatttcacttccactccataacgctcctcatactaggcctactaaccaacacactaaccatataccaatgatggcgcgatgtaacacgagaaagcacataccaaggccaccacacaccacctgtccaaaaaggccttcgatacgggataatcctatttattacctcagaaatttttttcttcgcaggatttttctgagccttttaccactccagcctagcccctaccccccaattaggagggcactggcccccaacaggcatcaccccgctaaatcccctagaagtcccactcctaaacacatccgtattactcgcatcaggagtatcaatcacctgagctcaccatagtctaatagaaagcaaccgaaaccaaataattcaagcactgcttattacaattttactgggtctctattttaccctcctacaagcctcagagtacttcgagtctcccttcaccatttccgacggcatctacggctcaacattttttgtagccacaggcttccacggacttcacgtcattattggctcaactttcctcactatctgcttcatccgccaactaatatttcactttacatccaaacatcactttggcttcgaagccgccgcctgatactggcattttgtagatgtggtttgactatttctgtatgtctccatctattgatgagggtcttactcttttagtataaatagtaccgttaacttccaattaactagttttgacaacattcaaaaaagagtaataaacttcgccttaattttaataatcaacaccctcctagccttactactaataattattacattttgactaccacaactcaacggctacatagaaaaatccaccccttacgagtgcggcttcgaccctatatcccccgcccgcgtccctttctccataaaattcttcttagtagctattaccttcttattatttgatctagaaattgccctccttttacccctaccatgagccctacaaacaactaacctgccactaatagttatgtcatccctcttattaatcatcatcctagccctaagtctggcctatgagtgactacaaaaaggattagactgaaccgaattggtatatagtttaaacaaaacgaatgatttcgactcattaaattatgataatcatatttaccaaatgcccctcatttacataaatattatactagcatttaccatctcacttctaggaatactagtatatcgctcacacctcatatcctccctactatgcctagaaggaataatactatcgctgttcattatagctactctcataaccctcaacacccactccctcttagccaatattgtgcctattgccatactagtctttgccgcctgcgaagcagcggtgggcctagccctactagtctcaatctccaacacatatggcctagactacgtacataacctaaacctactccaatgctaaaactaatcgtcccaacaattatattactaccactgacatgactttccaaaaaacacataatttgaatcaacacaaccacccacagcctaattattagcatcatccctctactattttttaaccaaatcaacaacaacctatttagctgttccccaaccttttcctccgaccccctaacaacccccctcctaatactaactacctgactcctacccctcacaatcatggcaagccaacgccacttatccagtgaaccactatcacgaaaaaaactctacctctctatactaatctccctacaaatctccttaattataacattcacagccacagaactaatcatattttatatcttcttcgaaaccacacttatccccaccttggctatcatcacccgatgaggcaaccagccagaacgcctgaacgcaggcacatacttcctattctacaccctagtaggctcccttcccctactcatcgcactaatttacactcacaacaccctaggctcactaaacattctactactcactctcactgcccaagaactatcaaactcctgagccaacaacttaatatgactagcttacacaatagcttttatagtaaagatacctctttacggactccacttatgactccctaaagcccatgtcgaagcccccatcgctgggtcaatagtacttgccgcagtactcttgaaactaggcggctatggtataatacgcctcacactcattctcaaccccctgacaaaacacatagcctaccccttccttgtactatccctatgaggcataattataacaagctccatctgcctacgacaaacagacctaaaatcgctcattgcatactcttcaatcagccacatagccctcgtagtaacagccattctcatccaaaccccctgaagcttcaccggcgcagtcattctcataatcgcccacggacttacatcctcattactattctgcctagcaaactcaaactacgaacgcactcacagtcgcatcataatcctctctcaaggacttcaaactctactcccactaatagctttttgatgacttctagcaagcctcgctaacctcgccttaccccccactattaacctactgggagaactctctgtgctagtaaccacgttctcctgatcaaatatcactctcctacttacaggactcaacatactagtcacagccctatactccctctacatatttaccacaacacaatggggctcactcacccaccacattaacaacataaaaccctcattcacacgagaaaacaccctcatgttcatacacctatcccccattctcctcctatccctcaaccccgacatcattaccgggttttcctcttgtaaatatagtttaaccaaaacatcagattgtgaatctgacaacagaggcttacgaccccttatttaccgagaaagctcacaagaactgctaactcatgcccccatgtctaacaacatggctttctcaacttttaaaggataacagctatccattggtcttaggccccaagaattttggtgcaactccaaatagaagtaataaccatgcacactactataaccaccctaaccctaacttccctaattccccccatccttaccaccctcgttaaccctaacaaaaaaaactcatacccccattatgtaaaatccattgtcgcatccacctttattatcagtctcttccccacaacaatattcatgtgcctagaccaagaagttattatctcgaactgacactgagccacaacccaaacaacccagctctccctaagcttcaaactagactacttctccataatattcatccctgtagcattgttcgttacatggtccatcatagaattctcactgtgatatataaactcagacccaaacattaatcagttcttcaaatatctactcatcttcctaattaccatactaatcttagttaccgctaacaacctattccaactgttcatcggctgagagggcgtaggaattatatccttcttgctcatcagttgatgatacgcccgagcagatgccaacacagcagccattcaagcaatcctatacaaccgtatcggcgatatcggtttcatcctcgccttagcatgatttatcctacactccaactcatgagacccacaacaaatagcccttctaaacgctaatccaagcctcaccccactactaggcctcctcctagcagcagcaggcaaatcagcccaattaggtctccacccctgactcccctcagccatagaaggccccaccccagtctcagccctactccactcaagcactatagttgtagcaggaatcttcttactcatccgcttccaccccctagcagaaaatagcccactaatccaaactctaacactatgcttaggcgctatcaccactctgttcgcagcagtctgcgcccttacacaaaatgacatcaaaaaaatcgtagccttctccacttcaagtcaactaggactcataatagttacaatcggcatcaaccaaccacacctagcattcctgcacatctgtacccacgccttcttcaaagccatactatttatgtgctccgggtccatcatccacaaccttaacaatgaacaagatattcgaaaaataggaggactactcaaaaccatacctctcacttcaacctccctcaccattggcagcctagcattagcaggaatacctttcctcacaggtttctactccaaagaccacatcatcgaaaccgcaaacatatcatacacaaacgcctgagccctatctattactctcatcgctacctccctgacaagcgcctatagcactcgaataatccttctcaccctaacaggtcaacctcgcttccccacccttactaacattaacgaaaataaccccaccctactaaaccccattaaacgcctggcagccggaagcctattcgcaggatttctcattactaacaacatttcccccgcatcccccttccaaacaacaatccccctctacctaaaactcacagccctcgctgtcactttcctaggacttctaacagccctagacctcaactacctaaccaacaaacttaaaataaaatccccactatgcacattttatttctccaacatactcggattctaccctagcatcacacaccgcacaatcccctatctaggccttcttacgagccaaaacctgcccctactcctcctagacctaacctgactagaaaagctattacctaaaacaatttcacagcaccaaatctccacctccatcatcacctcaacccaaaaaggcataattaaactttacttcctctctttcttcttcccactcatcctaaccctactcctaatcacataacctattcccccgagcaatctcaattacaatatatacaccaacaaacaatgttcaaccagtaactactactaatcaacgcccataatcatacaaagcccccgcaccaataggatcctcccgaatcaaccctgacccctctccttcataaattattcagcttcctacactattaaagtttaccacaaccaccaccccatcatactctttcacccacagcaccaatcctacctccatcgctaaccccactaaaacactcaccaagacctcaacccctgacccccatgcctcaggatactcctcaatagccatcgctgtagtatatccaaagacaaccatcattccccctaaataaattaaaaaaactattaaacccatataacctcccccaaaattcagaataataacacacccgaccacaccgctaacaatcaatactaaacccccataaataggagaaggcttagaagaaaaccccacaaaccccattactaaacccacactcaacagaaacaaagcatacatcattattctcgcacggactacaaccacgaccaatgatatgaaaaaccatcgttgtatttcaactacaagaacaccaatgaccccaatacgcaaaattaaccccctaataaaattaattaaccgctcattcatcgacctccccaccccatccaacatctccgcatgatgaaacttcggctcactccttggcgcctgcctgatcctccaaatcaccacaggactattcctagccatgcactactcaccagacgcctcaaccgccttttcatcaatcgcccacatcactcgagacgtaaattatggctgaatcatccgctaccttcacgccaatggcgcctcaatattctttatctgcctcttcctacacatcgggcgaggcctatattacggatcatttctctactcagaaacctgaaacatcggcattatcctcctgcttgcaactatagcaacagccttcataggctatgtcctcccgtgaggccaaatatcattctgaggggccacagtaattacaaacttactatccgccatcccatacattggggcagacctagttcaatgaatctgaggaggctactcagtagacagtcccaccctcacacgattctttacctttcacttcatcttgcccttcattattgcagccctagcagcactccacctcctattcttgcacgaaacgggatcaaacaaccccctaggaatcacctcccattccgataaaatcaccttccacccttactacacaatcaaagacgccctcggcttacttctcttccttctctccttaatgacattaacactattctcaccagacctcctaggcgacccagacaattataccctagccaaccccttaaacacccctccccacatcaagcccgaatgatatttcctattcgcctacacaattctccgatccgtccctaacaaactaggaggcgtccttgccctattactatccatcctcatcctagcaataatccccatcctccatatatccaaacaacaaagcataatatttcgcccactaagccaatcactttattgactcctagccgcagacctcctcattctaacctgaatcggaggacaaccagtaagctacccttttaccatcattggacaagtagcatccgtactatacttcacaacaatcctaatcctaataccaactatctccctaattgaaaacaaaatactcaaatgggcctgtccttgtagtataaactaatacaccagtcttgtaaaccggagatgaaaacctttttccaaggacaaatcagagaaaaagtctttaactccaccattagcacccaaagctaagattctaatttaaactattctctgttctttcatggggaagcagatttgggtaccacccaagtattgactcacccatcaacaaccgctatgtatctcgtacattactgccagccaccatgaatattgtacggtaccataaatacttgaccacctgtagtacataaaaacccaatccacatcaaaaccccctcctcatgcttacaagcaagtacagcaatcaaccctcaactatcacacatcaactgcaactccaaagtcacccctcacccattaggataccaacaaacctacccacccttaacagtacatagcacataaagccatttaccgtacatagcacattacagtcaaatcccttctcgtccccatggatgacccccctcagataggggtcccttggccaccatcctccgtgaaatcaatatcccgcacaagagtgctactctcctcgctccgggcccataacacttgggggtagctaaagtgaactgtatccgacatctggttcctacttcagggtcataaagcctaaatagcccacacgttccccttaaataagacatcacgatg

SEQ ID NO: 221 - DNA, 16559 bp, Homo sapiens mitochondrial
  3106: "n" refers to a nucleotide at position 3107 of the Cambridge Reference Sequence (CRS, Anderson et al. 1981 Nature 290:457-465), later determined to be absent from the human mtDNA sequence according to the revised CRS (rCRS, Andrews et al. 1999 Nature Genetics 23:147); "n" therefore represents a single nucleotide deletion at a position corresponding to nucleotide 3107 of SEQ ID NO:1 as provided herein.
gatcacaggtctatcaccctattaaccactcacgggagctctccatgcatttggtattttcgtctggggggtgtgcacgcgatagcattgcgagacgctggagccggagcaccctatgtcgcagtatctgtctttgattcctgcctcatcctattatttatcgcacctacgttcaatattacaggcgaacatacttactaaagtgtattaattaattaatgcttgtaggacataataataacaattgaatgtctgcacagccgctttccacacagacatcataacaaaaaatttccaccaaaccccccctccccccgcttctggccacagcacttaaacacatctctgccaaaccccaaaaacaaagaaccctaacaccagcctaaccagatttcaaattttatcttttggcggtatgcacttttaacagtcaccccccaactaacacattattttcccctcccactcccatactactaatctcatcaatacaacccccacccatcctacccagcacacacaccgctgctaaccccataccccgaaccaaccaaaccccaaagacaccccccacagtttatgtagcttacctcctcaaagcaatacactgaaaatgtttagacgggctcacatcaccccataaacaaataggtttggtcctagcctttctattagctcttagtaagattacacatgcaagcatccccgttccagtgagttcaccctctaaatcaccacgatcaaaagggacaagcatcaagcacgcagcaatgcagctcaaaacgcttagcctagccacacccccacgggaaacagcagtgattagcctttagcaataaacgaaagtttaactaagctatactaaccccagggttggtcaatttcgtgccagccaccgcggtcacacgattaacccaagtcaatagaagccggcgtaaagagtgttttagatcaccccctccccaataaagctaaaactcacctgagttgtaaaaaactccagttgacacaaaatagactacgaaagtggctttaacatatctgaacacacaatagctaagacccaaactgggattagataccccactatgcttagccctaaacctcaacagttaaatcaacaaaactgctcgccagaacactacgagccacagcttaaaactcaaaggacctggcggtgcttcatatccctctagaggagcctgttctgtaatcgataaaccccgatcaacctcaccacctcttgctcagcctatataccgccatcttcagcaaaccctgatgaaggctacaaagtaagcgcaagtacccacgtaaagacgttaggtcaaggtgtagcccatgaggtggcaagaaatgggctacattttctaccccagaaaactacgatagcccttatgaaacttaagggtcgaaggtggatttagcagtaaactgagagtagagtgcttagttgaacagggccctgaagcgcgtacacaccgcccgtcaccctcctcaagtatacttcaaaggacatttaactaaaacccctacgcatttatatagaggagacaagtcgtaacatggtaagtgtactggaaagtgcacttggacgaaccagagtgtagcttaacacaaagcacccaacttacacttaggagatttcaacttaacttgaccgctctgagctaaacctagccccaaacccactccaccttactaccagacaaccttagccaaaccatttacccaaataaagtataggcgatagaaattgaaacctggcgcaatagatatagtaccgcaagggaaagatgaaaaattataaccaagcataatatagcaaggactaacccctataccttctgcataatgaattaactagaaataactttgcaaggagagccaaagctaagacccccgaaaccagacgagctacctaagaacagctaaaagagcacacccgtctatgtagcaaaatagtgggaagatttataggtagaggcgacaaacctaccgagcctggtgatagctggttgtccaagatagaatcttagttcaactttaaatttgcccacagaaccctctaaatccccttgtaaatttaactgttagtccaaagaggaacagctctttggacactaggaaaaaaccttgtagagagagtaaaaaatttaacacccatagtaggcctaaaagcagccaccaattaagaaagcgttcaagctcaacacccactacctaaaaaatcccaaacatataactgaactcctcacacccaattggaccaatctatcaccctatagaagaactaatgttagtataagtaacatgaaaacattctcctccgcataagcctgcgtcagattaaaacactgaactgacaattaacagcccaatatctacaatcaaccaacaagtcattattaccctcactgtcaacccaacacaggcatgctcataaggaaaggttaaaaaaagtaaaaggaactcggcaaatcttaccccgcctgtttaccaaaaacatcacctctagcatcaccagtattagaggcaccgcctgcccagtgacacatgtttaacggccgcggtaccctaaccgtgcaaaggtagcataatcacttgttccttaaatagggacctgtatgaatggctccacgagggttcagctgtctcttacttttaaccagtgaaattgacctgcccgtgaagaggcgggcatgacacagcaagacgagaagaccctatggagctttaatttattaatgcaaacagtacctaacaaacccacaggtcctaaactaccaaacctgcattaaaaatttcggttggggcgacctcggagcagaacccaacctccgagcagtacatgctaagacttcaccagtcaaagcgaactactatactcaattgatccaataacttgaccaacggaacaagttaccctagggataacagcgcaatcctattctagagtccatatcaacaatagggtttacgacctcgatgttggatcaggacatcccgatggtgcagccgctattaaaggttcgtttgttcaacgattaaagtcctacgtgatctgagttcagaccggagtaatccaggtcggtttctatctacnttcaaattcctccctgtacgaaaggacaagagaaataaggcctacttcacaaagcgccttcccccgtaaatgatatcatctcaacttagtattatacccacacccacccaagaacagggtttgttaagatggcagagcccggtaatcgcataaaacttaaaactttacagtcagaggttcaattcctcttcttaacaacatacccatggccaacctcctactcctcattgtacccattctaatcgcaatggcattcctaatgcttaccgaacgaaaaattctaggctatatacaactacgcaaaggccccaacgttgtaggcccctacgggctactacaacccttcgctgacgccataaaactcttcaccaaagagcccctaaaacccgccacatctaccatcaccctctacatcaccgccccgaccttagctctcaccatcgctcttctactatgaacccccctccccatacccaaccccctggtcaacctcaacctaggcctcctatttattctagccacctctagcctagccgtttactcaatcctctgatcagggtgagcatcaaactcaaactacgccctgatcggcgcactgcgagcagtagcccaaacaatctcatatgaagtcaccctagccatcattctactatcaacattactaataagtggctcctttaacctctccacccttatcacaacacaagaacacctctgattactcctgccatcatgacccttggccataatatgatttatctccacactagcagagaccaaccgaacccccttcgaccttgccgaaggggagtccgaactagtctcaggcttcaacatcgaatacgccgcaggccccttcgccctattcttcatagccgaatacacaaacattattataataaacaccctcaccactacaatcttcctaggaacaacatatgacgcactctcccctgaactctacacaacatattttgtcaccaagaccctacttctaacctccctgttcttatgaattcgaacagcatacccccgattccgctacgaccaactcatacacctcctatgaaaaaacttcctaccactcaccctagcattacttatatgatatgtctccatacccattacaatctccagcattccccctcaaacctaagaaatatgtctgataaaagagttactttgatagagtaaataataggagcttaaacccccttatttctaggactatgagaatcgaacccatccctgagaatccaaaattctccgtgccacctatcacaccccatcctaaagtaaggtcagctaaataagctatcgggcccataccccgaaaatgttggttatacccttcccgtactaattaatcccctggcccaacccgtcatctactctaccatctttgcaggcacactcatcacagcgctaagctcgcactgattttttacctgagtaggcctagaaataaacatgctagcttttattccagttctaaccaaaaaaataaaccctcgttccacagaagctgccatcaagtatttcctcacgcaagcaaccgcatccataatccttctaatagctatcctcttcaacaatatactctccggacaatgaaccataaccaatactaccaatcaatactcatcattaataatcataatggctatagcaataaaactaggaatagccccctttcacttctgagtcccagaagttacccaaggcacccctctgacatccggcctgcttcttctcacatgacaaaaactagcccccatctcaatcatataccaaatctctccctcactaaacgtaagccttctcctcactctctcaatcttatccatcatagcaggcagttgaggtggattaaaccaaacccagctacgcaaaatcttagcatactcctcaattacccacataggatgaataatagcagttctaccgtacaaccctaacataaccattcttaatttaactatttatattatcctaactactaccgcattcctactactcaacttaaactccagcaccacgaccctactactatctcgcacctgaaacaagctaacatgactaacacccttaattccatccaccctcctctccctaggaggcctgcccccgctaaccggctttttgcccaaatgggccattatcgaagaattcacaaaaaacaatagcctcatcatccccaccatcatagccaccatcaccctccttaacctctacttctacctacgcctaatctactccacctcaatcacactactccccatatctaacaacgtaaaaataaaatgacagtttgaacatacaaaacccaccccattcctccccacactcatcgcccttaccacgctactcctacctatctccccttttatactaataatcttatagaaatttaggttaaatacagaccaagagccttcaaagccctcagtaagttgcaatacttaatttctgtaacagctaaggactgcaaaaccccactctgcatcaactgaacgcaaatcagccactttaattaagctaagcccttactagaccaatgggacttaaacccacaaacacttagttaacagctaagcaccctaatcaactggcttcaatctacttctcccgccgccgggaaaaaaggcgggagaagccccggcaggtttgaagctgcttcttcgaatttgcaattcaatatgaaaatcacctcggagctggtaaaaagaggcctaacccctgtctttagatttacagtccaatgcttcactcagccattttacctcacccccactgatgttcgccgaccgttgactattctctacaaaccacaaagacattggaacactatacctattattcggcgcatgagctggagtcctaggcacagctctaagcctccttattcgagccgaactgggccagccaggcaaccttctaggtaacgaccacatctacaacgttatcgtcacagcccatgcatttgtaataatcttcttcatagtaatacccatcataatcggaggctttggcaactgactagttcccctaataatcggtgcccccgatatggcgtttccccgcataaacaacataagcttctgactcctacctccctctctcctactcctgctcgcatctgctatagtggaggccggagcaggaacaggttgaacagtctaccctcccttagcagggaactactcccaccctggagcctccgtagacctaaccatcttctccttacacctagcaggtgtctcctctatcttaggggccatcaatttcatcacaacaattatcaacataaaaccccctgccataacccaataccaaacgcccctcttcgtctgatccgtcctaatcacagcagtcctacttctcctatctctcccagtcctagctgctggcatcactatactactaacagaccgcaacctcaacaccaccttcttcgaccccgccggaggaggagaccccattctataccaacacctattctgatttttcggtcaccctgaagtttatattcttatcctaccaggcttcggaataatctcccatattgtaacttactactccggaaaaaaagaaccatttggatacataggtatggtctgagctatgatatcaattggcttcctagggtttatcgtgtgagcacaccatatatttacagtaggaatagacgtagacacacgagcatatttcacctccgctaccataatcatcgctatccccaccggcgtcaaagtatttagctgactcgccacactccacggaagcaatatgaaatgatctgctgcagtgctctgagccctaggattcatctttcttttcaccgtaggtggcctgactggcattgtattagcaaactcatcactagacatcgtactacacgacacgtactacgttgtagctcacttccactatgtcctatcaataggagctgtatttgccatcataggaggcttcattcactgatttcccctattctcaggctacaccctagaccaaacctacgccaaaatccatttcactatcatattcatcggcgtaaatctaactttcttcccacaacactttctcggcctatccggaatgccccgacgttactcggactaccccgatgcatacaccacatgaaacatcctatcatctgtaggctcattcatttctctaacagcagtaatattaataattttcatgatttgagaagccttcgcttcgaagcgaaaagtcctaatagtagaagaaccctccataaacctggagtgactatatggatgccccccaccctaccacacattcgaagaacccgtatacataaaatctagacaaaaaaggaaggaatcgaaccccccaaagctggtttcaagccaaccccatggcctccatgactttttcaaaaaggtattagaaaaaccatttcataactttgtcaaagttaaattataggctaaatcctatatatcttaatggcacatgcagcgcaagtaggtctacaagacgctacttcccctatcatagaagagcttatcacctttcatgatcacgccctcataatcattttccttatctgcttcctagtcctgtatgcccttttcctaacactcacaacaaaactaactaatactaacatctcagacgctcaggaaatagaaaccgtctgaactatcctgcccgccatcatcctagtcctcatcgccctcccatccctacgcatcctttacataacagacgaggtcaacgatccctcccttaccatcaaatcaattggccaccaatggtactgaacctacgagtacaccgactacggcggactaatcttcaactcctacatacttcccccattattcctagaaccaggcgacctgcgactccttgacgttgacaatcgagtagtactcccgattgaagcccccattcgtataataattacatcacaagacgtcttgcactcatgagctgtccccacattaggcttaaaaacagatgcaattcccggacgtctaaaccaaaccactttcaccgctacacgaccgggggtatactacggtcaatgctctgaaatctgtggagcaaaccacagtttcatgcccatcgtcctagaattaattcccctaaaaatctttgaaatagggcccgtatttaccctatagcaccccctctagagcccactgtaaagctaacttagcattaaccttttaagttaaagattaagagaaccaacacctctttacagtgaaatgccccaactaaatactaccgtatggcccaccataattacccccatactccttacactattcctcatcacccaactaaaaatattaaacacaaactaccacctacctccctcaccaaagcccataaaaataaaaaattataacaaaccctgagaaccaaaatgaacgaaaatctgttcgcttcattcattgcccccacaatcctaggcctacccgccgcagtactgatcattctatttccccctctattgatccccacctccaaatatctcatcaacaaccgactaatcaccacccaacaatgactaatcaaactaacctcaaaacaaatgataaccatacacaacactaaaggacgaacctgatctcttatactagtatccttaatcatttttattgccacaactaacctcctcggactcctgcctcactcatttacaccaaccacccaactatctataaacctagccatggccatccccttatgagcgggcgcagtgattataggctttcgctctaagattaaaaatgccctagcccacttcttaccacaaggcacacctacaccccttatccccatactagttattatcgaaaccatcagcctactcattcaaccaatagccctggccgtacgcctaaccgctaacattactgcaggccacctactcatgcacctaattggaagcgccaccctagcaatatcaaccattaaccttccctctacacttatcatcttcacaattctaattctactgactatcctagaaatcgctgtcgccttaatccaagcctacgttttcacacttctagtaagcctctacctgcacgacaacacataatgacccaccaatcacatgcctatcatatagtaaaacccagcccatgacccctaacaggggccctctcagccctcctaatgacctccggcctagccatgtgatttcacttccactccataacgctcctcatactaggcctactaaccaacacactaaccatataccaatgatggcgcgatgtaacacgagaaagcacataccaaggccaccacacaccacctgtccaaaaaggccttcgatatgggataatcctatttattacctcagaagtttttttcttcgcaggatttttctgagccttttaccactccagcctagcccctaccccccaattaggagggcactggcccccaacaggcatcaccccgctaaatcccctagaagtcccactcctaaacacatccgtattactcgcatcaggagtatcaatcacctgagctcaccatagtctaatagaaaacaaccgaaaccaaataattcaagcactgcttattacaattttactgggtctctattttaccctcctacaagcctcagagtacttcgagtctcccttcaccatttccgacggcatctacggctcaacattttttgtagccacaggcttccacggacttcacgtcattattggctcaactttcctcactatctgcttcatccgccaactaatatttcactttacatccaaacatcactttggcttcgaagccgccgcctgatactggcattttgtagatgtggtttgactatttctgtatgtctccatctattgatgagggtcttactcttttagtataaatagtaccgttaacttccaattaactagttttgacaacattcaaaaaagagtaataaacttcgccttaattttaataatcaacaccctcctagccttactactaataattattacattttgactaccacaactcaacggctacatagaaaaatccaccccttacgagtgcggcttcgaccctatatcccccgcccgcgtccctttctccataaaattcttcttagtagctattaccttcttattatttgatctagaaattgccctccttttacccctaccatgagccctacaaacaactaacctgccactaatagttatgtcatccctcttattaatcatcatcctagccctaagtctggcctatgagtgactacaaaaaggattagactgaaccgaattggtatatagtttaaacaaaacgaatgatttcgactcattaaattatgataatcatatttaccaaatgcccctcatttacataaatattatactagcatttaccatctcacttctaggaatactagtatatcgctcacacctcatatcctccctactatgcctagaaggaataatactatcgctgttcattatagctactctcataaccctcaacacccactccctcttagccaatattgtgcctattgccatactagtctttgccgcctgcgaagcagcggtgggcctagccctactagtctcaatctccaacacatatggcctagactacgtacataacctaaacctactccaatgctaaaactaatcgtcccaacaattatattactaccactgacatgactttccaaaaaacacataatttgaatcaacacaaccacccacagcctaattattagcatcatccctctactattttttaaccaaatcaacaacaacctatttagctgttccccaaccttttcctccgaccccctaacaacccccctcctaatactaactacctgactcctacccctcacaatcatggcaagccaacgccacttatccagtgaaccactatcacgaaaaaaactctacctctctatactaatctccctacaaatctccttaattataacattcacagccacagaactaatcatattttatatcttcttcgaaaccacacttatccccaccttggctatcatcacccgatgaggcaaccagccagaacgcctgaacgcaggcacatacttcctattctacaccctagtaggctcccttcccctactcatcgcactaatttacactcacaacaccctaggctcactaaacattctactactcactctcactgcccaagaactatcaaactcctgagccaacaacttaatatgactagcttacacaatagcttttatagtaaagatacctctttacggactccacttatgactccctaaagcccatgtcgaagcccccatcgctgggtcaatagtacttgccgcagtactcttaaaactaggcggctatggtataatacgcctcacactcattctcaaccccctgacaaaacacatagcctaccccttccttgtactatccctatgaggcataattataacaagctccatctgcctacgacaaacagacctaaaatcgctcattgcatactcttcaatcagccacatagccctcgtagtaacagccattctcatccaaaccccctgaagcttcaccggcgcagtcattctcataatcgcccacggacttacatcctcattactattctgcctagcaaactcaaactacgaacgcactcacagtcgcatcataatcctctctcaaggacttcaaactctactcccactaatagctttttgatgacttctagcaagcctcgctaacctcgccttaccccccactattaacctactgggagaactctctgtgctagtaaccacgttctcctgatcaaatatcactctcctacttacaggactcaacatactagtcacagccctatactccctctacatatttaccacaacacaatggggctcactcacccaccacattaacaacataaaaccctcattcacacgagaaaacaccctcatgttcatacacctatcccccattctcctcctatccctcaaccccgacatcattaccgggttttcctcttgtaaatatagtttaaccaaaacatcagattgtgaatctgacaacagaggcttacgaccccttatttaccgagaaagctcacaagaactgctaactcatgcccccatgtctaacaacatggctttctcaacttttaaaggataacagctatccattggtcttaggccccaaaaattttggtgcaactccaaataaaagtaataaccatgcacactactataaccaccctaaccctgacttccctaattccccccatccttaccaccctcgttaaccctaacaaaaaaaactcatacccccattatgtaaaatccattgtcgcatccacctttattatcagtctcttccccacaacaatattcatgtgcctagaccaagaagttattatctcgaactgacactgagccacaacccaaacaacccagctctccctaagcttcaaactagactacttctccataatattcatccctgtagcattgttcgttacatggtccatcatagaattctcactgtgatatataaactcagacccaaacattaatcagttcttcaaatatctactcatcttcctaattaccatactaatcttagttaccgctaacaacctattccaactgttcatcggctgagagggcgtaggaattatatccttcttgctcatcagttgatgatacgcccgagcagatgccaacacagcagccattcaagcaatcctatacaaccgtatcggcgatatcggtttcatcctcgccttagcatgatttatcctacactccaactcatgagacccacaacaaatagcccttctaaacgctaatccaagcctcaccccactactaggcctcctcctagcagcagcaggcaaatcagcccaattaggtctccacccctgactcccctcagccatagaaggccccaccccagtctcagccctactccactcaagcactatagttgtagcaggaatcttcttactcatccgcttccaccccctagcagaaaatagcccactaatccaaactctaacactatgcttaggcgctatcaccactctgttcgcagcagtctgcgcccttacacaaaatgacatcaaaaaaatcgtagccttctccacttcaagtcaactaggactcataatagttacaatcggcatcaaccaaccacacctagcattcctgcacatctgtacccacgccttcttcaaagccatactatttatgtgctccgggtccatcatccacaaccttaacaatgaacaagatattcgaaaaataggaggactactcaaaaccatacctctcacttcaacctccctcaccattggcagcctagcattagcaggaatacctttcctcacaggtttctactccaaagaccacatcatcgaaaccgcaaacatatcatacacaaacgcctgagccctatctattactctcatcgctacctccctaacaagcgcctatagcactcgaataattcttctcaccctaacaggtcaacctcgcttccccacccttactaacattaacgaaaataaccccaccctactaaaccccattaaacgcctggcagccggaagcctattcgcaggatttctcattactaacaacatttcccccgcatcccccttccaaacaacaatccccctctacctaaaactcacagccctcgctgtcactttcctaggacttctaacagccctagacctcaactacctaaccaacaaacttaaaataaaatccccactatgcacattttatttctccaacatactcggattctaccctagcatcacacaccgcacaatcccctatctaggccttcttacgagccaaaacctgcccctactcctcctagacctaacctgactagaaaagctattacctaaaacaatttcacagcaccaaatctccacctccatcatcacctcaacccaaaaaggcataattaaactttacttcctctctttcttcttcccactcatcctaaccctactcctaatcacataacctattcccccgagcaatctcaattacaatatatacaccaacaaacaatgttcaaccagtaactactactaatcaacgcccataatcatacaaagcccccgcaccaataggatcctcccgaatcaaccctgacccctctccttcataaattattcagcttcctacactattaaagtttaccacaaccaccaccccatcatactctttcacccacagcaccaatcctacctccatcgctaaccccactaaaacactcaccaagacctcaacccctgacccccatgcctcaggatactcctcaatagccatcgctgtagtatatccaaagacaaccatcattccccctaaataaattaaaaaaactattaaacccatataacctcccccaaaattcagaataataacacacccgaccacaccgctaacaatcaatactaaacccccataaataggagaaggcttagaagaaaaccccacaaaccccattactaaacccacactcaacagaaacaaagcatacatcattattctcgcacggactacaaccacgaccaatgatatgaaaaaccatcgttgtatttcaactacaagaacaccaatgaccccaatacgcaaaattaaccccctaataaaattaattaaccactcattcatcgacctccccaccccatccaacatctccgcatgatgaaacttcggctcactccttggcgcctgcctgatcctccaaatcaccacaggactattcctagccatgcactactcaccagacgcctcaaccgccttttcatcaatcgcccacatcactcgagacgtaaattatggctgaatcatccgctaccttcacgccaatggcgcctcaatattctttatctgcctcttcctacacatcgggcgaggcctatattacggatcatttctctactcagaaacctgaaacatcggcattatcctcctgcttgcaactatagcaacagccttcataggctatgtcctcccgtgaggccaaatatcattctgaggggccacagtaattacaaacttactatccgccatcccatacattgggacagacctagttcaatgaatctgaggaggctactcagtagacagtcccaccctcacacgattctttacctttcacttcatcttgcccttcattattgcagccctagcagcactccacctcctattcttgcacgaaacgggatcaaacaaccccctaggaatcacctcccattccgataaaatcaccttccacccttactacacaatcaaagacgccctcggcttacttctcttccttctctccttaatgacattaacactattctcaccagacctcctaggcgacccagacaattataccctagccaaccccttaaatacccctccccacatcaagcccgaatgatatttcctattcgcctacacaattctccgatccgtccctaacaaactaggaggcgtccttgccctattactatccatcctcatcctagcaataatccccatcctccatatatccaaacaacaaagcataatatttcgcccactaagccaatcactttattgactcctagccgcagacctcctcattctaacctgaatcggaggacaaccagtaagctacccttttaccatcattggacaagtagcatccgtactatacttcacaacaatcctaatcctaataccaactatctccctaattgaaaacaaaatactcaaatgggcctgtccttgtagtataaactaatacaccagtcttgtaaaccggagatgaaaacctttttccaaggacaaatcagagaaaaagtctttaactccaccattagcacccaaagctaagattctaatttaaactattctctgttctttcatggggaagcagatttgggtaccacccaagtattgactcacccatcaacaaccgctatgtatttcgtacattactgccagccaccatgaatattgtacggtaccacaaatacttgaccacctgtagtacataaaaacccaatccacatcaaccccccccccccatgcttacaagcaagtacagcaaccaaccctcaactatcacacatcaactgcaactccaaagccacccctcacccactaggataccaacaaacctacccacccttaacagtacatagtacataaagccatttaccgtacatagcacattacagtcaaatcccttctcgtccccatggatgacccccctcagataggggtcccttgaccaccatcctccgtgaaatcaatatcccgcacaagagtgctactctcctcgctccgggcccataacacttgggggtagctaaagtgaactgtatccgacatctggttcctacttcagggccataaagcctaaatagcccacacgttccccttaaataagacatcacgatg

SEQ ID NO: 222 - DNA, 16571 bp, Homo sapiens mitochondrial
  3109: "n" refers to a nucleotide at position 3107 of the Cambridge Reference Sequence (CRS, Anderson et al. 1981 Nature 290:457-465), later determined to be absent from the human mtDNA sequence according to the revised CRS (rCRS, Andrews et al. 1999 Nature Genetics 23:147); "n" therefore represents a single nucleotide deletion at a position corresponding to nucleotide 3107 of SEQ ID NO:1 as provided herein.
gatcacaggtctatcaccctattaaccactcacgggagctctccatgcatttggtattttcgtctggggggtatgcacgcgatagcattgcgagacgctggagccggagcaccctatgtcgcagtatctgtctttgattcctgcctcatcctattatttatcgcacctacgttcaatattacaggcgaacatacttactaaagtgtgttaattaattaatgcttgtaggacataataataacaattgaatgtctgcacagccgctttccacacagacatcataacaaaaaatttccaccaaaccccccctcccccccgcttctggccacagcacttaaacacatctctgccaaaccccaaaaacaaagaaccctaacaccagcctaaccagatttcaaattttatcttttggcggtatgcacttttaacagtcaccccccaactaacacattattttcccctcccactcccatactactaatctcatcaatacaacccccgcccatcctacccagcacacacacaccgctgctaaccccataccccgaaccaaccaaaccccaaagacaccccccacagtttatgtagcttacctcctcaaagcaatacactgaaaatgtttagacgggctcacatcaccccataaacaaataggtttggtcctagcctttctattagctcttagtaagattacacatgcaagcatccccgttccagtgagttcaccctctaaatcaccacgatcaaaagggacaagcatcaagcacgcagcaatgcagctcaaaacgcttagcctagccacacccccacgggaaacagcagtgattaacctttagcaataaacgaaagtttaactaagctatactaaccccagggttggtcaatttcgtgccagccaccgcggtcacacgattaacccaagtcaatagaagccggcgtaaagagtgttttagatcaccccctccccaataaagctaaaactcacctgagttgtaaaaaactccagttgacacaaaatagactacgaaagtggctttaacatatctgaacacacaatagctaagacccaaactgggattagataccccactatgcttagccctaaacctcaacagttaaatcaacaaaactgctcgccagaacactacgagccacagcttaaaactcaaaggacctggcggtgcttcatatccctctagaggagcctgttctgtaatcgataaaccccgatcaacctcaccacctcttgctcagcctatataccgccatcttcagcaaaccctgatgaaggctacaaagtaagcgcaagtacccacgtaaagacgttaggtcaaggtgtagcccatgaggtggcaagaaatgggctacattttctaccccagaaaactacgatagcccttatgaaacttaagggtcgaaggtggatttagcagtaaactgagagtagagtgcttagttgaacagggccctgaagcgcgtacacaccgcccgtcaccctcctcaagtatacttcaaaggacatttaactaaaacccctacgcatttatatagaggagacaagtcgtaacatggtaagtgtactggaaagtgcacttggacgaaccagagtgtagcttaacacaaagcacccaacttacacttaggagatttcaacttaacttgaccgctctgagctaaacctagccccaaacccactccaccttactaccagacaaccttagccaaaccatttacccaaataaagtataggcgatagaaattgaaacctggcgcaatagatatagtaccgcaagggaaagatgaaaaattataaccaagcataatatagcaaggactaacccctataccttctgcataatgaattaactagaaataactttgcaaggagagccaaagctaagacccccgaaaccagacgagctacctaagaacagctaaaagagcacacccgtctatgtagcaaaatagtgggaagatttataggtagaggcgacaaacctaccgagcctggtgatagctggttgtccaagatagaatcttagttcaactttaaatttgcccacagaaccctctaaatccccttgtaaatttaactgttagtccaaagaggaacagctctttggacactaggaaaaaaccttgtagagagagtaaaaaatttaacacccatagtaggcctaaaagcagccaccaattaagaaagcgttcaagctcaacacccactacctaaaaaatcccaaacatataactgaactcctcacacccaattggaccaatctatcaccctatagaagaactaatgttagtataagtaacatgaaaacattctcctccgcataagcctgcgtcagattaaaacactgaactgacaattaacagcccaatatctacaatcaaccaacaagtcattattaccctcactgtcaacccaacacaggcatgctcataaggaaaggttaaaaaaagtaaaaggaactcggcaaatcttaccccgcctgtttaccaaaaacatcacctctagcatcaccagtattagaggcaccgcctgcccagtgacacatgtttaacggccgcggtaccctaaccgtgcaaaggtagcataatcacttgttccttaaatagggacctgtatgaatggctccacgagggttcagctgtctcttacttttaaccagtgaaattgacctgcccgtgaagaggcgggcataacacagcaagacgagaagaccctatggagctttaatttattaatgcaaacagtacctaacaaacccacaggtcctaaactaccaaacctgcattaaaaatttcggttggggcgacctcggagcagaacccaacctccgagcagtacatgctaagacttcaccagtcaaagcgaactactatactcaattgatccaataacttgaccaacggaacaagttaccctagggataacagcgcaatcctattctagagtccatatcaacaatagggtttacgacctcgatgttggatcaggacatcccaatggtgcagccgctattaaaggttcgtttgttcaacgattaaagtcctacgtgatctgagttcagaccggagtaatccaggtcggtttctatctacnttcaaattcctccctgtacgaaaggacaagagaaataaggcctacttcacaaagcgccttcccccgtaaatgatatcatctcaacttagtattatacccacacccacccaagaacagggtttgttaagatggcagagcccggtaatcgcataaaacttaaaactttacagtcagaggttcaattcctcttcttaacaacatacccatggccaacctcctactcctcattgtacccattctaatcgcaatggcattcctaatgcttaccgaacgaaaaattctaggctatatacaactacgcaaaggccccaacgttgtaggcccctacgggctactacaacccttcgctgacgccataaaactcttcaccaaagagcccctaaaacccgccacatctaccatcaccctctacatcaccgccccgaccttagctctcaccatcgctcttctactatgaacccccctccccatacccaaccccctggtcaacctcaacctaggcctcctatttattctagccacctctagcctagccgtttactcaatcctctgatcagggtgagcatcaaactcaaactacgccctgatcggcgcactgcgagcagtagcccaaacaatctcatatgaagtcaccctagccatcattctactatcaacattactaataagtggctcctttaacctctccacccttatcacaacacaagaacacctctgattactcctgccatcatgacccttggccataatatgatttatctccacactagcagagaccaaccgaacccccttcgaccttgccgaaggggagtccgaactagtctcaggcttcaacatcgaatacgccgcaggccccttcgccctattcttcatagccgaatacacaaacattattataataaacaccctcaccactacaatcttcctaggaacaacatatgacgcactctcccctgaactctacacaacatattttgtcaccaagaccctacttctaacctccctgttcttatgaattcgaacagcatacccccgattccgctacgaccaactcatacacctcctatgaaaaaacttcctaccactcaccctagcattacttatatgatatgtctccatacccattacaatctccagcattccccctcaaacctaagaaatatgtctgataaaagagttactttgatagagtaaataataggagcttaaacccccttatttctaggactatgagaatcgaacccatccctgagaatccaaaattctccgtgccacctatcacaccccatcctaaagtaaggtcagctaaataagctatcgggcccataccccgaaaatgttggttatacccttcccgtactaattaatcccctggcccaacccgtcatctactctaccatctttgcaggcacactcatcacagcgctaagctcgcactgattttttacctgagtaggcctagaaataaacatgctagcttttattccagttctaaccaaaaaaataaaccctcgttccacagaagctgccatcaagtatttcctcacgcaagcaaccgcatccataatccttctaatagctatcctcttcaacaatatactctccggacaatgaaccataaccaatactaccaatcaatactcatcattaataatcataatggctatagcaataaaactaggaatagccccctttcacttctgagtcccagaggttacccaaggcacccctctgacatccggcctgcttcttctcacatgacaaaaactagcccccatctcaatcatataccaaatctctccctcactaaacgtaagccttctcctcactctctcaatcttatccatcatagcaggcagttgaggtggattaaaccaaacccagctacgcaaaatcttagcatactcctcaattacccacataggatgaataatagcagttctaccgtacaaccctaacataaccattcttaatttaactatttatattatcctaactactaccgcattcctactactcaacttaaactccagcaccacgaccctactactatctcgcacctgaaacaagctaacatgactaacacccttaattccatccaccctcctctccctaggaggcctgcccccgctaaccggctttttgcccaaatgggccattatcgaagaattcacaaaaaacaatagcctcatcatccccaccatcatagccaccatcaccctccttaacctctacttctacctacgcctaatctactccacctcaatcacactactccccatatctaacaacgtaaaaataaaatgacagtttgaacatacaaaacccaccccattcctccccacactcatcgcccttaccacgctactcctacctatctccccttttatactaataatcttatagaaatttaggttaaatacagaccaagagccttcaaagccctcagtaagttgcaatacttaatttctgtaacagctaaggactgcaaaaccccactctgcatcaactgaacgcaaatcagccactttaattaagctaagcccttactagaccaatgggacttaaacccacaaacacttagttaacagctaagcaccctaatcaactggcttcaatctacttctcccgccgccgggaaaaaaggcgggagaagccccggcaggtttgaagctgcttcttcgaatttgcaattcaatatgaaaatcacctcggagctggtaaaaagaggcctaacccctgtctttagatttacagtccaatgcttcactcagccattttacctcacccccactgatgttcgccgaccgttgactattctctacaaaccacaaagacattggaacactatacctattattcggcgcatgagctggagtcctaggcacagctctaagcctccttattcgagccgagctgggccagccaggcaaccttctaggtaacgaccacatctacaacgttatcgtcacagcccatgcatttgtaataatcttcttcatagtaatacccatcataatcggaggctttggcaactgactagttcccctaataatcggtgcccccgatatggcgtttccccgcataaacaacataagcttctgactcttacctccctctctcctactcctgctcgcatctgctatagtggaggccggagcaggaacaggttgaacagtctaccctcccttagcagggaactactcccaccctggagcctccgtagacctaaccatcttctccttacacctagcaggtgtctcctctatcttaggggccatcaatttcatcacaacaattatcaatataaaaccccctgccataacccaataccaaacgcccctcttcgtctgatccgtcctaatcacagcagtcctacttctcctatctctcccagtcctagctgctggcatcactatactactaacagaccgcaacctcaacaccaccttcttcgaccccgccggaggaggagaccccattctataccaacacctattctgatttttcggtcaccctgaagtttatattcttatcctaccaggcttcggaataatctcccatattgtaacttactactccggaaaaaaagaaccatttggatacataggtatggtctgagctatgatatcaattggcttcctagggtttatcgtgtgagcacaccatatatttacagtaggaatagacgtagacacacgagcatatttcacctccgctaccataatcatcgctatccccaccggcgtcaaagtatttagctgactcgccacactccacggaagcaatatgaaatgatctgctgcagtgctctgagccctaggattcatctttcttttcaccgtaggtggcctgactggcattgtattagcaaactcatcactagacatcgtactacacgacacatactacgttgtagcccacttccactatgtcctatcaataggagctgtatttgccatcataggaggcttcattcactgatttcccctattctcaggctacaccctagaccaaacctacgccaaaatccatttcactatcatattcatcggcgtaaatctaactttcttcccacaacactttctcggcctatccggaatgccccgacgttactcggactaccccgatgcatacaccacatgaaacatcctatcatctgtaggctcattcatttctctaacagcagtaatattaataattttcatgatttgagaagccttcgcttcgaagcgaaaagtcctaatagtagaagaaccctccataaacctggagtgactatatggatgccccccaccctaccacacattcgaagaacccgtatacataaaatctagacaaaaaaggaaggaatcgaaccccccaaagctggtttcaagccaaccccatggcctccatgactttttcaaaaaggtattagaaaaaccatttcataactttgtcaaagttaaattataggctaaatcctatatatcttaatggcacatgcagcgcaagtaggtctacaagacgctacttcccctatcatagaagagcttatcacctttcatgatcacgccctcataatcattttccttatctgcttcctagtcctgtatgcccttttcctaacactcacaacaaaactaactaatactaacatctcagacgctcaggaaatagaaaccgtctgaactatcctgcccgccatcatcctagtcctcatcgccctcccatccctacgcatcctttacataacagacgaggtcaacgatccctcccttaccatcaaatcaattggccaccaatggtactgaacctacgagtacaccgactacggcggactaatcttcaactcctacatacttcccccattattcctagaaccaggcgacctgcgactccttgacgttgacaatcgagtagtactcccgattgaagcccccattcgtataataattacatcacaagacgtcttgcactcatgagctgtccccacattaggcttaaaaacagatgcaattcccggacgtctaaaccaaaccactttcaccgctacacgaccgggggtatactacggtcaatgctctgaaatctgtggagcaaaccacagtttcatgcccatcgtcctagaattaattcccctaaaaatctttgaaatagggcccgtatttaccctatagcaccccctctaccccctctagagcccactgtaaagctaacttagcattaaccttttaagttaaagattaagagaaccaacacctctttacagtgaaatgccccaactaaatactaccgtatggcccaccataattacccccatactccttacactattcctcatcacccaactaaaaatattaaacacaaactaccacctacctccctcaccaaagcccataaaaataaaaaattataacaaaccctgagaaccaaaatgaacgaaaatctgttcgcttcattcattgcccccacaatcctaggcctacccgccgcagtactgatcattctatttccccctctattgatccccacctccaaatatctcatcaacaaccgactaatcaccacccaacaatgactaatcaaactaacctcaaaacaaatgataaccatacacaacactaaaggacgaacctgatctcttatactagtatccttaatcatttttattgccacaactaacctcctcggactcctgcctcactcatttacaccaaccacccaactatctataaacctagccatggccatccccttatgagcgggcgcagtgattataggctttcgctctaagattaaaaatgccctagcccacttcttaccacaaggcacacctacaccccttatccccatactagttattatcgaaaccatcagcctactcattcaaccaatagccctggccgtacgcctaaccgctaacattactgcaggccacctactcatgcacctaattggaagcgccaccctagcaatatcaaccattaaccttccctctacacttatcatcttcacaattctaattctactgactatcctagaaatcgctgtcgccttaatccaagcctacgttttcacacttctagtaagcctctacctgcacgacaacacataatgacccaccaatcacatgcctatcatatagtaaaacccagcccatgacccctaacaggggccctctcagccctcctaatgacctccggcctagccatgtgatttcacttccactccataacgctcctcatactaggcctactaaccaacacactaaccatataccaatgatggcgcgatgtaacacgagaaagcacataccaaggccaccacacaccacctgtccaaaaaggccttcgatacgggataatcctatttattacctcagaagtttttttcttcgcaggatttttctgagccttttaccactccagcctagcccctaccccccaattaggagggcactggcccccaacaggcatcaccccgctaaatcccctagaagtcccactcctaaacacatccgtattactcgcatcaggagtatcaatcacctgagctcaccatagtctaatagaaaacaaccgaaaccaaataattcaagcactgcttattacaattttactgggtctctattttaccctcctacaagcctcagagtacttcgagtctcccttcaccatttccgacggcatctacggctcaacattttttgtagccacaggcttccacggacttcacgtcattattggctcaactttcctcactatctgcttcatccgccaactaatatttcactttacatccaaacatcactttggcttcgaagccgccgcctgatactggcattttgtagatgtggtttgactatttctgtatgtctccatctattgatgagggtcttactcttttagtataaatagtaccgttaacttccaattaactagttttgacaacattcaaaaaagagtaataaacttcgccttaattttaataatcaacaccctcctagccttactactaataattattacattttgactaccacaactcaacggctacatagaaaaatccaccccttacgagtgcggcttcgaccctatatcccccgcccgcgtccctttctccataaaattcttcttagtagctattaccttcttattatttgatctagaaattgccctccttttacccctaccatgagccctacaaacaactaacctgccactaatagttatgtcatccctcttattaatcatcatcctagccctaagtctggcctatgagtgactacaaaaaggattagactgaaccgaattggtatatagtttaaacaaaacgaatgatttcgactcattaaattatgataatcatatttaccaaatgcccctcatttacataaatattatactagcatttaccatctcacttctaggaatactagtatatcgctcacacctcatatcctccctactatgcctagaaggaataatactatcgctgttcattatagctactctcataaccctcaacacccactccctcttagccaatattgtgcctattgccatactagtctttgccgcctgcgaagcagcggtgggcctagccctactagtctcaatctccaacacatatggcctagactacgtacataacctaaacctactccaatgctaaaactaatcgtcccaacaattatattactaccactgacatgactttccaaaaaacacataatttgaatcaacacaaccacccacagcctaattattagcatcatccctctactattttttaaccaaatcaacaacaacctatttagctgttccccaaccttttcctccgaccccctaacaacccccctcctaatactaactacctgactcctacccctcacaatcatggcaagccaacgccacttatccagtgaaccactatcacgaaaaaaactctacctctctatactaatctccctacaaatctccttaattataacattcacagccacagaactaatcatattttatatcttcttcgaaaccacacttatccccaccttggctatcatcacccgatgaggcaaccagccagaacgcctgaacgcaggcacatacttcctattctacaccctagtaggctcccttcccctactcatcgcactaatttacactcacaacaccctaggctcactaaacattctactactcactctcactgcccaagaactatcaaactcctgagccaacaacttaatatgactagcttacacaatagcttttatagtaaagatacctctttacggactccacttatgactccctaaagcccatgtcgaagcccccatcgctgggtcaatagtacttgccgcagtactcttaaaactaggcggctatggtataatacgcctcacactcattctcaaccccctgacaaaacacatagcctaccccttccttgtactatccctatgaggcataattataacaagctccatctgcctacgacaaacagacctaaaatcgctcattgcatactcttcaatcagccacatagccctcgtagtaacagccattctcatccaaaccccctgaagcttcaccggcgcagtcattctcataatcgcccacgggcttacatcctcattactattctgcctagcaaactcaaactacgaacgcactcacagtcgcatcataatcctctctcaaggacttcaaactctactcccactaatagctttttgatgacttctagcaagcctcgctaacctcgccttaccccccactattaacctactgggagaactctctgtgctagtaaccacattctcctgatcaaatatcactctcctacttacaggactcaacatactagtcacagccctatactccctctacatatttaccacaacacaatggggctcactcacccaccacattaacaacataaaaccctcattcacacgagaaaacaccctcatgttcatacacctatcccccattctcctcctatccctcaaccccgacatcattaccgggttttcctcttgtaaatatagtttaaccaaaacatcagattgtgaatctgacaacagaggcttacgaccccttatttaccgagaaagctcacaagaactgctaactcatgcccccatgtctaacaacatggctttctcaacttttaaaggataacagctatccattggtcttaggccccaaaaattttggtgcaactccaaataaaagtaataaccatgcacactactataaccaccctaaccctgacttccctaattccccccatccttaccaccctcgttaaccctaacaaaaaaaactcatacccccattatgtaaaatccattgtcgcatccacctttattatcagtctcttccccacaacaatattcatgtgcctagaccaagaagttattatctcgaactgacactgagccacaacccaaacaacccagctctccctaagcttcaaactagactacttctccataatattcatccctgtagcattgttcgttacatggtccatcatagaattctcactgtgatatataaactcagacccaaacattaatcagttcttcaaatatctactcatcttcctaattaccatactaatcttagttaccgctaacaacctattccaactgttcatcggctgagagggcgtaggaattatatccttcttgctcatcagttgatgatacgcccgagcagatgccaacacagcagccattcaagcaatcctatacaaccgtatcggcgatatcggtttcatcctcgccttagcatgatttatcctacactccaactcatgagacccacaacaaatagcccttctaaacgctaatccaagcctcaccccactactaggcctcctcctagcagcagcaggcaaatcagcccaattaggtctccacccctgactcccctcagccatagaaggccccaccccagtctcagccctactccactcaagcactatagttgtagcaggaatcttcttactcatccgcttccaccccctagcagaaaatagcccactaatccaaactctaacactatgcttaggcgctatcaccactctgttcgcagcagtctgcgcccttacacaaaatgacatcaaaaaaatcgtagccttctccacttcaagtcaactaggactcataatagttacaatcggcatcaaccaaccacacctagcattcctgcacatctgtacccacgccttcttcaaagccatactatttatgtgctccgggtccatcatccacaaccttaacaatgaacaagatattcgaaaaataggaggactactcaaaaccatacctctcacttcaacctccctcaccattggcagcctagcattagcaggaatacctttcctcacaggtttctactccaaagaccacatcatcgaaaccgcaaacatatcatacacaaacgcctgagccctatctattactctcatcgctacctccctgacaagcgcctatagcactcgaataattcttctcaccctaacaggtcaacctcgcttccccacccttactaacattaacgaaaataaccccaccctactaaaccccattaaacgcctggcagccggaagcctattcgcaggatttctcattactaacaacatttcccccgcatcccccttccaaacaacaatccccctctacctaaaactcacagccctcgctgtcactttcctaggacttctaacagccctagacctcaactacctaaccaacaaacttaaaataaaatccccactatgcacattttatttctccaacatactcggattctaccctagcatcacacaccgcacaatcccctatctaggccttcttacgagccaaaacctgcccctactcctcctagacctaacctgactagaaaagctattacctaaaacaatttcacagcaccaaatctccacctccatcatcacctcaacccaaaaaggcataattaaactttacttcctctctttcttcttcccactcatcctaaccctactcctaatcacataacctattcccccgagcaatctcaattacaatatatacaccaacaaacaatgttcaaccagtaactactactaatcaacgcccataatcatacaaagcccccgcaccaataggatcctcccgaatcaaccctgacccctctccttcataaattattcagcttcctacactattaaagtttaccacaaccaccaccccatcatactctttcacccacagcaccaatcctacctccatcgctaaccccactaaaacactcaccaagacctcaacccctgacccccatgcctcaggatactcctcaatagccatcgctgtagtatatccaaagacaaccatcattccccctaaataaattaaaaaaactattaaacccatataacctcccccaaaattcagaataataacacacccgaccacaccgctaacaatcaatactaaacccccataaataggagaaggcttagaagaaaaccccacaaaccccattactaaacccacactcaacagaaacaaagcatacatcattattctcgcacggactacaaccacgaccaatgatatgaaaaaccatcgttgtatttcaactacaagaacaccaatgaccccaatacgcaaaactaaccccctaataaaattaattaaccactcattcatcgacctccccaccccatccaacatctccgcatgatgaaacttcggctcactccttggcgcctgcctgatcctccaaatcaccacaggactattcctagccatgcactactcaccagacgcctcaaccgccttttcatcaatcgcccacatcactcgagacgtaaattatggctgaatcatccgctaccttcacgccaatggcgcctcaatattctttatctgcctcttcctacacatcgggcgaggcctatattacggatcatttctctactcagaaacctgaaacatcggcattatcctcctgcttgcaactatagcaacagccttcataggctatgtcctcccgtgaggccaaatatcattctgaggggccacagtaattacaaacttactatccgccatcccatacattgggacagacctagttcaatgaatctgaggaggctactcagtagacagtcccaccctcacacgattctttacctttcacttcatcttgcccttcattattgcagccctagcagcactccacctcctattcttgcacgaaacgggatcaaacaaccccctaggaatcacctcccattccgataaaatcaccttccacccttactacacaatcaaagacgccctcggcttacttctcttccttctctccttaatgacattaacactattctcaccagacctcctaggcgacccagacaattataccctagccaaccccttaaacacccctccccacatcaagcccgaatgatatttcctattcgcctacacaattctccgatccgtccctaacaaactaggaggcgtccttgccctattactatccatcctcatcctagcaataatccccatcctccatatatccaaacaacaaagcataatatttcgcccactaagccaatcactttattgactcctagccgcagacctcctcattctaacctgaatcggaggacaaccagtaagctacccttttaccatcattggacaagtagcatccgtactatacttcacaacaatcctaatcctaataccaactatctccctaattgaaaacaaaatactcaaatgggcctgtccttgtagtataaactaatacaccagtcttgtaaaccggagatgaaaacctttttccaaggacaaatcagagaaaaagtctttaactccaccattagcacccaaagctaagattctaatttaaactattctctgttctttcatggggaagcagatttgggtaccacccaagtattgactcacccatcaacaaccgctatgtatttcgtacattactgccagccaccatgaatattgtacggtaccataaatacttgaccacctgtagtacataaaaacccaatccacatcaaaaccccctcctcatgcttacaagcaagtacagcaatcaaccctcaactatcacacatcaactgcaactccaaagccacccctcacccactaggataccaacaaacctacccacccttaacagtacatagtacataaagccatttaccgtacatagcacattacagtcaaatcccttctcgtccccatggatgacccccctcagataggggtcccttgaccaccatcctccgtgaaatcaatatcccgcacaagagtgctactctcctcgctccgggcccataacacttgggggtagctaaagtgaactgtatccgacatctggttcctacttcagggccataaagcctaaatagcccacacgttccccttaaataagacatcacgatg

SEQ ID NO: 223 - DNA, 16571 bp, Homo sapiens mitochondrial
  3108: "n" refers to a nucleotide at position 3107 of the Cambridge Reference Sequence (CRS, Anderson et al. 1981 Nature 290:457-465), later determined to be absent from the human mtDNA sequence according to the revised CRS (rCRS, Andrews et al. 1999 Nature Genetics 23:147); "n" therefore represents a single nucleotide deletion at a position corresponding to nucleotide 3107 of SEQ ID NO:1 as provided herein.
gatcacaggtctatcaccctattaaccactcacgggagctctccatgcatttggtattttcgtctggggggtgtgcacgcgatagcattgcgagacgctggagccggagcaccctatgtcgcagtatctgtctttgattcctgccccattccattatttatcgcacctacgttcaatattataggcgaacatacctattaaagcgtattaattaattaatgcttgtaggacataataataacaattgaatgtctgcacagccgctttccacacagacatcataacaaaaaatttccaccaaaccccccctcccccgccttctggccacagcacttaaacacatctctgccaaaccccaaaaacaaagaaccctaacaccagcctaaccagatttcaaattttatcttttggcggtatgcacttttaacagtcaccccccaactaacacattattttcccctcccactcccatactactaatctcatcaatacaacccccgcccatcctacccagcacacacacaccgctgctaaccccataccccgaaccaaccaaaccccaaagacaccccccacagtttatgtagcttacctcctcaaagcaatacactgaaaatgtttagacgggctcacatcaccccataaacaaataggtttggtcctagcctttctattagctcttagtaagattacacatgcaagcatccccgttccagtgagttcaccctctaaatcaccacgatcaaaagggacaagcatcaagcacgcaacaatgcagctcaaaacgcttagcctagccacacccccacgggaaacagcagtgattaacctttagcaataaacgaaagtttaactaagctatactaaccccagggttggtcaatttcgtgccagccaccgcggtcacacgattaacccaagtcaatagaagccggcgtaaagagtgttttagatcaccccctccccaataaagctaaaactcacctgagttgtaaaaaactccagttgacacaaaataaactacgaaagtggctttaacatatctgaacacacaatagctaagacccaaactgggattagataccccactatgcttagccctaaacctcaacagttaaatcaacaaaactgctcgccagaacactacgagccacagcttaaaactcaaaggacctggcggtgcttcatatccctctagaggagcctgttctgtaatcgataaaccccgatcaacctcaccacctcttgctcagcctatataccgccatcttcagcaaaccctgatgaaggctacaaagtaagcgcaagtacccacgtaaagacgttaggtcaaggtgtagcccatgaggtggcaagaaatgggctacattttctaccccagaaaactacgatagcccttatgaaacttaagggtcgaaggtggatttagcagtaaactgagaatagagtgcttagttgaacagggccctgaagcgcgtacacaccgcccgtcaccctcctcaagtatacttcaaaggacatttaactaaaacccctacgcatttatatagaggagacaagtcgtaacatggtaagtgtactggaaagtgcacttggacgaaccagagtgtagcttaacacaaagcacccaacttacacttaggagatttcaacttaacttgaccgctctgagctaaacctagccccaaacccactccaccttactatcagacaaccttagccaaaccatttacccaaataaagtataggcgatagaaattgaaacctggcgcaatagatatagtaccgcaagggaaagatgaaaaattataaccaagcataatatagcaaggactaacccctataccttctgcataatgaattaactagaaataactttgcaaggagagccaaagctaagacccccgaaaccagacgagctacctaagaacagctaaaagagcacacccgtctatgtagcaaaatagtgggaagatttataggtagaggcgacaaacctaccgagcctggtgatagctggttgtccaagatagaatcttagttcaactttaaatttgcccacagaaccctctaaatccccttgtaaatttaactgttagtccaaagaggaacagctctttggacactaggaaaaaaccttgtagagagagtaaaaaatttaacacccatagtaggcctaaaagcagccaccaattaagaaagcgttcaagctcaacacccactacctaaaaaatcccaaacatataactgaactcctcacacccaattggaccaatctatcaccctatagaagaactaatgttagtataagtaacatgaaaacattctcctctgcataagcctgcgtcagattaaaacgctgaactgacaattaacagcccaatatctacaatcaaccaacaagtcattattacccccactgtcaacccaacacaggcatgctcataaggaaaggttaaaaaaagtaaaaggaactcggcaaatcttaccccgcctgtttaccaaaaacatcacctctagcatcaccagtattagaggcaccgcctgcccagtgacacatgtttaacggccgcggtaccctaaccgtgcaaaggtagcataatcacttgttccttaaatagggacctgtatgaatggctccacgagggttcagctgtctcttacttttaaccagtgaaattgacctgcccgtgaagaggcgggcatgacacagcaagacgagaagaccctatggagctttaatttattaatgcaaacagtacctaacaaacccacaggtcctaaactaccaaacctgcattaaaaatttcggttggggcgacctcggagcagaacccaacctccgagcagtacatgctaagacttcaccagtcaaagcgaactactatactcaattgatccaataacttgaccaacggaacaagttaccctagggataacagcgcaatcctattctagagtccatatcaacaatagggtttacgacctcgatgttggatcaggacatcccgatggtgcagccgctattaaaggttcgtttgttcaacgattaaagtcctacgtgatctgagttcagaccggagtaatccaggtcggtttctatctacnttcaaattcctccctgtacgaaaggacaagagaaataaggcctacttcacaaagcgccttcccccgtaaatgatatcatctcaacttagtattatacccacacccacccaagaacagggtttgttaagatggcagagcccggtaatcgcataaaacttaaaactttacagtcagaggttcaattcctcttcttaacaacatacccatggccaacctcctactcctcattgtacccattctaatcgcaatggcattcctaatgcttaccgaacgaaaaattctaggctatatacaactacgcaaaggccccaacgttgtaggcccctacgggctactacaacccttcgctgacgccataaaactcttcaccaaagagcccctaaaacccgccacatctaccatcaccctctacatcaccgccccgaccttagctctcaccatcgctcttctactatgaacccccctccccatacccaaccccctggttaacctcaacctaggcctcctatttattctagccacctctagcctagccgtttactcaatcctctgatcagggtgagcatcaaactcaaactacgccctgatcggcgcactgcgagcagtagcccaaacaatctcatatgaagtcaccctagccatcattctactatcaacattactaataagtggctcctttaacctctccacccttatcacaacacaagaacacctctgattactcctgccatcatgacccttggccataatatgatttatctccacactagcagagaccaaccgaacccccttcgaccttgccgaaggggagtccgaactagtctcaggcttcaacatcgaatacgccgcaggccccttcgccctattcttcatagccgaatacacaaacattattataataaacaccctcaccactacaatcttcctaggaacaacatatgacgcactctcccctgaactctacacaacatattttgtcaccaagaccctacttctgacctccctgttcttatgaattcgaacagcatacccccgattccgctacgaccagctcatacacctcctatgaaaaaactttctaccactcaccctagcattacttatatgatatgtctccatacccattacaatctccagcattccccctcaaacctaagaaatatgtctgataaaagagttactttgatagagtaaataataggagcttaaacccccttatttctaggactatgagaatcgaacccatccctgagaatccaaaactctccgtgccacctatcacaccccatcctaaagtaaggtcagctaaataagctatcgggcccataccccgaaaatgttggttatacccttcccgtactaattaatcccctggcccaacccgtcatctactctaccatctttgcaggcacactcatcacagcgctaagctcgcactgattttttacctgagtaggcctagaaataaacatgctagcttttattccagttctaaccaaaaaaataaaccctcgttccacagaagctgccatcaagtatttcctcacgcaagcaaccgcatccataatccttctaatagctatcctcttcaacaatatactctccggacaatgaaccataaccaatactaccaatcaatactcatcattaataatcatagtggctatagcaataaaactaggaatagccccctttcacttctgagtcccagaggttacccaaggcacccctctgacatccggcctgcttcttctcacatgacaaaaactagcccccatctcaatcatataccaaatctctccctcactaaacgtaagccttctcctcactctctcaatcttatccatcatagcaggcagttgaggtggattaaaccaaacccagctacgcaaaatcttagcatactcctcaattacccatataggatgaataatagcagttctaccgtacaaccctaacataaccattcttaatttaactatttatattatcctaactactaccgcattcctactactcaacttaaactccagcaccacgaccctactactatctcgcacctgaaacaagctaacatgactaacacccttaattccatccaccctcctctccctaggaggcctgcccccactaaccggctttttgcccaaatgggccattatcgaagaattcacaaaaaacaatagcctcatcatccccaccatcatagccaccatcaccctcattaacctctacttctacctacgcctaatctactccacctcaatcacactactccccatatctaacaacgtaaaaataaaatgacagtttgaacatacaaaacccaccccattcctccccacactcatcgcccttaccacgctactcctacctatctccccttttatactaataatcttatagaaatttaggttaaatacagaccaagagccttcaaagccctcagtaagttgcaatacttaatttctgtaacagctaaggactgcaaaaccccactctgcatcaactgaacgcaaatcagccactttaattaagctaagcccttactagaccaatgggacttaaacccacaaacacttagttaacagctaagcaccctaatcaactggcttcaatctacttctcccgccgccaggaaaaaaggcgggagaagccccggcaggtttgaagctgcttcttcgaatttgcaattcaatatgaaaaccacctcggagctggtaaaaagaggcctaacccctgtctttagatttacagtccaatgcttcactcagccattttacctcacccccactgatgttcgccgaccgttgactattctctacaaaccacaaagacattggaacactatacctattattcggcgcatgagctggagtcctaggcacagctctaagcctccttattcgagccgagctgggccagccaggcaaccttctaggtaacgaccacatctacaacgttatcgtcacagcccatgcatttgtaataatcttcttcatagtaatacccatcataatcggaggctttggcaactgactagttcccctaataatcggtgcccccgatatggcgtttccccgcataaacaacataagcttctgactcttacctccctctctcctactcctgctcgcatctgctatagtggaggccggagcaggaacaggttgaacagtctaccctcccttagcagggaactactcccaccctggagcctccgtagacctaaccatcttctccttacacctagcaggtgtctcctctatcttaggggccatcaatttcatcacaacaattatcaatataaaaccccctgccataacccaataccaaacgcccctcttcgtctgatccgtcctaatcacagcagtcctacttctcctatctctcccagtcctagctgctggcatcactatactactaacagaccgcaacctcaacaccaccttcttcgaccccgccggaggaggagaccccattctataccaacacctattctgatttttcggtcaccctgaagtttatattcttatcctaccaggcttcggaataatctcccatattgtaacttactactccggaaaaaaagaaccatttggatatataggtatggtctgagctatgatatcaattggcttcctagggtttatcgtgtgagcacaccatatatttacagtaggaatagacgtagacacacgagcatatttcacctccgctaccataatcatcgctatccccaccggcgtcaaagtatttagctgactcgccacactccacggaagcaatatgaaatgatctgctgcagtgctctgagccctaggattcatctttcttttcaccgtaggtggcctgactggcattgtattagcaaactcatcactagacatcgtactacacgacacgtactacgttgtagctcacttccactatgtcctatcaataggagctgtatttgccatcataggaggcttcattcactgatttcccctattctcaggctacaccctagaccaaacctacgccaaaatccatttcactatcatattcatcggcgtaaatctaactttcttcccacaacactttctcggcctatccggaatgccccgacgttactcggactaccccgatgcatacaccacatgaaatatcctatcatctgtaggctcattcatttctctaacagcagtaatattaataattttcatgatttgagaagccttcgcttcgaagcgaaaagtcctaatagtagaagaaccctccataaacctggagtgactatatggatgccccccaccctaccacacattcgaagaacccgtatacataaaatctagacaaaaaaggaaggaatcgaaccccccaaagctggtttcaagccaaccccatggcctccatgactttttcaaaaagatattagaaaaaccatttcataactttgtcaaagttaaattataggctaaatcctatatatcttaatggcacatgcagcgcaagtaggtctacaagacgctacatcccctatcatagaagagcttatcacctttcatgatcacgccctcataatcattttccttatctgcttcctagtcctgtatgcccttttcctaacactcacaacaaaactaactaatactaacatctcagacgctcaggaaatagaaaccgtctgaactatcctgcccgccatcatcctagtcctcatcgccctcccatccctacgcatcctttacataacagacgaggtcaacgatccctcccttaccatcaaatcaattggccaccaatggtactgaacctacgagtacaccgactacggcggactaatcttcaactcctacatacttcccccattattcctagaaccaggcgacctgcgactccttgacgttgacaatcgagtagtactcccgattgaagcccccattcgtataataattacatcacaagacgtcttgcactcatgagctgttcccacattaggcttaaaaacagatgcaattcccggacgtctaaaccaaaccactttcaccgctacacgaccgggggtatactacggtcaatgctctgaaatctgtggagcaaaccacagtttcatacccatcgtcctagaattaattcccctaaaaatctttgaaatagggcccgtatttaccctatagcaccccctctaccccctctagagcccactgtaaagctaacttagcattaaccttttaagttaaagattaagagaaccaacacctctttacagtgaaatgccccaactaaatactaccatatggcccaccataattacccccatactccttacactattcctcatcacccaactaaaaatattaaacacaaactaccacctacctccctcaccaaagcccataaaaataaaaaattataacaaaccctgagaaccaaaatgaacgaaaatctgttcgcttcattcattgcccccacaatcctaggcctacccgccgcagtactgatcattctatttccccctctattgatccccacctccaaatatctcatcaacaaccgactaatcaccacccaacaatgactaatcaaactaacctcaaaacaaatgatagccatacacaacactaaaggacgaacctgatctcttatactagtatccttaatcatttttattgccacaactaacctcctcggactcctgcctcactcatttacaccaaccacccaactatctataaacctagccatggccatccccttatgagcgggcgcagtgattataggctttcgctctaagattaaaaatgccctagcccacttcttaccacaaggcacgcctacaccccttatccccatactagttattatcgaaaccatcagcctactcattcaaccaatagccctggccgtacgcctaaccgctaacattactgcaggccacctactcatgcacctaattggaagcgccaccctagcaatatcaaccattaaccttccctctacacttatcatcttcacaattctaattctactgactatcctagaaatcgctgtcgccttaatccaagcctacgttttcacacttctagtaagcctctacctgcacgacaacacataatgacccaccaatcgcatgcctatcatatagtaaaacccagcccatgacccctaacaggggccctctcagccctcctaatgacctccggcctagccatgtgatttcacttccactccataacgctcctcatactaggcctactaaccaacacactaaccatataccaatgatggcgcgatgtaacacgagaaagcacataccaaggccaccacacaccacctgtccaaaaaggccttcgatacgggataatcctatttattacctcagaagtttttttcttcgcaggatttttctgagccttttaccactccagcctagcccctaccccccaactaggagggcactggcccccaacaggcatcaccccgctaaatcccctagaagtcccactcctaaacacatccgtattactcgcatcaggagtatcaatcacctgagctcaccatagtctaatagaaaacaaccgaaaccaaataattcaagcactgcttattacaattttactgggtctctattttaccctcctacaagcctcagagtacttcgagtctcccttcaccatttccgacggcatctacggctcaacattttttgtagccacaggcttccacggacttcacgtcattattggctcaactttcctcactatctgcttcatccgccaactaatatttcactttacatccaaacatcactttggcttcgaagccgccgcctgatactggcattttgtagatgtggtttgactatttctgtatgtctccatctattgatgagggtcttactcttttagtataaatagtaccgttaacttccaattaactagttttgacaacattcaaaaaagagtaataaacttcgccttaattttaataatcaacaccctcctagccttactactaataatcattacattttgactaccacaactcaacggctacatagaaaaatccaccccttacgagtgcggcttcgaccctatatcccccgcccgcgtccctttctccataaaattcttcttagtagctattaccttcttattatttgatctagaaattgccctccttttacccctaccatgagccctacaaacaactaacctgccactaatagttatgtcatccctcttattaatcatcatcctagccctaagtctggcctatgagtgactacaaaaaggattagactgagccgaattggtatatagtttaaacaaaacgaatgatttcgactcattaaattatgataatcatatttaccaaatgcccctcatttacataaatattatactagcatttaccatctcacttctaggaatactagtatatcgctcacacctcatatcctccctactatgcctagaaggaataatactatcgctgttcattatagctactctcataaccctcaacacccactccctcttagccaatattgtgcctattgccatactagtctttgccgcctgcgaagcagcggtgggcctagccctactagtctcaatctccaacacatatggcctagactacgtacataacctaaacctactccaatgctaaaactaatcgtcccaacaattatattactaccactgacatgactttccaaaaaacacataatttgaatcaacacaaccacccacagcctaattattagcatcatccccctactattttttaaccaaatcaacaacaacctatttagctgttccccaaccttttcctccgaccccctaacaacccccctcctaatactaactacctgactcctacccctcacaatcatggcaagccaacgccacttatccagtgaaccactatcacgaaaaaaactctacctctctatactaatctccctacaaatctccttaattataacattcacagccacagaactaatcatattttatatcttcttcgaaaccacacttatccccaccttggctatcatcacccgatgaggcaaccagccagaacgcctgaacgcaggcacatacttcctattctacaccctagtaggctcccttcccctactcatcgcactaatttacactcacaacaccctaggctcactaaacattctactactcactctcactgcccaagaactatcaaactcctgagccaacaacttaatatgactagcttacacaatagcttttatagtaaagatacctctttacggactccacttatgactccctaaagcccatgtcgaagcccccatcgctgggtcaatagtacttgccgcagtactcttaaaactaggcggctatggtataatacgcctcacactcattctcaaccccctgacaaaacacatagcctaccccttccttgtactatccctatgaggcataattataacaagctccatctgcctacgacaaacagacctaaaatcgctcattgcatactcttcaatcagccacatagccctcgtagtaacagccattctcatccaaaccccctgaagcttcaccggcgcagtcattctcataatcgcccacggacttacatcctcattactattctgcctagcaaactcaaactacgaacgcactcacagtcgcatcataatcctctctcaaggacttcaaactctactcccactaatagctttttgatgacttctagcaagcctcgctaacctcgccttaccccccactattaacctactgggagaactctctgtgctagtaaccacgttctcctgatcaaatatcactctcctactcacaggactcaacatactagtcacagccctatactccctctacatatttaccacaacacaatggggctcactcacccaccacattaacaacataaaaccctcattcacacgagaaaacaccctcatgttcatacacctatcccccattctcctcctatccctcaaccccgacatcattaccgggttttcctcttgtaaatatagtttaaccaaaacatcagattgtgaatctgacaacagaggcttacgaccccttatttaccgagaaagctcacaagaactgctaactcatacccccatgtctaacaacatggctttctcaacttttaaaggataacagctatccattggtcttaggccccaaaaattttggtgcaactccaaataaaagtaataaccatgcacactactataaccaccctaaccctgacttccctaattccccccatccttaccaccctcgttaaccctaacaaaaaaaactcatacccccattatgtaaaatccattgtcgcatccacctttattatcagtctcttccccacaacaatattcatgtgcctagaccaagaagttattatctcgaactgacactgagccacaacccaaacaacccagctctccctaagcttcaaactagactacttctccataatattcatccctgtagcattgttcgttacatggtccatcatagaattctcactgtgatatataaactcagacccaaacattaatcagttcttcaaatatctactcattttcctaattaccatactaatcttagttaccgctaacaacctattccaactgttcatcggctgagagggcgtaggaattatatccttcttgctcatcagttgatgatacgcccgagcagatgccaacacagcagccattcaagcaatcctatacaaccgtatcggcgatatcggtttcatcctcgccttagcatgatttatcctacactccaactcatgagacccacaacaaatagcccttctgaacgctaatccaagcctcaccccactactaggcctcctcctagcagcagcaggcaaatcagcccaattaggtctccacccctgactcccctcagccatagaaggccccaccccagtctcagccctactccactcaagcactatagttgtagcaggaatcttcttactcatccgcttccaccccctagcagaaaatagcccactaatccaaactctaacactatgcttaggcgctatcaccactctgttcgcagcagtctgcgcccttacacaaaatgacatcaaaaaaatcgtagccttctccacttcaagtcaactaggactcataatagttacaatcggcatcaaccaaccacacctagcattcctgcacatctgtacccacgccttcttcaaagccatactatttatgtgctccgggtccatcatccacaaccttaacaatgaacaagatattcgaaaaataggaggactactcaaaaccatacctctcacttcaacctccctcaccattggcagcctagcattagcaggaatacctttcctcacaggtttctactccaaagaccacatcatcgaaaccgcaaacatatcatacacaaacgcctgagccctatctattactctcatcgctacctccctaacaagcgcctatagcactcgaataattcttctcaccctaacaggtcaacctcgcttccctacccttactaacattaacgaaaataaccccaccctactaaaccccattaaacgcctggcagccggaagcctattcgcaggatttctcattactaacaacatttcccccgcatcccccttccaaacaacaatccccctctacctaaaactcacagccctcgctgtcactttcctaggacttctaacagccctagacctcaactacctaaccaacaaacttaaaataaaatccccactatgcacattttatttctccaacatactcggattctaccctagcatcacacaccgcacaatcccctatctaggccttcttacgagccaaaacctgcccctactcctcctagacctaacctgactagaaaagctattacctaaaacaatttcacagcaccaaatctccacctccgtcatcacctcaacccaaaaaggcataattaaactttacttcctctctttcttcttcccactcatcctaaccctactcctaatcacataacctattcccccgagcaatctcaattacaatatatacaccaacaaacaatgttcaaccagtaactactactaatcaacgcccataatcatacaaagcccccgcaccaataggatcctcccgaatcaaccctgacccctctccttcataaattattcagcttcctacactattaaagtttaccacaaccaccaccccatcatactctttcacccacagcaccaatcctacctccatcgctaaccccactaaaacactcaccaagacctcaacccctgacccccatgcctcaggatactcctcaatagccatcgctgtagtatatccaaagacaaccatcattccccctaaataaattaaaaaaactattaaacccatataacctcccccaaaattcaaaataataacacacccgaccacaccgctaacaatcaatactaaacccccataaataggagaaggcttagaagaaaaccccacaaaccccattactaaacccacactcaacagaaacaaagcatacatcattattctcgcacggactacaaccacgaccaatgatatgaaaaaccatcgttgtatttcaactacaagaacaccaatgaccccaatacgcaaaattaaccccctaataaaattaattaaccactcattcatcgacctccccaccccatccaacatctccgcatgatgaaacttcggctcactccttggcgcctgcctgatcctccaaatcaccacaggactattcctagccatgcactactcaccagacgcctcaaccgccttttcatcaatcgcccacatcactcgagacgtaaattatggctgaatcatccgctaccttcacgccaatggcgcctcaatattctttatctgcctcttcctacacatcgggcgaggcctatattacggatcatttctctactcagaaacctgaaacatcggcattatcctcctgcttacaactatagcaacagccttcataggctatgtcctcccgtgaggccaaatatcattctgaggggccacagtaattacaaacttactatccgccatcccatacattggaacagacctagttcaatgagtctgaggaggctactcagtagacagtcccaccctcacacgattctttacctttcacttcatcttacccttcattattgcagccctagcaacactccacctcctattcttgcacgaaacgggatcaaacaaccccctaggaatcacctcccattccgataaaatcaccttccacccttactacacaatcaaagacgccctcggcttacttctcttccttctctccttaatgacattaacactattctcaccagacctcctaggcgacccagacaattataccctagccaaccccttaaacacccctccccacatcaagcccgaatggtatttcctattcgcctacacaattctccgatccgtccctaacaaactaggaggcgtccttgccctattactatccatcctcatcctagcaataatccccatcctccatatatccaaacaacaaagcataatatttcgcccactaagccaatcactttattgactcctagccgcagacctcctcattctaacctgaatcggaggacaaccagtaagctacccttttaccatcattggacaagtagcatccgtactatacttcacaacaatcctaatcctaataccaactatctccctaattgaaaacaaaatactcaaatgggcctgtccttgtagtataaactaatacaccagtcttgtaaaccggagatgaaaacctttttctcaaggacaaatcagagaaaaagtctttaactccaccattagcacccaaagctaagattctaatttaaactattctctgttctttcatggggaagcagatttgggtaccacccaagtattgactcacccatcaacaaccgctatgtatttcgtacattactgccagccaacatgaatattgtacagtaccataaatacttgaccacctgtagtacataaaaacccaatccacatcaaaaccccctccccatgcttacaagcaagtacaacaatcaaccttcaactatcacacatcaactgcaactccaaagccacccctcacccactaggatatcaacaaacctacccacccttaacagtacatagtacataaagccatttaccgtacatagcacattacagtcaaatcccttctcgtccccatggatgacccccctcagataggagtcccttgaccaccatcctccgtgaaatcaatatcccgcacaagagtgctactctcctcgctccgggcccataacacttgggggtagctaaagtgaactgtatccgacatctggttcctacttcagggtcataaagcctaaatagcccacacgttccccttaaataagacatcacgatg

SEQ ID NO: 224 - DNA, 16571 bp, Homo sapiens mitochondrial
  3109: "n" refers to a nucleotide at position 3107 of the Cambridge Reference Sequence (CRS, Anderson et al. 1981 Nature 290:457-465), later determined to be absent from the human mtDNA sequence according to the revised CRS (rCRS, Andrews et al. 1999 Nature Genetics 23:147); "n" therefore represents a single nucleotide deletion at a position corresponding to nucleotide 3107 of SEQ ID NO:1 as provided herein.
gatcacaggtctatcaccctattaaccactcacgggagctctccatgcatttggtattttcgtctggggggtgtgcacgcgatagcattgcgagacgctggagccggagcaccctatgtcgcagtatctgtctttgattcctgccccatcccattatttatcgcacctacgttcaatattacaggcgaacatacctactaaagtgtgttaattaattaatgcttgtaggacataataataacaattgaatgtctgcacagccgctttccacacagacatcataacaaaaaatttccaccaaaccccccctcccccccgcttctggccacagcacttaaacacatctctgccaaaccccaaaaacaaagaaccctaacaccagcctaaccagatttcaaattttatcttttggcggtatgcacttttaacagtcaccccccaactaacacattattttcccctcccactcccatactactaatctcatcaatacaacccccgcccatcctacccagcacacacacaccgctgctaaccccataccccgaaccaaccaaaccccaaagacaccccccacagtttatgtagcttacctcctcaaagcaatacactgaaaatgtttagacgggctcacatcaccccataaacaaataggtttggtcctagcctttctattagctcttagtaagattacacatgcaagcatccccgttccagtgagttcaccctctaaatcaccacgatcaaaagggacaagcatcaagcacgcaacaatgcagctcaaaacgcttagcctagccacacccccacgggaaacagcagtgattaacctttagcaataaacgaaagtttaactaagctatactaaccccagggttggtcaatttcgtgccagccaccgcggtcacacgattaacccaagtcaatagaagccggcgtaaagagtgttttagatcaccccctccccaataaagctaaaactcacctgagttgtaaaaaactccagttgacacaaaataaactacgaaagtggctttaacatatctgaacacacaatagctaagacccaaactgggattagataccccactatgcttagccctaaacctcaacagttaaatcaacaaaactgctcgccagaacactacgagccacagcttaaaactcaaaggacctggcggtgcttcatatccctctagaggagcctgttctgtaatcgataaaccccgatcaacctcaccacctcttgctcagcctatataccgccatcttcagcaaaccctgatgaaggctacaaagtaagcgcaagtacccacgtaaagacgttaggtcaaggtgtagcccatgaggtggcaagaaatgggctacattttctaccccagaaaactacgatagcccttatgaaacttaagggtcgaaggtggatttagcagtaaactgagagtagagtgcttagttgaacagggccctgaagcgcgtacacaccgcccgtcaccctcctcaagtatacttcaaaggacatttaactaaaacccctacgcatttatatagaggagacaagtcgtaacatggtaagtgtactggaaagtgcacttggacgaaccagagtgtagcttaacacaaagcacccaacttacacttaggagatttcaacttaacttgaccgctctgagctaaacctagccccaaacccactccaccttactaccagacaaccttagccaaaccatttacccaaataaagtataggcgatagaaattgaaacctggcgcaatagatatagtaccgcaagggaaagatgaaaaattataaccaagcataatatagcaaggactaacccctataccttctgcataatgaattaactagaaataactttgcaaggagagccaaagctaagacccccgaaaccagacgagctacctaagaacagctaaaagagcacacccgtctatgtagcaaaatagtgggaagatttataggtagaggcgacaaacctaccgagcctggtgatagctggttgtccaagatagaatcttagttcaactttaaatttgcccacagaaccctctaaatccccttgtaaatttaactgttagtccaaagaggaacagctctttggacactaggaaaaaaccttgtagagagagtaaaaaatttaacacccatagtaggcctaaaagcagccaccaattaagaaagcgttcaagctcaacacccactacctaaaaaatcccaaacatataactgaactcctcacacccaattggaccaatctatcaccctatagaagaactaatgttagtataagtaacatgaaaacattctcctccgcataagcctgcgtcagattaaaacactgaactgacaattaacagcccaatatctacaatcaaccaacaagtcattattacccccactgtcaacccaacacaggcatgctcataaggaaaggttaaaaaaagtaaaaggaactcggcaaatcttaccccgcctgtttaccaaaaacatcacctctagcatcaccagtattagaggcaccgcctgcccagtgacacatgtttaacggccgcggtaccctaaccgtgcaaaggtagcataatcacttgttccttaaatagggacctgtatgaatggctccacgagggttcagctgtctcttacttttaaccagtgaaattgacctgcccgtgaagaggcgggcatgacacagcaagacgagaagaccctatggagctttaatttattaatgcaaacagtacctaacaaacccacaggtcctaaactactaaacctgcattaaaaatttcggttggggcgacctcggagcagaacccaacctccgagcagtacatgctaagacttcaccagtcaaagcgaactactatactcaattgatccaataacttgaccaacggaacaagttaccctagggataacagcgcaatcctattctagagtccatatcaacaatagggtttacgacctcgatgttggatcaggacatcccgatggtgcagccgctattaaaggttcgtttgttcaacgattaaagtcctacgtgatctgagttcagaccggagtaatccaggtcggtttctatctacnttcaaattcctccctgtacgaaaggacaagagaaataaggcctacttcacaaagcgccttcccccgtaaatgatatcatctcaacttagtattatacccacacccacccaagaacagggtttgttaagatggcagagcccggtaatcgcataaaacttaaaactttacagtcagaggttcaattcctcttcttaacaacatacccatggccaacctcctactcctcattgtacccattctaatcgcaatggcattcctaatgcttaccgaacgaaaaattctaggctatatacaactacgcaaaggccccaacgttgtaggcccctacgggctactacaacccttcgctgacgccataaaactcttcaccaaagagcccctaaaacccgccacatctaccatcaccctctacatcaccgccccgaccttagctctcaccatcgctcttctactatgaacccccctccccatacccaaccccctggttaacctcaacctaggcctcctatttattctagccacctctagcctagccgtttactcaatcctctgatcagggtgagcatcaaactcaaactacgccctgatcggcgcactgcgagcagtagcccaaacaatctcatatgaagtcaccctagccatcattctactatcaacattactaataagtggctcctttaacctctccacccttatcacaacacaagaacacctctgattactcctgccatcatgacccttggccataatatgatttatctccacactagcagagaccaaccgaacccccttcgaccttgccgaaggggagtccgaactagtctcaggcttcaacatcgaatacgccgcaggccccttcgccctattcttcatagccgaatacacaaacattattataataaacaccctcaccactacaatcttcctaggaacaacatatgacgcactctcccctgaactctacacaacatattttgtcaccaagaccctacttctgacctccctgttcttatgaattcgaacagcatacccccgattccgctacgaccaactcatacacctcctatgaaaaaacttcctaccactcaccctagcattacttatatgatatgtctccatacccattacaatctccagcattccccctcaaacctaagaaatatgtctgataaaagagttactttgatagagtaaataataggagcttaaacccccttatttctaggactatgagaatcgaacccatccctgagaatccaaaattctccgtgccacctatcacaccccatcctaaagtaaggtcagctaaataagctatcgggcccataccccgaaaatgttggttatacccttcccgtactaattaatcccctggcccaacccgtcatctactctaccatctttgcaggcacactcatcacagcgctaagctcgcactgattttttacctgagtaggcctagaaataaacatgctagcttttattccagttctaaccaaaaaaataaaccctcgttccacagaagctgccatcaagtatttcctcacgcaagcaaccgcatccataatccttctaatagctatcctcttcaacaatatactctccggacaatgaaccataaccaatactaccaatcaatactcatcattaataatcataatggctatagcaataaaactaggaatagccccctttcacttctgagtcccagaggttacccaaggcacccctctgacatccggcctgcttcttctcacatgacaaaaactagcccccatctcaatcatataccaaatctctccctcactaaacgtaagccttctcctcactctctcaatcttatccatcatagcaggcagttgaggtggattaaaccaaacccagctacgcaaaatcttagcatactcctcaattacccacataggatgaataatagcagttctaccgtacaaccctaacataaccattcttaatttaactatttatattatcctaactactaccgcattcctactactcaacttaaactccagcaccacgaccctactactatctcgcacctgaaacaagctaacatgactaacacccttaattccatccaccctcctctccctaggaggcctgcccccgctaaccggctttttgcccaaatgggccattatcgaagaattcacaaaaaacaatagcctcatcatccccaccatcatagccaccatcaccctccttaacctctacttctacctacgcctaatctactccacctcaatcacactactccccatatctaacaacgtaaaaataaaatgacagtttgaacatacaaaacccaccccattcctccccacactcatcgcccttaccacgctactcctacctatctccccttttatactaataatcttatagaaatttaggttaaatacagaccaagagccttcaaagccctcagtaagttgcaatacttaatttctgtgacagctaaggactgcaaaaccccactctgcatcaactgaacgcaaatcagccactttaattaagctaagcccttactagaccaatgggacttaaacccacaaacacttagttaacagctaagcaccctaatcaactggcttcaatctacttctcccgccgccgggaaaaaaggcgggagaagccccggcaggtttgaagctgcttcttcgaatttgcaattcaatatgaaaatcacctcggagctggtaaaaagaggcctaacccctgtctttagatttacagtccaatgcttcactcagccattttacctcacccccactgatgttcgccgaccgttgactattctctacaaaccacaaagacattggaacactatacctattattcggcgcatgagctggagtcctaggcacagctctaagcctccttattcgagccgagctgggccagccaggcaaccttctaggtaacgaccacatctacaacgttatcgtcacagcccatgcatttgtaataatcttcttcatagtaatacccatcataatcggaggctttggcaactgactagttcccctaataatcggtgcccccgatatggcgtttccccgcataaacaacataagcttctgactcttacctccctctctcctactcctgctcgcatctgctatagtggaggccggagcaggaacaggttgaacagtctaccctcccttagcagggaactactcccaccctggagcctccgtagacctaaccatcttctccttacacctagcaggtgtctcctctatcttaggggccatcaatttcatcacaacaattatcaatataaaaccccctgccataacccaataccaaacgcccctcttcgtctgatccgtcctaatcacagcagtcctacttctcctatctctcccagtcctagctgctggcatcactatactactaacagaccgcaacctcaacaccaccttcttcgaccccgccggaggaggagaccccattctataccaacacctattctgatttttcggtcaccctgaagtttatattcttatcctaccaggcttcggaataatctcccatattgtaacttactactccggaaaaaaagaaccatttggatacataggtatggtctgagctatgatatcaattggcttcctagggtttatcgtgtgagcacaccatatatttacagtaggaatagacgtagacacacgagcatatttcacctccgctaccataatcatcgctatccccaccggcgtcaaagtatttagctgactcgccacactccacggaagcaatatgaaatgatctgctgcagtgctctgagccctaggattcatctttcttttcaccgtaggtggcctgactggcattgtattagcaaactcatcactagacatcgtactacacgacacgtactacgttgtagctcacttccactatgtcctatcaataggagctgtatttgccatcataggaggcttcattcactgatttcccctattctcaggctacaccctagaccaaacctacgccaaaatccatttcactatcatattcatcggcgtaaatctaaccttcttcccacaacactttctcggcctatccggaatgccccgacgttactcggactaccccgatgcatacaccacatgaaatatcctatcatctgtaggttcattcatttctctaacagcagtaatattaataattttcatgatttgagaagccttcgcttcgaagcgaaaagtcctaatagtagaagaaccctccataaacctggagtgactatatggatgccccccaccctaccacacattcgaagaacccgtatacataaaatctagacaaaaaaggaaggaatcgaaccccccaaagctggtttcaagccaaccccatggcctccatgactttttcaaaaaggtattagaaaaaccatttcataactttgtcaaagttaaattataggctaaatcctatatatcttaatggcacatgcagcgcaagtaggtctacaagacgctacttcccctatcatagaagagcttatcacctttcatgatcacgccctcataatcattttccttatctgcttcctagtcctgtatgcccttttcctaacactcacaacaaaactaactaatactaacatctcagacgctcaggaaatagagaccgtctgaactatcctgcccgccatcatcctagtcctcatcgccctcccatccctacgcatcctttacataacagacgaggtcaacgatccctcccttaccatcaaatcaattggccaccaatggtactgaacctacgagtacaccgactacggcggactaatcttcaactcctacatacttcccccattattcctagaaccaggcgacctgcgactccttgacgttgacaatcgagtagtactcccgattgaagcccccattcgtataataattacatcacaagacgtcttgcactcatgagctgtccccacattaggcttaaaaacagatgcaattcccggacgtctaaaccaaaccactttcaccgctacacgaccgggggtatactacggtcaatgctctgaaatctgtggagcaaaccacagtttcatacccatcgtcctagaattaattcccctaaaaatctttgaaatagggcccgtatttaccctatagcaccccctctaccccctctagagcccactgtaaagctaacttagcattaaccttttaagttaaagattaagagaaccaacacctctttacagtgaaatgccccaactaaatactaccgtatggcccaccataattacccccatactccttacactattcctcatcacccaactaaaaatattaaacacaaactaccacctacctccctcaccaaagcccataaaaataaaaaattataacaaaccctgagaaccaaaatgaacgaaaatctgttcgcttcattcattgcccccacaatcctaggcctacccgccgcagtactgatcattctatttccccctctattgatccccacctccaaatatctcatcaacaaccgactaatcaccacccaacaatgactaatcaaactaacctcaaaacaaatgatagccatacacaacactaaaggacgaacctgatctcttatactagtatccttaatcatttttattgccacaactaacctcctcggactcctgcctcactcatttacaccaaccacccaactatctataaacctagccatggccatccccttatgagcgggcgcagtgattataggctttcgctctaagattaaaaatgccctagcccacttcttaccacaaggcacacctacaccccttatccccatactagttattatcgaaaccatcagcctactcattcaaccaatagccctggccgtacgcctaaccgctaacattactgcaggccacctactcatgcacctaattggaagcgccaccctagcaatatcaaccattaaccttccctctacacttatcatcttcacaattctaattctactgactatcctagaaatcgctgtcgccttaatccaagcctacgttttcacacttctagtaagcctctacctgcacgacaacacataatgacccaccaatcgcatgcctatcatatagtaaaacccagcccatgacccctaacaggggccctctcagccctcctaatgacctccggcctagccatgtgatttcacttccactccataacgctcctcatactaggcctactaaccaacacactaaccatataccaatgatggcgcgatgtaacacgagaaagcacataccaaggccaccacacaccacctgtccaaaaaggccttcgatacgggataatcctatttattacctcagaagtttttttcttcgcaggatttttctgagccttttaccactccagcctagcccctaccccccaactaggagggcactggcccccaacaggcatcaccccgctaaatcccctagaagtcccactcctaaacacatccgtattactcgcatcaggagtatcaatcacctgagctcaccatagtctaatagaaaacaaccgaaaccaaataattcaagcactgcttattacaattttactgggtctctattttaccctcctacaagcctcagagtacttcgagtctcccttcaccatttccgacggcatctacggctcaacattttttgtagccacaggcttccacggacttcacgtcattattggctcaactttcctcactatctgcttcatccgccaactaatatttcactttacatccaaacatcactttggcttcgaagccgccgcctgatactggcattttgtagatgtggtttgactatttctgtatgtctccatctattgatgagggtcttactcttttagtataaatagtaccgttaacttccaattaactagttttgacaacattcaaaaaagagtaataaacttcgccttaattttaataatcaacaccctcctagccttactactaataatcattacattttgactaccacaactcaacggctacatagaaaaatccaccccttacgagtgcggcttcgaccctatatcccccgcccgcgtccctttctccataaaattcttcttagtagctattaccttcttattatttgatctagaaattgccctccttttacccctaccatgagccctacaaacaactaacctgccactaatagttatgtcatccctcttattaatcatcatcctagccctaagtctggcctatgagtgactacaaaaaggattagactgagccgaattggtatatagtttaaacaaaacgaatgatttcgactcattaaattatgataatcatatttaccaaatgcccctcatttacataaatattatactagcatttaccatctcacttctaggaatactagtatatcgctcacacctcatatcctccctactatgcctagaaggaataatactatcgctgttcattatagctactctcataaccctcaacacccactccctcttagccaatattgtgcctattgccatactagtctttgccgcctgcgaagcagcggtgggcctagccctactagtctcaatctccaacacatatggcctagactacgtacataacctaaacctactccaatgctaaaactaatcgtcccaacaattatattactaccactgacatgactttccaaaaaacacataatttgaatcaacacaaccacccacagcctaattattagcatcatccccctactattttttaaccaaatcaacaacaacctatttagctgttccccaaccttttcctccgaccccctaacaacccccctcctaatactaactacctgactcctacccctcacaatcatggcaagccaacgccacttatccagtgaaccactatcacgaaaaaaactctacctctctatactaatctccctacaaatctccttaattataacattcacagccacagaactaatcatattttatatcttcttcgaaaccacacttatccccaccttggctatcatcacccgatgaggcaaccagccagaacgcctgaacgcaggcacatacttcctattctacaccctagtaggctcccttcccctactcatcgcactaatttacactcacaacaccctaggctcactaaacattctactactcactctcactgcccaagaactatcaaactcctgagccaacaacttaatatgactagcttacacaatagcttttatagtaaagatacctctttacggactccacttatgactccctaaagcccatgtcgaagcccccatcgctgggtcaatagtacttgccgcagtactcttaaaactaggcggctatggtataatacgcctcacactcattctcaaccccctgacaaaacacatagcctaccccttccttgtactatccctatgaggcataattataacaagctccatctgcctacgacaaacagacctaaaatcgctcattgcatactcttcaatcagccacatagccctcgtagtaacagccattctcatccaaaccccctgaagcttcaccggcgcagtcattctcataatcgcccacggacttacatcctcattactattctgcctagcaaactcaaactacgaacgcactcacagtcgcatcataatcctctctcaaggacttcaaactctactcccactaatagctttttgatgacttctagcaagcctcgctaacctcgccttaccccccactattaacctactgggagaactctctgtgctagtaaccacattctcctgatcaaatatcactctcctactcacaggactcaacatactagtcacagccctatactccctctacatatttaccacaacacaatggggctcactcacccaccacattaacaacataaaaccctcattcacacgagaaaacaccctcatgttcatacacctatcccccattctcctcctatccctcaaccccgacatcattaccgggttttcctcttgtaaatatagtttaaccaaaacatcagattgtgaatctgacaacagaggcttacgaccccttatttaccgagaaagctcacaagaactgctaactcatgcccccatgtctaacaacatggctttctcaacttttaaaggataacagctatccattggtcttaggccccaaaaattttggtgcaactccaaataaaagtaataaccatgcacactactataaccaccctaaccctgacttccctaattccccccatccttaccaccctcgttaaccctaacaaaaaaaactcatacccccattatgtaaaatccattgtcgcatccacctttattatcagtctcttccccacaacaatattcatgtgcctagaccaagaagttattatctcgaactgacactgagccacaacccaaacaacccagctctccctaagcttcaaactagactacttctccataatattcatccctgtagcattgttcgttacatggtccatcatagaattctcactgtgatatataaactcagacccaaacattaatcagttcttcaagtatctactcattttcctaattaccatactaatcttagttaccgctaacaacctattccaactgttcatcggctgagagggcgtaggaattatatccttcttgctcatcagttgatgatacgcccgagcagatgccaacacagcagccattcaagcaatcctatacaaccgtatcggcgatatcggtttcatcctcgccttagcatgatttatcctacactccaactcatgagacccacaacaaatagcccttctaaacgctaatccaagcctcaccccactactaggcctcctcctagcagcagcaggcaaatcagcccaattaggtctccacccctgactcccctcagccatagaaggccccaccccagtctcagccctactccactcaagcactatagttgtagcaggaatcttcttactcatccgcttccaccccctagcagaaaatagcccactaatccaaactctaacactatgcttaggcgctatcaccactctgttcgcagcagtctgcgcccttacacaaaatgacatcaaaaaaatcgtagccttctccacttcaagtcaactaggactcataatagttacaatcggcatcaaccaaccacacctagcattcctgcacatctgtacccacgccttcttcaaagccatactatttatgtgctccgggtccatcatccacaaccttaacaatgaacaagatattcgaaaaataggaggactactcaaaaccatacctctcacttcaacctccctcaccattggcagcctagcattagcaggaatacctttcctcacaggtttctactccaaagaccacatcatcgaaaccgcaaacatatcatacacaaacgcctgagccctatctattactctcatcgctacctccctaacaagcgcctatagcactcgaataattcttctcaccctaacaggtcaacctcgcttccctacccttactaacattaacgaaaataaccccaccctactaaaccccattaaacgcctggcagccggaagcctattcgcaggatttctcattactaacaacatttcccccgcatcccccttccaaacaacaatccccctctacctaaaactcacggccctcgctgtcactttcctaggacttctaacagccctagacctcaactacctaaccaacaaacttaaaataaaatccccactatgcacattttatttctccaacatactcggattctaccctagcatcacacaccgcacaatcccctatctaggccttcttacgagccaaaacctgcccctactcctcctagacctaacctgactagaaaagctattacctaaaacaatttcacagcaccaaatctccacctccatcatcacctcaacccaaaaaggcataattaaactttacttcctctctttcttcttcccactcatcctaaccctactcctaatcacataacctattcccccgagcaatctcaattacaatatatacaccaacaaacaatgttcaaccagtaactactactaatcaacgcccataatcatacaaagcccccgcaccaataggatcctcccgaatcaaccctgacccctctccttcataaattattcagcttcctacactattaaagtttaccacaaccaccaccccatcatactctttcacccacagcaccaatcctacctccatcgctaaccccactaaaacactcaccaagacctcaacccctgacccccatgcctcaggatactcctcaatagccatcgctgtagtatatccaaagacaaccatcattccccctaaataaattaaaaaaactattaaacccatataacctcccccaaaattcagaataataacacacccgaccacgccgctaacaatcaatactaaacccccataaataggagaaggcttagaagaaaaccccacaaaccccattactaaacccacactcaacagaaacaaagcatacatcattattctcgcacggactacaaccacgaccaatgatatgaaaaaccatcgttgtatttcaactacaagaacaccaatgaccccaatacgcaaaattaaccccctaataaaattaattaaccactcattcatcgacctccccaccccatccaacatctccgcatgatgaaacttcggctcactccttggcgcctgcctgatcctccaaatcaccacaggactattcctagccatgcactactcaccagacgcctcaaccgccttttcatcaatcgcccacatcactcgagacgtaaattatggctgaatcatccgctaccttcacgccaatggcgcctcaatattctttatctgcctcttcctacacatcgggcgaggcctatattacggatcatttctctactcagaaacctgaaacatcggcattatcctcctgcttgcaactatagcaacagccttcataggctatgtcctcccgtgaggccaaatatcattctgaggggccacagtaattacaaacttactatccgccatcccatacattgggacagacctagttcaatgaatctgaggaggctactcagtagacagtcccaccctcacacgattctttacctttcacttcatcttacccttcattattgcagccctagcagcactccacctcctattcttgcacgaaacgggatcaaacaaccccctaggaatcacctcccattccgataaaatcaccttccacccttactacacaatcaaagacgccctcggcttacttctcttccttctctccttaatgacattaacactattctcaccagacctcctaggcgacccagacaattataccctagccaaccccttaaacacccctccccacatcaagcccgaatgatatttcctattcgcctacacaattctccgatccgtccctaacaaactaggaggcgtccttgccctattactatccatcctcatcctagcaataatccccatcctccatatatccaaacaacaaagcataatatttcgcccactaagccaatcactttattgactcctagccgcagacctcctcattctaacctgaatcggaggacaaccagtaagctacccctttaccatcattggacaagtagcatccgtactatacttcacaacaatcctaatcctaataccaactatctccctaattgaaaacaaaatactcaaatgggcctgtccttgtagtataaactaatacaccagtcttgtaaaccggagatgaaaacctttttccaaggacaaatcagagaaaaagtctttaactccaccattagcacccaaagctaagattctaatttaaactattctctgttctttcatggggaagcagatttgggtaccacccaagtattgactcacccatcaacaaccgctatgtatttcgtacattactgccagccaccatgaatattgtacggtaccataaatacttgaccacctgtagtacataaaaacccaatccacatcaaaaccccccccccatgcttacaagcaagtacagtaatcaaccttcaactatcacacatcaactgcaactccaaagccacccctcacccactaggatatcaacaaacctacccatccttaacagtacatggtacataaagccatttaccgtacatagcacattacagtcaaatcccttctcgtccccatggatgacccccctcagataggagtcccttgaccaccatcctccgtgaaatcaatatcccgcacaagagtgctactctcctcgctccgggcccataacacttgggggtagctaaagtgaactgtatccgacatctggttcctacttcagggccataaagcctaaatagcccacacgttccccttaaataagacatcacgatg

SEQ ID NO: 225 - DNA, 16571 bp, Homo sapiens mitochondrial
  3109: "n" refers to a nucleotide at position 3107 of the Cambridge Reference Sequence (CRS, Anderson et al. 1981 Nature 290:457-465), later determined to be absent from the human mtDNA sequence according to the revised CRS (rCRS, Andrews et al. 1999 Nature Genetics 23:147); "n" therefore represents a single nucleotide deletion at a position corresponding to nucleotide 3107 of SEQ ID NO:1 as provided herein.
gatcacaggtctatcaccctattaaccactcacgggagctctccatgcatttggtattttcgtctggggggtgtgcacgcgatagcattgcgagacgctggagccggagcaccctatgtcgcagtatctgtctttgattcctgcctcattctattatttatcgcacctacgttcaatattacaggcgaacatacctactaaagtgtgttaattagttaatgcttgtaggacataataataacaattgaatgtctgcacagccgctttccacacagacatcataacaaaaaattttcaccaaaccccccctctcccccgctcctggccacagcacttaaacacatctctgccaaaccccaaaaacaaagaaccctaacaccagcctaaccagatttcaaattttatcttttggcggtatgcacttttaacagtcaccccccaactaacacattattttcccctcccactcccatactactaatctcatcaacacaacccccgcccatcctacccaacacacacacaccgctgctaaccccataccccgaaccaaccaaaccccaaagacaccccccacagtttatgtagcttacctcctcaaagcaatacactgaaaatgtttagacgggctcacatcaccccataaacaaataggtttggtcctagcctttctattagctcttagtaagattacacatgcaagcatccccgttccagtgagttcaccctctaaatcaccacgatcaaaagggacaagcatcaagcacgcagcaatgcagctcaaaacgcttagcctagccacacccccacgggaaacagcagtgattaacctttagcaataaacgaaagtttaactaagctatactaaccccagggttggtcaatttcgtgccagccaccgcggtcacacgattaacccaagtcaatagaagccggcgtaaagagtgttttagatcaccccctccccaataaagctaaaactcacctgagttgtaaaaaactccagttgacacaaaatagactacgaaagtggctttaacatatctgaacacacaatagctaagacccaaactgggattagataccccactatgcttagccctaaacctcaacagttaaatcaacaaaactgctcgccagaacactacgagccacagcttaaaactcaaaggacctggcggtgcttcatatccctctagaggagcctgttctgtaatcgataaaccccgatcaacctcaccacctcttgctcagcctatataccgccatcttcagcaaaccctgatgaaggctacaaagtaagcgcaagtacccacgtaaagacgttaggtcaaggtgtagcccatgaggtggcaagaaatgggctacattttctaccccagaaaactacgatagcccttatgaaacttaagggtcgaaggtggatttagcagtaaactgagagtagagtgcttagttgaacagggccctgaagcgcgtacacaccgcccgtcaccctcctcaagtatacttcaaaggacatttaactaaaacccctacgcatttatatagaggagacaagtcgtaacatggtaagtgtactggaaagtgcacttggacgaaccagagtgtagcttaacacaaagcacccaacttacacttaggagatttcaacttaacttgaccgctctgagctaaacctagccccaaacccactccaccttactaccagacaaccttagccaaaccatttacccaaataaagtataggcgatagaaattgaaacctggcgcaatagatatagtaccgcaagggaaagatgaaaaattataaccaagcataatatagcaaggactaacccctataccttccgcataatgaattaactagaaataactttgcaaggagagccaaagctaagacccccgaaaccagacgagctacctaagaacagctaaaagagcacacccgtctatgtagcaaaatagtgggaagatttataggtagaggcgacaaacctaccgagcctggtgatagctggttgtccaagatagaatcttagttcaactttaaatttgcccacagaaccctctaaatccccttgtaaatttaactgttagtccaaagaggaacagctctttggacactaggaaaaaaccttgtagagagagtaaaaaatttaacacccatagtaggcctaaaagcagccaccaattaagaaagcgttcaagctcaacacccactacctaaaaaatcccaaacatataactgaactcctcacacccaattggaccaatctatcaccctatagaagaactaatgttagtataagtaacatgaaaacattctcctccgcataagcctgcgtcagattaaaacactgaactgacaattaacagcccaatatctacaatcaaccaacaagtcattattaccctcactgtcaacccaacacaggcatgctcataaggaaaggttaaaaaaagtaaaaggaactcggcaaatcttaccccgcctgtttaccaaaaacatcacctctagcatcaccagtattagaggcaccgcctgcccagtgacacatgtttaacggccgcggtaccctaaccgtgcaaaggtagcataatcacttgttccttaaatagggacctgtatgaatggctccacgagggttcagctgtctcttacttttaaccagtgaaattgacctgcccgtgaagaggcgggcatgacacagcaagacgagaagaccctatggagctttaatttattaatgcaaacagtacctaacaaacccacaggtcctaaactaccaaacctgcattaaaaatttcggttggggcgacctcggagcagaacccaacctccgagcagtacatgctaagacttcaccagtcaaagcgaactactatactcaattgatccaataacttgaccaacggaacaagttaccctagggataacagcgcaatcctattctagagtccatatcaacaatagggtttacgacctcgatgttggatcaggacatcccgatggtgcagccgctattaaaggttcgtttgttcaacgattaaagtcctacgtgatctgagttcagaccggagtaatccaggtcggtttctatctacnttcaaattcctccctgtacgaaaggacaagagaaataaggcctacttcacaaagcgccttcccccgtaaatgatatcatctcaacttagtattatacccacacccacccaagaacagggtttgttaagatggcagagcccggtaatcgcataaaacttaaaactttacagtcagaggttcaattcctcttcttaacaacatacccatggccaacctcctactcctcattgtacccattctaatcgcaatggcattcctaatgcttaccgaacgaaaaattctaggctatatacaactacgcaaaggccccaacgttgtaggcccctacgggctactacaacccttcgctgacgccataaaactcttcaccaaagagcccctaaaacccgccacatctaccatcaccctctacatcaccgccccgaccttagctctcaccatcgctcttctactatgaacccccctccccatacccaaccccctggtcaacctcaacctaggcctcctatttattctagccacctctagcctagccgtttactcaatcctctgatcagggtgagcatcaaactcaaactacgccctgatcggcgcactgcgagcagtagcccaaacaatctcatatgaagtcaccctagccatcattctactatcaacattactaataagtggctcctttaacctctccacccttatcacaacacaagaacacctctgattactcctgccatcatgacccttggccataatatgatttatctccacactagcagagaccaaccgaacccccttcgaccttgccgaaggggagtccgaactagtctcaggcttcaacatcgaatacgccgcaggccccttcgccctattcttcatagccgaatacacaaacattattataataaacaccctcaccactacaatcttcctaggaacaacatatgacgcactctcccctgaactctacacaacatattttgtcaccaagaccctacttctaacctccctgttcttatgaattcgaacagcatacccccgattccgctacgaccaactcatacacctcctatgaaaaaacttcctaccactcaccctagcattacttatatgacatgtctccatacccattacaatctccagcattccccctcaaacctaagaaatatgtctgataaaagagttactttgatagagtaaataataggagcttaaacccccttatttctaggactatgagaatcgaacccatccctgagaatccaaaattctccgtgccacctatcacaccccatcctaaagtaaggtcagctaaataagctatcgggcccataccccgaaaatgttggttatacccttcccgtactaattaatcccctggcccaacccgtcatctactctaccatctttgcaggcacactcatcacagcgctaagctcgcactgattttttacctgagtaggcctagaaataaacatgctagcttttattccagttctaaccaaaaaaataaaccctcgttccacagaagctgccatcaagtatttcctcacgcaagcaaccgcatccataatccttctaatagctatcctcttcaacaatatactctccggacaatgaaccataaccaatactaccaatcaatactcatcattaataatcataatggctatagcaataaaactaggaatagccccctttcacttctgagtcccagaggttacccaaggcacccctctgacatccggcctgcttcttctcacatgacaaaaactagcccccatctcaatcatataccaaatctctccctcactaaacgtaagccttctcctcactctctcaatcttatccatcatagcaggcagttgaggtggattaaaccaaacccagctacgcaaaatcttagcatactcctcaattacccacataggatgaataatagcagttctaccgtacaaccctaacataaccattcttaatttaactatttatattatcctaactactaccgcattcctactactcaacttaaactccagcaccacgaccctactactatctcgcacctgaaacaagctaacatgactaacacccttaattccatccaccctcctctccctaggaggcctgcccccgctaaccggctttttgcccaaatgggccattatcgaagaattcacaaaaaacaatagcctcatcatccccaccatcatagccaccatcaccctccttaacctctacttctacctacgcctaatctactccacctcaatcacactactccccatatctaacaacgtaaaaataaaatgacagtttgaacatacaaaacccaccccattcctccccacactcatcgcccttaccacgctactcctacctatctccccttttatactaataatcttatagaaatttaggttaaatacagaccaagagccttcaaagccctcagtaagttgcaatacttaatttctgtaacagctaaggactgcaaaaccccactctgcatcaactgaacgcaaatcagccactttaattaagctaagcccttactagaccaatgggacttaaacccacaaacacttagttaacagctaagcaccctaatcaactggcttcaatctacttctcccgccgccgggaaaaaaggcgggagaagccccggcaggtttgaagctgcttcttcgaatttgcaattcaatatgaaaatcacctcggagctggtaaaaagaggcctaacccctgtctttagatttacagtccaatgcttcactcagccattttacctcacccccactgatgttcgccgaccgttgactattctctacaaaccacaaagacattggaacactatacctattattcggcgcatgagctggagtcctaggcacagctctaagcctccttattcgagccgagctgggccagccaggcaaccttctaggtaacgaccacatctacaacgttatcgtcacagcccatgcatttgtaataatcttcttcatagtaatacccatcataatcggaggctttggcaactgactagttcccctaataatcggtgcccccgatatggcgtttccccgcataaacaacataagcttctgactcttacctccctctctcctactcctgctcgcatctgctatagtggaggccggagcaggaacaggttgaacagtctaccctcccttagcagggaactactcccaccctggagcctccgtagacctaaccatcttctccttacacctagcaggtgtctcctctatcttaggggccatcaatttcatcacaacaattatcaatataaaaccccctgccataacccaataccaaacgcccctcttcgtctgatccgtcctaatcacagcagtcctacttctcctatctctcccagtcctagctgctggcatcactatactactaacagaccgcaacctcaacaccaccttcttcgaccccgccggaggaggagaccccattctataccaacacctattctgatttttcggtcaccctgaagtttatattcttatcctaccaggcttcggaataatctcccatattgtaacttactactccggaaaaaaagaaccatttggatacataggtatggtctgagctatgatatcaattggcttcctagggtttatcgtgtgagcacaccatatatttacagtaggaatagacgtagacacacgagcatatttcacctccgctaccataatcatcgctatccccaccggcgtcaaagtatttagctgactcgccacactccacggaagcaatatgaaatgatctgctgcagtgctctgagccctaggattcatctttcttttcaccgtaggtggcctgactggcattgtattagcaaactcatcactagacatcgtactacacgacacgtactacgttgtagctcacttccactatgtcctatcaataggagctgtatttgccatcataggaggcttcattcactgatttcccctattctcaggctacaccctagaccaaacctacgccaaaatccatttcactatcatattcatcggcgtaaatctaactttcttcccacaacactttctcggcctatccggaatgccccgacgttactcggactaccccgatgcatacaccacatgaaacatcctatcatctgtaggctcattcatttctctaacagcagtaatattaataattttcatgatttgagaagccttcgcttcgaagcgaaaagtcctaatagtagaagaaccctccataaacctggagtgactatatggatgccccccaccctaccacacattcgaagaacccgtatacataaaatctagacaaaaaaggaaggaatcgaaccccccaaagttggtttcaagccaaccccatggcctccatgactttttcaaaaaggtattagaaaaaccatttcataactttgtcaaagttaaattataggctaaatcctatatatcttaatggcacatgcagcgcaagtaggtctacaagacgctacttcccctatcatagaagagcttatcacctttcatgatcacgccctcataatcattttccttatctgcttcctagtcctgtatgcccttttcctaacactcacaacaaaactaactaatactaacatctcagacgctcaggaaatagaaaccgtctgaactatcctacccgccatcatcctagtcctcatcgccctcccatccctacgcatcctttacataacagacgaggtcaacgatccctcccttaccatcaaatcaattggccaccaatggtactgaacctacgagtacaccgactacggcggactaatcttcaactcctacatacttcccccattattcctagaaccaggcgacctgcgactccttgacgttgacaatcgagtagtactcccgattgaagcccccattcgtataataattacatcacaagacgtcttgcactcatgagctgtccccacattaggcttaaaaacagatgcaattcccggacgtctaaaccaaaccactttcaccgctacacgaccgggggtatactacggtcaatgctctgaaatctgtggagcaaaccacagtttcatgcccatcgtcctagaattaattcccctaaaaatctttgaaatagggcccgtatttaccctatagcaccccctctaccccctctagagcccactgtaaagctaacttagcattaaccttttaagttaaagattaagagaaccaacacctctttacagtgaaatgccccaactaaatactaccgtatggcccaccataattacccccatactccttacactattcctcatcacccaactaaaaatattaaacacaaactaccacctacctccctcaccaaagcccataaaaataaaaaattataacaaaccctgagaaccaaaatgaacgaaaatctgttcgcttcattcattgcccccacaatcctaggcctacccgccgcagtactgatcattctatttccccctctattgatccccacctccaaatatctcatcaacaaccgactaatcaccacccaacaatgactaatcaaactaacctcaaaacaaatgataaccatacacaacactaaaggacgaacctgatctcttatactagtatccttaatcatttttattgccacaactaacctcctcggactcctgcctcactcatttacaccaaccacccaactatctataaacctagccatggccatccccttatgagcgggcgcagtgattataggctttcgctctaagattaaaaatgccctagcccacttcttaccacaaggcacacctacaccccttatccccatactagttattatcgaaaccatcagcctactcattcaaccaatagccctggccgtacgcctaaccgctaacattactgcaggccacctactcatgcacctaattggaagcgccaccctagcaatatcaaccattaaccttccctctacacttatcatcttcacaattctaattctactgactatcctagaaatcgctgtcgccttaatccaagcctacgttttcacacttctagtaagcctctacctgcacgacaacacataatgacccaccaatcacatgcctatcatatagtaaaacccagcccatgacccctaacaggggccctctcagccctcctaatgacctccggcctagccatgtgatttcacttccactccataacgctcctcatactaggcctactaaccaacacactaaccatataccaatgatggcgcgatgtaacacgagaaagcacataccaaggccaccacacaccacctgtccaaaaaggccttcgatacgggataatcctatttattacctcagaagtttttttcttcgcaggatttttctgagccttttaccactccagcctagcccctaccccccaattaggagggcactggcccccaacaggcatcaccccgctaaatcccctagaagtcccactcctaaacacatccgtattactcgcatcaggagtatcaatcacctgagctcaccatagtctaatagaaaacaaccgaaaccaaataattcaagcactgcttattacaattttactgggtctctattttaccctcctacaagcctcagagtacttcgagtctcccttcaccatttccgacggcatctacggctcaacattttttgtagccacaggcttccacggacttcacgtcattattggctcaactttcctcactatctgcttcatccgccaactaatatttcactttacatccaaacatcactttggcttcgaagccgccgcctgatactggcattttgtagatgtggtttgactatttctgtatgtctccatctattgatgagggtcttactcttttagtataaatagtaccgttaacttccaattaactagttttgacaacattcaaaaaagagtaataaacttcgccttaattttaataatcaacaccctcctagccttactactaataattattacattttgactaccacaactcaacggctacatagaaaaatccaccccttacgagtgcggcttcgaccctatatcccccgcccgcgtccctttctccataaaattcttcttagtagctattaccttcttattatttgatctagaaattgccctccttttacccctaccatgagccctacaaacaactaacctgccactaatagttatgtcatccctcttattaatcatcatcctagccctaagtctggcctatgagtgactacaaaaaggattagactgagccgaattggtatatagtttaaacaaaacgaatgatttcgactcattaaattatgataatcatatttaccaaatgcccctcatttacataaatattatactggcatttaccatctcacttctaggaatactagtatatcgctcacacctcatatcctccctactatgcctagaaggaataatactatcgctgttcattatagctactctcataaccctcaacacccactccctcttagccaatattgtgcctattgccatactagtctttgccgcctgcgaagcagcggtgggcctagccctactagtctcaatctccaacacatatggcctagactacgtacataacctaaacctactccaatgctaaaactaatcgtcccaacaattatattactaccactgacatgactttccaaaaaacacataatttgaatcaacacaaccacccacagcctaattattagcatcatccctctactattttttaaccaaatcaacaacaacctatttagctgttccccaaccttttcctccgaccccctaacaacccccctcctaatactaactacctgactcctacccctcacaatcatggcaagccaacgccacttatccagtgaaccactatcacgaaaaaaactctacctctctatactaatctccctacaaatctccttaattataacattcacagccacagaactaatcatattttatatcttcttcgaaaccacacttatccccaccttggctatcatcacccgatgaggcaaccagccagaacgcctgaacgcaggcacatacttcctattctacaccctagtaggctcccttcccctactcatcgcactgatttacactcacaacaccctaggctcactaaacattctactactcactctcactgcccaagaactatcaaactcctgagccaacaacttaatatgactagcttacacaatagcttttatagtaaaaatacctctttacggactccacttatgactccctaaagcccatgtcgaagcccccatcgctgggtcaatagtacttgccgcagtactcttaaaactaggcggctatggtataatacgcctcacactcattctcaaccccctgacaaaacacatagcctaccccttccttgtactatccctatgaggcataattataacaagctccatctgcctacgacaaacagacctaaaatcgctcattgcatactcttcaatcagccacatagccctcgtagtaacagccattctcatccaaaccccctgaagcttcaccggcgcagtcattctcataatcgcccacggacttacatcctcattactattctgcctagcaaactcaaactacgaacgcactcacagtcgcatcataatcctctctcaaggacttcaaactctactcccactaatagctttttgatgacttctagcaagcctcgctaacctcgccttaccccccactattaacctactgggagaactctctgtgctagtaaccacgttctcctgatcaaatatcactctcctacttacaggactcaacatactagtcacagccctatactccctctacatatttaccacaacacaatggggctcactcacccaccacattaacaacataaaaccctcattcacacgagaaaacaccctcatgttcatacacctatcccccattctcctcctatccctcaaccccgacatcattaccgggttttcctcttgtaaatatagtttaaccaaaacatcagattgtgaatctgacaacagaggcttacgaccccttatttaccgagaaagctcacaagaactgctaactcatgcccccatgtctaacaacatggctttctcaacttttaaaggataacagctatccattggtcttaggccccaaaaattttggtgcaactccaaataaaagtaataaccatgcacactactataaccaccctaaccctgacttccctaattccccccatccttaccaccctcgttaaccctaacaaaaaaaactcatacccccattatgtaaaatccattgtcgcatccacctttattatcagtctcttccccacaacaatattcatgtgcctagaccaagaagttattatctcgaactgacactgagccacaacccaaacaacccagctctccctaagcttcaaactagactacttctccataatattcatccctgtggcattgttcgttacatggtccatcatagaattctcactgtgatatataaactcagacccaaacattaatcagttcttcaaatatctactcatcttcctaattaccatactaatcttagttaccgctaacaacctattccaactgttcatcggctgagagggcgtaggaattatatccttcttgctcatcagttgatgatacgcccgagcagatgccaacacagcagccattcaagcaatcctatacaaccgtatcggcgatatcggtttcatcctcgccttagcatgatttatcctacactccaactcatgagacccacaacaaatagcccttctaaacgctaatccaagcctcaccccactactaggcctcctcctagcagcagcaggcaaatcagcccaattaggtctccacccctgactcccctcagccatagaaggccccaccccagtctcagccctactccactcaagcactatagttgtagcaggaatcttcttactcatccgcttccaccccctagcagaaaatagcccactaatccaaactctaacactatgcttaggcgctatcaccactctgttcgcagcagtctgcgcccttacacaaaatgacatcaaaaaaatcgtagccttctccacttcaagtcaactaggactcataatagttacaatcggcatcaaccaaccacacctagcattcctgcacatctgtacccacgccttcttcaaagccatactatttatgtgctccgggtccatcatccacaaccttaacaatgaacaagatattcgaaaaataggaggactactcaaaaccatacctctcacttcaacctccctcaccattggcagcctagcattagcaggaatacctttcctcacaggtttctactccaaagaccacatcatcgaaaccgcaaacatatcatacacaaacgcctgagccctatctattactctcatcgctacctccctgacaagcgcctatagcactcgaataattcttctcaccctaacaggtcaacctcgcttccccacccttactaacattaacgaaaataaccccaccctactaaaccccattaaacgcctgacagccggaagcctgttcgcaggatttctcattactaacaacatttcccccgcatcccccttccaaacaacaatccccctctacctaaaactcacagccctcgctgtcactttcctaggacttctaacagccctagacctcaactacctaaccaacaaacttaaaataaaatccccactatgcacattttatttctccaacatactcggattctaccctagcatcacacaccgcacaatcccctatctaggccttcttacgagccaaaacctgcccctactcctcctagacctaacctgactagaaaagctattacctaaaacaatttcacagcaccaaatctccacctccatcatcacctcaacccaaaaaggcataattaaactttacttcctctctttcttcttcccactcatcctaaccctgctcctaatcacataacctattcccccgagcaatctcaattacaatatatacaccaacaaacaatgttcaaccagtaactactactaatcaacgcccataatcatacaaagcccccgcaccaataggatcctcccgaatcaaccctgacccctctccttcataaattattcagcttcctacactattaaagtttaccacaaccaccaccccatcatactctttcacccacagcaccaatcctacctccatcgctaaccccactaaaacactcaccaagacctcaacccctgacccccatgcctcaggatactcctcaatagccatcgctgtagtatatccaaagacaaccatcattccccctaaataaattaaaaaaactattaaacccatataacctcccccaaaattcagaataataacacacccgaccacaccgctaacaatcaatactaaacccccataaataggagaaggcttagaagaaaaccccacaaaccccattactaaacccacactcaacagaaacaaagcatacatcattattctcgcacggactacaaccacgaccaatgatatgaaaaaccatcgttgtatttcaactacaagaacaccaatgaccccaatacgcaaaattaaccccctaataaaattaattaaccactcattcatcgacctccccaccccatccaacatctccgcatgatgaaacttcggctcactccttggcgcctgcctgatcctccaaatcaccacaggactattcctagccatgcactactcaccagacgcctcaaccgccttttcatcaatcgcccacatcactcgagacgtaaattatggctgaatcatccgctaccttcacgccaatggcgcctcaatattctttatctgcctcttcctacacatcgggcgaggcctatattacggatcatttctctactcagaaacctgaaacatcggcattatcctcctgcttgcaactatagcaacagccttcataggctatgtcctcccgtgaggccaaatatcattctgaggggccacagtaattacaaacttactatccgccatcccatacattgggacagacctagttcaatgaatctgaggaggctactcagtaaacagtcccaccctcacacgattctttacctttcacttcatcttgcccttcattattgcagccctagcagcactccacctcctattcttgcacgaaacgggatcaaacaaccccctaggaatcacctcccattccgataaaatcaccttccacccttactacacaatcaaagacgccctcggcttacttctcttcattctctccttaatgacattaacactattctcaccagacctcctaggcgacccagacaattataccctagccaaccccttaaacacccctccccacatcaagcccgaatgatatttcctattcgcctacacaattctccgatccgtccctaacaaactaggaggcgtccttgccctattactatccatcctcatcctagcaataatccccatcctccatatatccaaacaacaaagcataatatttcgcccactaagccaatcactttattgactcctagccgcagacctcctcattctaacctgaatcggaggacaaccagtaagctacccttttaccatcattggacaagtagcatccgtactatacttcacaacaatcctaatcctaataccaactatctccctaattgaaaacaaaatactcaaatgggcctgtccttgtagtataaactaatacaccagtcttgtaaaccggagatgaaaacctttttccaaggacaaatcagagaaaaagtctttaactccaccattagcacccaaagctaagattctaatttaaactattctctgttctttcatggggaagcagatttgggtaccacccaagtattgacttacccatcaacaaccgctatgtatttcgtacattactgccagccaccatgaatattgcacggtaccataaatacttaaccacctgtagtacataaaaacccaatccacatcaaaaccccctccccatgcttacaagcaagtacagcaatcaaccctcaactaccacacatcaactgcaactccaaagccacctctcacccactaggataccaacaaacctacccacccttaacagtacatagtacataaagccatttaccgtacatagcacattacagtcaaatcccttctcgtccccatggatgacccccctcagataggggtcccttgaccaccatcctccgtgaaatcaatatcccgcacaagagtgctactctcctcgctccgggcccataacacttgggggtagctaaagtgaactgtatccgacatctggttcctacttcagggtcataaagcctaaatagcccacacgttccccttaaataagacatcacgatg

SEQ ID NO: 226 - DNA, 16571 bp, Homo sapiens mitochondrial
  3109: "n" refers to a nucleotide at position 3107 of the Cambridge Reference Sequence (CRS, Anderson et al. 1981 Nature 290:457-465), later determined to be absent from the human mtDNA sequence according to the revised CRS (rCRS, Andrews et al. 1999 Nature Genetics 23:147); "n" therefore represents a single nucleotide deletion at a position corresponding to nucleotide 3107 of SEQ ID NO:1 as provided herein.
gatcacaggtctatcaccctattaaccactcacgggagctctccatgcatttggtattttcgtctggggggtatgcacgcgatagcattgcgagacgctggagccggagcaccctatgtcgcagtatctgtctttgattcctgcctcatcctattatttatcgcacctacgttcaatattacaggcgaacatacttactaaagtgtgttaattaattaatgcttgtaggacataataataacaattgaatgtctgcacagccgctttccacacagacatcataacaaaaaatttccaccaaaccccccctcccccccgcttctggccacagcacttaaacacatctctgccaaaccccaaaaacaaagaaccctaacaccagcctaaccagatttcaaattttatcttttggcggtatgcacttttaacagtcaccccccaactaacacattatttttccctcccactcccatactactaatctcatcaatacaacccccgcccatcctacccagcacacacacaccgctgctaaccccataccccgaaccaaccaaaccccaaagacaccccccacagtttatgtagcttacctcctcaaagcaatacactgaaaatgtttagacgggctcacatcaccccataaacaaataggtttggtcctagcctttctattagctcttagtaagattacacatgcaagcatccccgttccagtgagttcaccctctaaatcaccacgatcaaaagggacaagcatcaagcacgcagcaatgcagctcaaaacgcttagcctagccacacccccacgggaaacagcagtgattaacctttagcaataaacgaaagtttaactaagctatactaaccccagggttggtcaatttcgtgccagccaccgcggtcacacgattaacccaagtcaatagaagccggcgtaaagagtgttttagatcaccccctccccaataaagctaaaactcacctgagttgtaaaaaactccagttgacacaaaatagactacgaaagtggctttaacatatctgaacacacaatagctaagacccaaactgggattagataccccactatgcttagccctaaacctcaacagttaaatcaacaaaactgctcgccagaacactacgagccacagcttaaaactcaaaggacctggcggtgcttcatatccctctagaggagcctgttctgtaatcgataaaccccgatcaacctcaccacctcttgctcagcctatataccgccatcttcagcaaaccctgatgaaggctacaaagtaagcgcaagtacccacgtaaagacgttaggtcaaggtgtagcccatgaggtggcaagaaatgggctacattttctaccccagaaaactacgatagcccttatgaaacttaagggtcgaaggtggatttagcagtaaactgagagtagagtgcttagttgaacagggccctgaagcgcgtacacaccgcccgtcaccctcctcaagtatacttcaaaggacatttaactaaaacccctacgcatttatatagaggagacaagtcgtaacatggtaagtgtactggaaagtgcacttggacgaaccagagtgtagcttaacacaaagcacccaacttacacttaggagatttcaacttaacttgaccgctctgagctaaacctagccccaaacccactccaccttactaccagacaaccttagccaaaccatttacccaaataaagtataggcgatagaaattgaaacctggcgcaatagatatagtaccgcaagggaaagatgaaaaattataaccaagcataatatagcaaggactaacccctataccttctgcataatgaattaactagaaataactttgcaaggagagccaaagctaagacccccgaaaccagacgagctacctaagaacagctaaaagagcacacccgtctatgtagcaaaatagtgggaagatttataggtagaggcgacaaacctaccgagcctggtgatagctggttgtccaagatagaatcttagttcaactttaaatttgcccacagaaccctctaaatccccttgtaaatttaactgttagtccaaagaggaacagctctttggacactaggaaaaaaccttgtagagagagtaaaaaatttaacacccatagtaggcctaaaagcagccaccaattaagaaagcgttcaagctcaacacccactacctaaaaaatcccaaacatataactgaactcctcacacccaattggaccaatctatcaccctatagaagaactaatgttagtataagtaacatgaaaacattctcctccgcataagcctgcgtcagattaaaacactgaactgacaattaacagcccaatatctacaatcaaccaacaagtcattattaccctcactgtcaacccaacacaggcatgctcataaggaaaggttaaaaaaagtaaaaggaactcggcaaatcttaccccgcctgtttaccaaaaacatcacctctagcatcaccagtattagaggcaccgcctgcccagtgacacatgtttaacggccgcggtaccctaaccgtgcaaaggtagcataatcacttgttccttaaatagggacctgtatgaatggctccacgagggttcagctgtctcttacttttaaccagtgaaattgacctgcccgtgaagaggcgggcataacacagcaagacgagaagaccctatggagctttaatttattaatgcaaacagtacctaacaaacccacaggtcctaaactaccaaacctgcattaaaaatttcggttggggcgacctcggagcagaacccaacctccgagcagtacatgctaagacttcaccagtcaaagcgaactactatactcaattgatccaataacttgaccaacggaacaagttaccctagggataacagcgcaatcctattctagagtccatatcaacaatagggtttacgacctcgatgttggatcaggacatcccgatggtgcagccgctattaaaggttcgtttgttcaacgattaaagtcctacgtgatctgagttcagaccggagtaatccaggtcggtttctatctacnttcaaattcctccctgtacgaaaggacaagagaaataaggcctacttcacaaagcgccttcccccgtaaatgatatcatctcaacttagtattatacccacacccacccaagaacagggtttgttaagatggcagagcccggtaatcgcataaaacttaaaactttacagtcagaggttcaattcctcttcttaacaacatacccatggccaacctcctactcctcattgtacccattctaatcgcaatggcattcctaatgcttaccgaacgaaaaattctaggctatatacaactacgcaaaggccccaacgttgtaggcccctacgggctactacaacccttcgctgacgccataaaactcttcaccaaagagcccctaaaacccgccacatctaccatcaccctctacatcaccgccccgaccttagctctcaccatcgctcttctactatgaacccccctccccatacccaaccccctggtcaacctcaacctaggcctcctatttattctagccacctctagcctagccgtttactcaatcctctgatcaggatgagcatcaaactcaaactacgccctgatcggcgcactgcgagcagtagcccaaacaatctcatatgaagtcaccctagccatcattctactatcaacattactaataagtggctcctttaacctctccacccttatcacaacacaagaacacctctgattactcctgccatcatgacccttggccataatatgatttatctccacactagcagagaccaaccgaacccccttcgaccttgccgaaggggagtccgaactagtctcaggcttcaacatcgaatacgccgcaggccccttcgccctattcttcatagccgaatacacaaacattattataataaacaccctcaccactacaatcttcctaggaacaacatatgacgcactctcccctgaactctacacaacatattttgtcaccaagaccctacttctaacctccctgttcttatgaattcgaacagcatacccccgattccgctacgaccaactcatacacctcctatgaaaaaacttcctaccactcaccctagcattacttatatgatatgtctccatacccattacaatctccagcattccccctcaaacctaagaaatatgtctgataaaagagttactttgatagagtaaataataggagcttaaacccccttatttctaggactatgagaatcgaacccatccctgagaatccaaaattctccgtgccacctatcacaccccatcctaaagtaaggtcagctaaataagctatcgggcccataccccgaaaatgttggttatacccttcccgtactaattaatcccctggcccaacccgtcatctactctaccatctttgcaggcacactcatcacagcgctaagctcgcactgattttttacctgagtaggcctagaaataaacatgctagcttttattccagttctaaccaaaaaaataaaccctcgttccacagaagctgccatcaagtatttcctcacgcaagcaaccgcatccataatccttctaatagctatcctcttcaacaatatactctccggacaatgaaccataaccaatactaccaatcaatactcatcattaataatcataatggctatagcaataaaactaggaatagccccctttcacttctgagtcccagaggttacccaaggcacccctctgacatccggcctgcttcttctcacatgacaaaaactagcccccatctcaatcatataccaaatctctccctcactaaacgtaagccttctcctcactctctcaatcttatccatcatagcaggcagttgaggtggattaaaccaaacccagctacgcaaaatcttagcatactcctcaattacccacataggatgaataatagcagttctaccgtacaaccctaacataaccattcttaatttaactatttatattatcctaactactaccgcattcctactactcaacttaaactccagcaccacgaccctactactatctcgcacctgaaacaagctaacatgactaacacccttaattccatccaccctcctctccctaggaggcctgcccccgctaaccggctttttgcccaaatgggccattatcgaagaattcacaaaaaacaatagcctcatcacccccaccatcatagccaccatcaccctccttaacctctacttctacctacgcctaatctactccacctcaatcacactactccccatatctaacaacgtaaaaataaaatgacagtttgaacatacaaaacccaccccattcctccccacactcatcgcccttaccacgctactcctacctatctccccttttatactaataatcttatagaaatttaggttaaatacagaccaagagccttcaaagccctcagtaagttgcaatacttaatttctgtaacagctaaggactgcaaaaccccactctgcatcaactgaacgcaaatcagccactttaattaagctaagcccttactagaccaatgggacttaaacccacaaacacttagttaacagctaagcaccctaatcaactggcttcaatctacttctcccgccgccgggaaaaaaggcgggagaagccccggcaggtttgaagctgcttcttcgaatttgcaattcaatatgaaaatcacctcggagctggtaaaaagaggcctaacccctgtctttagatttacagtccaatgcttcactcagccattttacctcacccccactgatgttcgccgaccgttgactattctctacaaaccacaaagacattggaacactatacctattattcggcgcatgagctggagtcctaggcacagctctaagcctccttattcgagccgagctgggccagccaggcaaccttctaggtaacgaccacatctacaacgttatcgtcacagcccatgcatttgtaataatcttcttcatagtaatacccatcataatcggaggctttggcaactgactagttcccctaataatcggtgcccccgatatggcgtttccccgcataaacaacataagcttctgactcttacctccctctctcctactcctgctcgcatctgctatagtggaggccggagcaggaacaggttgaacagtctaccctcccttagcagggaactactcccaccctggagcctccgtagacctaaccatcttctccttacacctagcaggtgtctcctctatcttaggggccatcaatttcatcacaacaattatcaatataaaaccccctgccataacccaataccaaacgcccctcttcgtctgatccgtcctaatcacagcagtcctacttctcctatctctcccagtcctagctgctggcatcactatactactaacagaccgcaacctcaacaccaccttcttcgaccccgccggaggaggagaccccattctataccaacacctattctgatttttcggtcaccctgaagtttatattcttatcctaccaggcttcggaataatctcccatattgtaacttactactccggaaaaaaagaaccatttggatacataggtatggtctgagctatgatatcaattggcttcctagggtttatcgtgtgagcacaccatatatttacagtaggaatagacgtagacacacgagcatatttcacctccgctaccataatcatcgctatccccaccggcgtcaaagtatttagctgactcgccacactccacggaagcaatatgaaatgatctgctgcagtgctctgagccctaggattcatctttcttttcaccgtaggtggcctgactggcattgtattagcaaactcatcactagacatcgtactacacgacacgtactacgttgtagcccacttccactatgtcctatcaataggagctgtatttgccatcataggaggcttcattcactgatttcccctattctcaggctacaccctagaccaaacctacgccaaaatccatttcactatcatattcatcggcgtaaatctaactttcttcccacaacactttctcggcctatccggaatgccccgacgttactcggactaccccgatgcatacaccacatgaaacatcctatcatctgtaggctcattcatttctctaacagcagtaatattaataattttcatgatttgagaagccttcgcttcgaagcgaaaagtcctaatagtagaagaaccctccataaacctggagtgactatatggatgccccccaccctaccacacattcgaagaacccgtatacataaaatctagacaaaaaaggaaggaatcgaaccccccaaagctggtttcaagccaaccccatggcctccatgactttttcaaaaaggtattagaaaaaccatttcataactttgtcaaagttaaattataggctaaatcctatatatcttaatggcacatgcagcgcaagtaggtctacaagacgctacttcccctatcatagaagagcttatcacctttcatgatcacgccctcataatcattttccttatctgcttcctagtcctgtatgcccttttcctaacactcacaacaaaactaactaatactaacatctcagacgctcaggaaatagaaaccgtctgaactatcctgcccgccatcatcctagtcctcatcgccctcccatccctacgcatcctttacataacagacgaggtcaacgatccctcccttaccatcaaatcaattggccaccaatggtactgaacctacgagtacaccgactacggcggactaatcttcaactcctacatacttcccccattattcctagaaccaggcgacctgcgactccttgacgttgacaatcgagtagtactcccgattgaagcccccattcgtataataattacatcacaagacgtcttgcactcatgagctgtccccacattaggcttaaaaacagatgcaattcccggacgtctaaaccaaaccactttcaccgctacacgaccgggggtatactacggtcaatgctctgaaatctgtggagcaaaccacagtttcatgcccatcgtcctagaattaattcccctaaaaatctttgaaatagggcccgtatttaccctatagcaccccctctaccccctctagagcccactgtaaagctaacttagcattaaccttttaagttaaagattaagagaaccaacacctctttacagtgaaatgccccaactaaatactaccgtatggcccaccataattacccccatactccttacactattcctcatcacccaactaaaaatattaaacacaaactaccacctacctccctcaccaaagcccataaaaataaaaaattataacaaaccctgagaaccaaaatgaacgaaaatctgttcgcttcattcattgcccccacaatcctaggcctacccgccgcagtactgatcattctatttccccctctattgatccccacctccaaatatctcatcaacaaccgactaatcaccacccaacaatgactaatcaaactaacctcaaaacaaatgataaccatacacaacactaaaggacgaacctgatctcttatactagtatccttaatcatttttattgccacaactaacctcctcggactcctgcctcactcatttacaccaaccacccaactatctataaacctagccatggccatccccttatgagcgggcgcagtgattataggctttcgctctaagattaaaaatgccctagcccacttcttaccacaaggcacacctacaccccttatccccatactagttattatcgaaaccatcagcctactcattcaaccaatagccctggccgtacgcctaaccgctaacattactgcaggccacctactcatgcacctaattggaagcgccaccctagcaatatcaaccattaaccttccctctacacttatcatcttcacaattctaattctactgactatcctagaaatcgctgtcgccttaatccaagcctacgttttcacacttctagtaagcctctacctgcacgacaacacataatgacccaccaatcacatgcctatcatatagtaaaacccagcccatgacccctaacaggggccctctcagccctcctaatgacctccggcctagccatgtgatttcacttccactccataacgctcctcatactaggcctactaaccaacacactaaccatataccaatgatggcgcgatgtaacacgagaaagcacataccaaggccaccacacaccacctgtccaaaaaggccttcgatacgggataatcctatttattacctcagaagtttttttcttcgcaggatttttctgagccttttaccactccagcctagcccctaccccccaattaggagggcactggcccccaacaggcatcaccccgctaaatcccctagaagtcccactcctaaacacatccgtattactcgcatcaggagtatcaatcacctgagctcaccatagtctaatagaaaacaaccgaaaccaaataattcaagcactgcttattacaattttactgggtctctattttaccctcctacaagcctcagagtacttcgagtctcccttcaccatttccgacggcatctacggctcaacattttttgtagccacaggcttccacggacttcacgtcattattggctcaactttcctcactatctgcttcatccgccaactaatatttcactttacatccaaacatcactttggcttcgaagccgccgcctgatactggcattttgtagatgtggtttgactatttctgtatgtctccatctattgatgagggtcttactcttttagtataaatagtaccgttaacttccaattaactagttttgacaacattcaaaaaagagtaataaacttcgccttaattttaataatcaacaccctcctagccttactactaataattattacattttgactaccacaactcaacggctacatagaaaaatccaccccttacgagtgcggcttcgaccctatatcccccgcccgcgtccctttctccataaaattcttcttagtagctattaccttcttattatttgatctagaaattgccctccttttacccctaccatgagccctacaaacaactaacctgccactaatagttatgtcatccctcttattaatcatcatcctagccctaagtctggcctatgagtgactacaaaaaggattagactgaaccgaattggtatatagtttaaacaaaacgaatgatttcgactcattaaattatgataatcatatttaccaaatgcccctcatttacataaatattatactagcatttaccatctcacttctaggaatactagtatatcgctcacacctcatatcctccctactatgcctagaaggaataatactatcgctgttcattatagctactctcataaccctcaacacccactccctcttagccaatattgtgcctattgccatactagtctttgccgcctgcgaagcagcggtgggcctagccctactagtctcaatctccaacacatatggcctagactacgtacataacctaaacctactccaatgctaaaactaatcgtcccaacaattatattactaccactgacatgactttccaaaaaacacataatttgaatcaacacaaccacccacagcctaattattagcatcatccctctactattttttaaccaaatcaacaacaacctatttagctgttccccaaccttttcctccgaccccctaacaacccccctcctaatactaactacctgactcctacccctcacaatcatggcaagccaacgccacttatccagtgaaccactatcacgaaaaaaactctacctctctatactaatctccctacaaatctccttaattataacattcacagccacagaactaatcatattttatatcttcttcgaaaccacacttatccccaccttggctatcatcacccgatgaggcaaccagccagaacgcctgaacgcaggcacatacttcctattctacaccctagtaggctcccttcccctactcatcgcactaatttacactcacaacaccctaggctcactaaacattctactactcactctcactgcccaagaactatcaaactcctgagccaacaacttaatatgactagcttacacaatagcttttatagtaaagatacctctttacggactccacttatgactccctaaagcccatgtcgaagcccccatcgctgggtcaatagtacttgccgcagtactcttaaaactaggcggctatggtataatacgcctcacactcattctcaaccccctgacaaaacacatagcctaccccttccttgtactatccctatgaggcataattataacaagctccatctgcctacgacaaacagacctaaaatcgctcattgcatactcttcaatcagccacatagccctcgtagtaacagccattctcatccaaaccccctgaagcttcaccggcgcagtcattctcataatcgcccacgggcttacatcctcattactattctgcctagcaaactcaaactacgaacgcactcacagtcgcatcataatcctctctcaaggacttcaaactctactcccactaatagctttttgatgacttctagcaagcctcgctaacctcgccttaccccccactattaacctactgggagaactctctgtgctagtaaccacgttctcctgatcaaatatcactctcctacttacaggactcaacatactagtcacagccctatactccctctacatatttaccacaacacaatggggctcactcacccaccacattaacaacataaaaccctcattcacacgagaaaacaccctcatgttcatacacctatcccccattctcctcctatccctcaaccccgacatcattaccgggttttcctcttgtaaatatagtttaaccaaaacatcagattgtgaatctgacaacagaggcttacgaccccttatttaccgagaaagctcacaagaactgctaactcatgcccccatgtctaacaacatggctttctcaacttttaaaggataacagctatccattggtcttaggccccaaaaattttggtgcaactccaaataaaagtaataaccatgcacactactataaccaccctaaccctgacttccctaattccccccatccttaccaccctcgttaaccctaacaaaaaaaactcatacccccattatgtaaaatccattgtcgcatccacctttattatcagtctcttccccacaacaatattcatgtgcctagaccaagaagttattatctcgaactgacactgagccacaacccaaacaacccagctctccctaagcttcaaactagactacttctccataatattcatccctgtagcattgttcgttacatggtccatcatagaattctcactgtgatatataaactcagacccaaacattaatcagttcttcaaatatctactcatcttcctaattaccatactaatcttagttaccgctaacaacctattccaactgttcatcggctgagagggcgtaggaattatatccttcttgctcatcagttgatgatacgcccgagcagatgccaacacagcagccattcaagcaatcctatacaaccgtatcggcgatatcggtttcatcctcgccttagcatgatttatcctacactccaactcatgagacccacaacaaatagcccttctaaacgctaatccaagcctcaccccactactaggcctcctcctagcagcagcaggcaaatcagcccaattaggtctccacccctgactcccctcagccatagaaggccccaccccagtctcagccctactccactcaagcactatagttgtagcaggaatcttcttactcatccgcttccaccccctagcagaaaatagcccactaatccaaactctaacactatgcttaggcgctatcaccactctgttcgcagcagtctgcgcccttacacaaaatgacatcaaaaaaatcgtagccttctccacttcaagtcaactaggactcataatagttacaatcggcatcaaccaaccacacctagcattcctgcacatctgtacccacgccttcttcaaagccatactatttatgtgctccgggtccatcatccacaaccttaacaatgaacaagatattcgaaaaataggaggactactcaaaaccatacctctcacttcaacctccctcaccattggcagcctagcattagcaggaatacctttcctcacaggtttctactccaaagaccacatcatcgaaaccgcaaacatatcatacacaaacgcctgagccctatctattactctcatcgctacctccctgacaagcgcctatagcactcgaataattcttctcaccctaacaggtcaacctcgcttccccacccttactaacattaacgaaaataaccccaccctactaaaccccattaaacgcctggcagccggaagcctattcgcaggatttctcattactaacaacatttcccccgcatcccccttccaaacaacaatccccctctacctaaaactcacagccctcgctgtcactttcctaggacttctaacagccctagacctcaactacctaaccaacaaacttaaaataaaatccccactatgcacattttatttctccaacatactcggattctaccctagcatcacacaccgcacaatcccctatctaggccttcttacgagccaaaacctgcccctactcctcctagacctaacctgactagaaaagctattacctaaaacaatttcacagcaccaaatctccacctccatcatcacctcaacccaaaaaggcataattaaactttacttcctctctttcttcttcccactcatcctaaccctactcctaatcacataacctattcccccgagcaatctcaattacaatatatacaccaacaaacaatgttcaaccagtaactactactaatcaacgcccataatcatacaaagcccccgcaccaataggatcctcccgaatcaaccctgacccctctccttcataaattattcagcttcctacactattaaagtttaccacaaccaccaccccatcatactctttcacccacagcaccaatcctacctccatcgctaaccccactaaaacactcaccaagacctcaacccctgacccccatgcctcaggatactcctcaatagccatcgctgtagtatatccaaagacaaccatcattccccctaaataaattaaaaaaactattaaacccatataacctcccccaaaattcagaataataacacacccgaccacaccgctaacaatcaatactaaacccccataaataggagaaggcttagaagaaaaccccacaaaccccattactaaacccacactcaacagaaacaaagcatacatcattattctcgcacggactacaaccacgaccaatgatatgaaaaaccatcgttgtatttcaactacaagaacaccaatgaccccaatacgcaaaactaaccccctaataaaattaattaaccactcattcatcgacctccccaccccatccaacatctccgcatgatgaaacttcggctcactccttggcgcctgcctgatcctccaaatcaccacaggactattcctagccatgcactactcaccagacgcctcaaccgccttttcatcaatcgcccacatcactcgagacgtaaattatggctgaatcatccgctaccttcacgccaatggcgcctcaatattctttatctgcctcttcctacacatcgggcgaggcctatattacggatcatttctctactcagaaacctgaaacatcggcattatcctcctgcttgcaactatagcaacagccttcataggctatgtcctcccgtgaggccaaatatcattctgaggggccacagtaattacaaacttactatccgccatcccatacattgggacagacctagttcaatgaatctgaggaggctactcagtagacagtcccaccctcacacgattctttacctttcacttcatcttgcccttcattattgcagccctagcagcactccacctcctattcttgcacgaaacgggatcaaacaaccccctaggaatcacctcccattccgataaaatcaccttccacccttactacacaatcaaagacgccctcggcttacttctcttccttctctccttaatgacattaacactattctcaccagacctcctaggcgacccagacaattataccctagccaaccccttaaacacccctccccacatcaagcccgaatgatatttcctattcgcctacacaattctccgatccgtccctaacaaactaggaggcgtccttgccctattactatccatcctcatcctagcaataatccccatcctccatatatccaaacaacaaagcataatatttcgcccactaagccaatcactttattgactcctagccgcagacctcctcattctaacctgaatcggaggacaaccagtaagctacccttttaccatcattggacaagtagcatccgtactatacttcacaacaatcctaatcctaataccaactatctccctaattgaaaacaaaatactcaaatgggcctgtccttgtagtataaactaatacaccagtcttgtaaaccggagatgaaaacctttttccaaggacaaatcagagaaaaagtctttaactccaccattagcacccaaagctaagattctaatttaaactattctctgttctttcatggggaagcagatttgggtaccacccaagtattgactcacccatcaacaaccgctatgtatttcgtacattactgccagccaccatgaatattgtacggtaccataaatacttgaccacctgtagtacataaaaacccaatccacatcaaaaccccctccccatgcttacaagcaagtacagcaatcaaccctcaactatcacacatcaactgcaactccaaagccacccctcacccactaggataccaacaaacctacccactcttaacagcacatagcacataaagccatttaccgtacatagcacattacagtcaaatcccttctcgtccccatggatgacccccctcagatagggatcccttgaccaccatcctccgtgaaatcaatatcccgcacaagagtgctactctcctcgctccgggcccataacacttgggggtagctaaagtgaactgtatccgacatctggttcctacttcagggtcataaagcctaaatagcccacacgttccccttaaataagacatcacgatg

SEQ ID NO: 227 - DNA, 16570 bp, Homo sapiens mitochondrial
  3108: "n" refers to a nucleotide at position 3107 of the Cambridge Reference Sequence (CRS, Anderson et al. 1981 Nature 290:457-465), later determined to be absent from the human mtDNA sequence according to the revised CRS (rCRS, Andrews et al. 1999 Nature Genetics 23:147); "n" therefore represents a single nucleotide deletion at a position corresponding to nucleotide 3107 of SEQ ID NO:1 as provided herein.
gatcacaggtctatcaccctattaaccactcacgggagctctccatgcatttggtattttcgtctggggggtatgcacgcgatagcattgcgagacgctggagccggagcaccctatgtcgcagtatctgtctttgattcctgcctcatcctattatttatcgcacctacgttcaatattacaggcgaacatacttactaaagtgtgttaattaattaatgcttgtaggacataataataacaattgaatgtctgcacagccgctttccacacagacatcataacaaaaaatttccaccaaaccccccctcccccgccttctggccacagcacttaaacacatctctgccaaaccccaaaaacaaagaaccctaacaccagcctaaccagatttcaaattttatcttttggcggtatgcacttttaacagtcaccccccaactaacacattattttcccctcccactcccatactactaatctcatcaatacaacccccgcccatcctacccagcacacacacaccgctgctaaccccataccccgaaccaaccaaaccccaaagacaccccccacagtttatgtagcttacctcctcaaagcaatacactgaaaatgtttagacgggctcacatcaccccataaacaaataggtttggtcctagcctttctattagctcttagtaagattacacatgcaagcatccccgttccagtgagttcaccctctaaatcaccacgatcaaaagggacaagcatcaagcacgcagcaatgcagctcaaaacgcttagcctagccacacccccacgggaaacagcagtgattaacctttagcaataaacgaaagtttaactaagctatactaaccccagggttggtcaatttcgtgccagccaccgcggtcacacgattaacccaagtcaatagaagccggcgtaaagagtgttttagatcaccccctccccaataaagctaaaactcacctgagttgtaaaaaactccagttgacacaaaatagactacgaaagtggctttaacatatctgaacacacaatagctaagacccaaactgggattagataccccactatgcttagccctaaacctcaacagttaaatcaacaaaactgctcgccagaacactacgagccacagcttaaaactcaaaggacctggcggtgcttcatatccctctagaggagcctgttctgtaatcgataaaccccgatcaacctcaccacctcttgctcagcctatataccgccatcttcagcaaaccctgatgaaggctacaaagtaagcgcaagtacccacgtaaagacgttaggtcaaggtgtagcccatgaggtggcaagaaatgggctacattttctaccccagaaaactacgatagcccttatgaaacttaagggtcgaaggtggatttagcagtaaactgagagtagagtgcttagttgaacagggccctgaagcgcgtacacaccgcccgtcaccctcctcaagtatacttcaaaggacatttaactaaaacccctacgcatttatatagaggagacaagtcgtaacatggtaagtgtactggaaagtgcacttggacgaaccagagtgtagcttaacacaaagcacccaacttacacttaggagatttcaacttaacttgaccgctctgagctaaacctagccccaaacccactccaccttactaccagacaaccttagccaaaccatttacccaaataaagtataggcgatagaaattgaaacctggcgcaatagatatagtaccgcaagggaaagatgaaaaattataaccaagcataatatagcaaggactaacccctataccttctgcataatgaattaactagaaataactttgcaaggagagccaaagctaagacccccgaaaccagacgagctacctaagaacagctaaaagagcacacccgtctatgtagcaaaatagtgggaagatttataggtagaggcgacaaacctaccgagcctggtgatagctggttgtccaagatagaatcttagttcaactttaaatttgcccacagaaccctctaaatccccttgtaaatttaactgttagtccaaagaggaacagctctttggacactaggaaaaaaccttgtagagagagtaaaaaatttaacacccatagtaggcctaaaagcagccaccaattaagaaagcgttcaagctcaacacccactacctaaaaaatcccaaacatataactgaactcctcacacccaattggaccaatctatcaccctatagaagaactaatgttagtataagtaacatgaaaacattctcctccgcataagcctgcgtcagattaaaacactgaactgacaattaacagcccaatatctacaatcaaccaacaagtcattattaccctcactgtcaacccaacacaggcatgctcataaggaaaggttaaaaaaagtaaaaggaactcggcaaatcttaccccgcctgtttaccaaaaacatcacctctagcatcaccagtattagaggcaccgcctgcccagtgacacatgtttaacggccgcggtaccctaaccgtgcaaaggtagcataatcacttgttccttaaatagggacctgtatgaatggctccacgagggttcagctgtctcttacttttaaccagtgaaattgacctgcccgtgaagaggcgggcataacacagcaagacgagaagaccctatggagctttaatttattaatgcaaacagtacctaacaaacccacaggtcctaaactaccaaacctgcattaaaaatttcggttggggcgacctcggagcagaacccaacctccgagcagtacatgctaagacttcaccagtcaaagcgaactactatactcaattgatccaataacttgaccaacggaacaagttaccctagggataacagcgcaatcctattctagagtccatatcaacaatagggtttacgacctcgatgttggatcaggacatcccaatggtgcagccgctattaaaggttcgtttgttcaacgattaaagtcctacgtgatctgagttcagaccggagtaatccaggtcggtttctatctacnttcaaattcctccctgtacgaaaggacaagagaaataaggcctacttcacaaagcgccttcccccgtaaatgatatcatctcaacttagtattatacccacacccacccaagaacagggtttgttaagatggcagagcccggtaatcgcataaaacttaaaactttacagtcagaggttcaattcctcttcttaacaacatacccatggccaacctcctactcctcattgtacccattctaatcgcaatggcattcctaatgcttaccgaacgaaaaattctaggctatatacaactacgcaaaggccccaacgttgtaggcccctacgggctactacaacccttcgctgacgccataaaactcttcaccaaagagcccctaaaacccgccacatctaccatcaccctctacatcaccgccccgaccttagctctcaccatcgctcttctactatgaacccccctccccatacccaaccccctggtcaacctcaacctaggcctcctatttattctagccacctctagcctagccgtttactcaatcctctgatcagggtgagcatcaaactcaaactacgccctgatcggcgcactgcgagcagtagcccaaacaatctcatatgaagtcaccctagccatcattctactatcaacattactaataagtggctcctttaacctctccacccttatcacaacacaagaacacctctgattactcctgccatcatgacccttggccataatatgatttatctccacactagcagagaccaaccgaacccccttcgaccttgccgaaggggagtccgaactagtctcaggcttcaacatcgaatacgccgcaggccccttcgccctattcttcatagccgaatacacaaacattattataataaacaccctcaccactacaatcttcctaggaacaacatatgacgcactctcccctgaactctacacaacatattttgtcaccaagaccctacttctaacctccctgttcttatgaattcgaacagcatacccccgattccgctacgaccaactcatacacctcctatgaaaaaacttcctaccactcaccctagcattacttatatgatatgtctccatacccattacaatctccagcattccccctcaaacctaagaaatatgtctgataaaagagttactttgatagagtaaataataggagcttaaacccccttatttctaggactatgagaatcgaacccatccctgagaatccaaaattctccgtgccacctatcacaccccatcctaaagtaaggtcagctaaataagctatcgggcccataccccgaaaatgttggttatacccttcccgtactaattaatcccctggcccaacccgtcatctactctaccatctttgcaggcacactcatcacagcgctaagctcgcactgattttttacctgagtaggcctagaaataaacatgctagcttttattccagttctaaccaaaaaaataaaccctcgttccacagaagctgccatcaagtatttcctcacgcaagcaaccgcatccataatccttctaatagctatcctcttcaacaatatactctccggacaatgaaccataaccaatactaccaatcaatactcatcattaataatcataatggccatagcaataaaactaggaatagccccctttcacttctgagtcccagaggttacccaaggcacccctctgacatccggcctgcttcttctcacatgacaaaaactagcccccatctcaatcatataccaaatctctccctcactaaacgtaagccttctcctcactctctcaatcttatccatcatagcaggcagttgaggtggattaaaccaaacccagctacgcaaaatcttagcatactcctcaattacccacataggatgaataatagcagttctaccgtacaaccctaacataaccattcttaatttaactatttatattatcctaactactaccgcattcctactactcaacttaaactccagcaccacgaccctactactatctcgcacctgaaacaagctaacatgactaacacccttaattccatccaccctcctctccctaggaggcctgcccccgctaaccggctttttgcccaaatgggccattatcgaagaattcacaaaaaacaatagcctcatcatccccaccatcatagccaccatcaccctccttaacctctacttctacctacgcctaatctactccacctcaatcacactactccccatatctaacaacgtaaaaataaaatgacagtttgaacatacaaaacccaccccattcctccccacactcatcgcccttaccacgctactcctacctatctccccttttatactaataatcttatagaaatttaggttaaatacagaccaagagccttcaaagccctcagtaagttgcaatacttaatttctgtaacagctaaggactgcaaaaccccactctgcatcaactgaacgcaaatcagccactttaattaagctaagcccttactagaccaatgggacttaaacccacaaacacttagttaacagctaagcaccctaatcaactggcttcaatctacttctcccgccgccgggaaaaaaggcgggagaagccccggcaggtttgaagctgcttcttcgaatttgcaattcaatatgaaaatcacctcggagctggtaaaaagaggcctaacccctgtctttagatttacagtccaatgcttcactcagccattttacctcacccccactgatgttcgccgaccgttgactattctctacaaaccacaaagacattggaacactatacctattattcggcgcatgagctggagtcctaggcacagctctaagcctccttattcgagccgagctgggccagccaggcaaccttctaggtaacgaccacatctacaacgttatcgtcacagcccatgcatttgtaataatcttcttcatagtaatacccatcataatcggaggctttggcaactgactagttcccctaataatcggtgcccccgatatggcgtttccccgcataaacaacataagcttctgactcttacctccctctctcctactcctgctcgcatctgctatagtggaggccggagcaggaacaggttgaacagtctaccctcccttagcagggaactactcccaccctggagcctccgtagacctaaccatcttctccttacacctagcaggtgtctcctctatcttaggggccatcaatttcatcacaacaattatcaatataaaaccccctgccataacccaataccaaacgcccctcttcgtctgatccgtcctaatcacagcagtcctacttctcctatctctcccagtcctagctgctggcatcactatactactaacagaccgcaacctcaacaccaccttcttcgaccccgccggaggaggagaccccattctataccaacacctattctgatttttcggtcaccctgaagtttatattcttatcctaccaggcttcggaataatctcccatattgtaacttactactccggaaaaaaagaaccatttggatacataggtatggtctgagctatgatatcaattggcttcctagggtttatcgtgtgagcacaccatatatttacagtaggaatagacgtagacacacgagcatatttcacctccgctaccataatcatcgctatccccaccggcgtcaaagtatttagctgactcgccacactccacggaagcaatatgaaatgatctgctgcagtgctctgagccctaggattcatctttcttttcaccgtaggtggcctgactggcattgtattagcaaactcatcactagacatcgtactacacgacacgtactacgttgtagcccacttccactatgtcctatcaataggagctgtatttgccatcataggaggcttcattcactgatttcccctattctcaggctacaccctagaccaaacctacgccaaaatccatttcactatcatattcatcggcgtaaatctaactttcttcccacaacactttctcggcctatccggaatgccccgacgttactcggactaccccgatgcatacaccacatgaaacatcctatcatctgtaggctcattcatttctctaacagcagtaatattaataattttcatgatttgagaagccttcgcttcgaagcgaaaagtcctaatagtagaagaaccctccataaacctggagtgactatatggatgccccccaccctaccacacattcgaagaacccgtatacataaaatctagacaaaaaaggaaggaatcgaaccccccaaagctggtttcaagccaaccccatggcctccatgactttttcaaaaaggtattagaaaaaccatttcataactttgtcaaagttaaattataggctaaatcctatatatcttaatggcacatgcagcgcaagtaggtctacaagacgctacttcccctatcatagaagagcttatcacctttcatgatcacgccctcataatcattttccttatctgcttcctagtcctgtatgcccttttcctaacactcacaacaaaactaactaatactaacatctcagacgctcaggaaatagaaaccgtctgaactatcctgcccgccatcatcctagtcctcatcgccctcccatccctacgcatcctttacataacagacgaggtcaacgatccctcccttaccatcaaatcaattggccaccaatggtactgaacctacgagtacaccgactacggcggactaatcttcaactcctacatacttcccccattattcctagaaccaggcgacctgcgactccttgacgttgacaatcgagtagtactcccgattgaagcccccattcgtataataattacatcacaagacgtcttgcactcatgagctgtccccacattaggcttaaaaacagatgcaattcccggacgtctaaaccaaaccactttcaccgctacacgaccgggggtatactacggtcaatgctctgaaatctgtggagcaaaccacagtttcatgcccatcgtcctagaattaattcccctaaaaatctttgaaatagggcccgtatttaccctatagcaccccctctaccccctctagagcccactgtaaagctaacttagcattaaccttttaagttaaagattaagagaaccaacacctctttacagtgaaatgccccaactaaatactaccgtatggcccaccataattacccccatactccttacactattcctcatcacccaactaaaaatattaaacacaaactaccacctacctccctcaccaaagcccataaaaataaaaaattataacaaaccctgagaaccaaaatgaacgaaaatctgttcgcttcattcattgcccccacaatcctaggcctacccgccgcagtactgatcattctatttccccctctattgatccccacctccaaatatctcatcaacaaccgactaatcaccacccaacaatgactaatcaaactaacctcaaaacaaatgataaccatacacaacactaaaggacgaacctgatctcttatactagtatccttaatcatttttattgccacaactaacctcctcggactcctgcctcactcatttacaccaaccacccaactatctataaacctagccatggccatccccttatgagcgggcgcagtgattataggctttcgctctaagattaaaaatgccctagcccacttcttaccacaaggcacacctacaccccttatccccatactagttattatcgaaaccatcagcctactcattcaaccaatagccctggccgtacgcctaaccgctaacattactgcaggccacctactcatgcacctaattggaagcgccaccctagcaatatcaaccattaaccttccctctacacttatcatcttcacaattctaattctactgactatcctagaaatcgctgtcgccttaatccaagcctacgttttcacacttctagtaagcctctacctgcacgacaacacataatgacccaccaatcacatgcctatcatatagtaaaacccagcccatgacccctaacaggggccctctcagccctcctaatgacctccggcctagccatgtgatttcacttccactccataacgctcctcatactaggcctactaaccaacacactaaccatataccaatgatggcgcgatgtaacacgagaaagcacataccaaggccaccacacaccacctgtccaaaaaggccttcgatacgggataatcctatttattacctcagaagtttttttcttcgcaggatttttctgagccttttaccactccagcctagcccctaccccccaattaggagggcactggcccccaacaggcatcaccccgctaaatcccctagaagtcccactcctaaacacatccgtattactcgcatcaggagtatcaatcacctgagctcaccatagtctaatagaaaacaaccgaaaccaaataattcaagcactgcttattacaattttactgggtctctattttaccctcctacaagcctcagagtacttcgagtctcccttcaccatttccgacggcatctacggctcaacattttttgtagccacaggcttccacggacttcacgtcattattggctcaactttcctcactatctgcttcatccgccaactaatatttcactttacatccaaacatcactttggcttcgaagccgccgcctgatactggcattttgtagatgtggtttgactatttctgtatgtctccatctattgatgagggtcttactcttttagtataaatagtaccgttaacttccaattaactagttttgacaacattcaaaaaagagtaataaacttcgccttaattttaataatcaacaccctcctagccttactactaataattattacattttgactaccacaactcaacggctacatagaaaaatccaccccttacgagtgcggcttcgaccctatatcccccgcccgcgtccctttctccataaaattcttcttagtagctattaccttcttattatttgatctagaaattgccctccttttacccctaccatgagccctacaaacaactaacctgccactaatagttatgtcatccctcttattaatcatcatcctagccctaagtctggcctatgagtgactacaaaaaggattagactgaaccgaattggtatatagtttaaacaaaacgaatgatttcgactcattaaattatgataatcatatttaccaaatgcccctcatttacataaatattatactagcatttaccatctcacttctaggaatactagtatatcgctcacacctcatatcctccctactatgcctagaaggaataatactatcgctgttcattatagctactctcataaccctcaacacccactccctcttagccaatattgtgcctattgccatactagtctttgccgcctgcgaagcagcggtgggcctagccctactagtctcaatctccaacacatatggcctagactacgtacataacctaaacctactccaatgctaaaactaatcgtcccaacaattatattactaccactgacatgactttccaaaaaacacataatttgaatcaacacaaccacccacagcctaattattagcatcatccctctactattttttaaccaaatcaacaacaacctatttagctgttccccaaccttttcctccgaccccctaacaacccccctcctaatactaactacctgactcctacccctcacaatcatggcaagccaacgccacttatccagtgaaccactatcacgaaaaaaactctacctctctatactaatctccctacaaatctccttaattataacattcacagccacagaactaatcatattttatatcttcttcgaaaccacacttatccccaccttggctatcatcacccgatgaggcaaccagccagaacgcctgaacgcaggcacatacttcctattctacaccctagtaggctcccttcccctactcatcgcactaatttacactcacaacaccctaggctcactaaacattctactactcactctcactgcccaagaactatcaaactcctgagccaacaacttaatatgactagcttacacaatagcttttatagtaaagatacctctttacggactccacttatgactccctaaagcccatgtcgaagcccccatcgctgggtcaatagtacttgccgcagtactcttaaaactaggcggctatggtataatacgcctcacactcattctcaaccccctgacaaaacacatagcctaccccttccttgtactatccctatgaggcataattataacaagctccatctgcctacgacaaacagacctaaaatcgctcattgcatactcttcaatcagccacatagccctcgtagtaacagccattctcatccaaaccccctgaagcttcaccggcgcagtcattctcataatcgcccacgggcttacatcctcattactattctgcctagcaaactcaaactacgaacgcactcacagtcgcatcataatcctctctcaaggacttcaaactctactcccactaatagctttttgatgacttctagcaagcctcgctaacctcgccttaccccccactattaacctactgggagaactctctgtgctagtaaccacgttctcctgatcaaatatcactctcctacttacaggactcaacatactagtcacagccctatactccctctacatatttaccacaacacaatggggctcactcacccaccacattaacaacataaaaccctcattcacacgagaaaacaccctcatgttcatacacctatcccccattctcctcctatccctcaaccccgacatcattaccgggttttcctcttgtaaatatagtttaaccaaaacatcagattgtgaatctgacaacagaggcttacgaccccttatttaccgagaaagctcacaagaactgctaactcatgcccccatgtctaacaacatggctttctcaacttttaaaggataacagctatccattggtcttaggccccaaaaattttggtgcaactccaaataaaagtaataaccatgcacactactataaccaccctaaccctgacttccctaattccccccatccttaccaccctcgttaaccctaacaaaaaaaactcatacccccattatgtaaaatccattgtcgcatccacctttattatcagtctcttccccacaacaatattcatgtgcctagaccaagaagttattatctcgaactgacactgagccacaacccaaacaacccagctctccctaagcttcaaactagactacttctccataatattcatccctgtagcattgttcgttacatggtccatcatagaattctcactgtgatatataaactcagacccaaacattaatcagttcttcaaatatctactcatcttcctaattaccatactaatcttagttaccgctaacaacctattccaactgttcatcggctgagagggcgtaggaattatatccttcttgctcatcagttgatgatacgcccgagcagatgccaacacagcagccattcaagcaatcctatacaaccgtatcggcgatatcggtttcatcctcgccttagcatgatttatcctacactccaactcatgagacccacaacaaatagcccttctaaacgctaatccaagcctcaccccactactaggcctcctcctagcagcagcaggcaaatcagcccaattaggtctccacccctgactcccctcagccatagaaggccccaccccagtctcagccctactccactcaagcactatagttgtagcaggaatcttcttactcatccgcttccaccccctagcagaaaatagcccactaatccaaactctaacactatgcttaggcgctatcaccactctgttcgcagcagtctgcgcccttacacaaaatgacatcaaaaaaatcgtagccttctccacttcaagtcaactaggactcataatagttacaatcggcatcaaccaaccacacctagcattcctgcacatctgtacccacgccttcttcaaagccatactatttatgtgctccgggtccatcatccacaaccttaacaatgaacaagatattcgaaaaataggaggactactcaaaaccatacctctcacttcaacctccctcaccattggcagcctagcattagcaggaatacctttcctcacaggtttctactccaaagaccacatcatcgaaaccgcaaacatatcatacacaaacgcctgagccctatctattactctcatcgctacctccctgacaagcgcctatagcactcgaataattcttctcaccctaacaggtcaacctcgcttccccacccttactaacattaacgaaaataaccccaccctactaaaccccattaaacgcctggcagccggaagcctattcgcaggatttctcattactaacaacatttcccccgcatcccccttccaaacaacaatccccctctacctaaaactcacagccctcgctgtcactttcctaggacttctaacagccctagacctcaactacctaaccaacaaacttaaaataaaatccccactatgcacattttatttctccaacatactcggattctaccctagcatcacacaccgcacaatcccctatctaggccttcttacgagccaaaacctgcccctactcctcctagacctaacctgactagaaaagctattacctaaaacaatttcacagcaccaaatctccacctccatcatcacctcaacccaaaaaggcataattaaactttacttcctctctttcttcttcccactcatcctaaccctactcctaatcacataacctattcccccgagcaatctcaattacaatatatacaccaacaaacaatgttcaaccagtaactactactaatcaacgcccataatcatacaaagcccccgcaccaataggatcctcccgaatcaaccctgacccctctccttcataaattattcagcttcctacactattaaagtttaccacaaccaccaccccatcatactctttcacccacagcaccaatcctacctccatcgctaaccccactaaaacactcaccaagacctcaacccctgacccccatgcctcaggatactcctcaatagccatcgctgtagtatatccaaagacaaccatcattccccctaaataaattaaaaaaactattaaacccatataacctcccccaaaattcagaataataacacacccgaccacaccgctaacaatcaatactaaacccccataaataggagaaggcttagaagaaaaccccacaaaccccattactaaacccacactcaacagaaacaaagcatacatcattattctcgcacggactacaaccacgaccaatgatatgaaaaaccatcgttgtatttcaactacaagaacaccaatgaccccaatacgcaaaactaaccccctaataaaattaattaaccactcattcatcgacctccccaccccatccaacatctccgcatgatgaaacttcggctcactccttggcgcctgcctgatcctccaaatcaccacaggactattcctagccatgcactactcaccagacgcctcaaccgccttttcatcaatcgcccacatcactcgagacgtaaattatggctgaatcatccgctaccttcacgccaatggcgcctcaatattctttatctgcctcttcctacacatcgggcgaggcctatattacggatcatttctctactcagaaacctgaaacatcggcattatcctcctgcttgcaactatagcaacagccttcataggctatgtcctcccgtgaggccaaatatcattctgaggggccacagtaattacaaacttactatccgccatcccatacattgggacagacctagttcaatgaatctgaggaggctactcagtagacagtcccaccctcacacgattctttacctttcacttcatcttgcccttcattattgcagccctagcagcactccacctcctattcttgcacgaaacgggatcaaacaaccccctaggaatcacctcccattccgataaaatcaccttccacccttactacacaatcaaagacgccctcggcttacttctcttccttctctccttaatgacattaacactattctcaccagacctcctaggcgacccagacaattataccctagccaaccccttaaacacccctccccacatcaagcccgaatgatatttcctattcgcctacacaattctccgatccgtccctaacaaactaggaggcgtccttgccctattactatccatcctcatcctagcaataatccccatcctccatatatccaaacaacaaagcataatatttcgcccactaagccaatcactttattgactcctagccgcagacctcctcattctaacctgaatcggaggacaaccagtaagctacccttttaccatcattggacaagtagcatccgtactatacttcacaacaatcctaatcctaataccaactatctccctaattgaaaacaaaatactcaaatgggcctgtccttgtagtataaactaatacaccagtcttgtaaaccggagatgaaaacctttttccaaggacaaatcagagaaaaagtctttaactccaccattagcacccaaagctaagattctaatttaaactattctctgttctttcatggggaagcagatttgggtaccacccaagtattgactcacccatcaacaaccgctatgtatttcgtacattactgccagccaccatgaatattgtacggtaccataaatacttgaccacctgtagtacataaaaacccaatccacatcaaaaccccctccccatgcttacaagcaagcacagcaatcaaccctcaactatcacacatcaactgcaactccaaagccacccctcacccactaggataccaacaaacctacccacccttaacagtacatagtacataaagccatttaccgtacatagcacattacagtcaaatcccttctcgtccccatggatgacccccctcagataggggtcccttgaccaccatcctccgtgaaatcaatatcccgcacaagagtgctactctcctcgctccgggcccataacacttgggggtagctaaagtgaactgtatccgacatctggttcctacttcagggccataaagcctaaatagcccacacgttccccttaaataagacatcacgatg

SEQ ID NO: 228 - DNA, 16571 bp, Homo sapiens mitochondrial
  3109: "n" refers to a nucleotide at position 3107 of the Cambridge Reference Sequence (CRS, Anderson et al. 1981 Nature 290:457-465), later determined to be absent from the human mtDNA sequence according to the revised CRS (rCRS, Andrews et al. 1999 Nature Genetics 23:147); "n" therefore represents a single nucleotide deletion at a position corresponding to nucleotide 3107 of SEQ ID NO:1 as provided herein.
gatcacaggtctatcaccctattaaccactcacgggagctctccatgcatttggtattttcgtctggggggtgtgcacgcgatagcattgcgagacgctggagccggagcaccctatgtcgcagtatctgtctttgattcctgcctcatcctattatttatcgcacctacgttcaatattacaggcgaacatacttactaaagtgtgttaattaattaatgcttgtaggacataataataacaattgaatgtctgcacagccgctttccacacagacatcataacaaaaaatttccaccaaaccccccctcccccccgcttctggccacagcacttaaacacatctctgccaaaccccaaaaacaaagaaccctaacaccagcctaaccagatttcaaattttatcttttggcggtatgcacttttaacagtcaccccccaactaacacattattttcccctcccactcccatactactaatctcatcaatacaacccccgcccatcctacccagcacacacacaccgctgctaaccccataccccgaaccaaccaaaccccaaagacaccccccacagtttatgtagcttacctcctcaaagcaatacactgaaaatgtttagacgggctcacatcaccccataaacaaataggtttggtcctagcctttctattagctcttagtaagattacacatgcaagcatccccgttccagtgagttcaccctctaaatcaccacgatcaaaagggacaagcatcaagcacgcagcaatgcagctcaaaacgcttagcctagccacacccccacgggaaacagcagtgattaacctttagcaataaacgaaagtttaactaagctatactaaccccagggttggtcaatttcgtgccagccaccgcggtcacacgattaacccaagtcaatagaagccggcgtaaagagtgttttagatcaccccctccccaataaagctaaaactcacctgagttgtaaaaaactccagttgacacaaaatagactacgaaagtggctttaacatatctgaacacacaatagctaagacccaaactgggattagataccccactatgcttagccctaaacctcaacagttaaatcaacaaaactgctcgccagaacactacgagccacagcttaaaactcaaaggacctggcggtgcttcatatccctctagaggagcctgttctgtaatcgataaaccccgatcaacctcaccacctcttgctcagcctatataccgccatcttcagcaaaccctgatgaaggctacaaagtaagcgcaagtacccacgtaaagacgttaggtcaaggtgtagcccatgaggtggcaagaaatgggctacattttctaccccagaaaactacgatagcccttatgaaacttaagggtcgaaggtggatttagcagtaaactgagagtagagtgcttagttgaacagggccctgaagcgcgtacacaccgcccgtcaccctcctcaagtatacttcaaaggacatttaactaaaacccctacgcatttatatagaggagacaagtcgtaacatggtaagtgtactggaaagtgcacttggacgaaccagagtgtagcttaacacaaagcacccaacttacacttaggagatttcaacttaacttgaccgctctgagctaaacctagccccaaacccactccaccttactaccagacaaccttagccaaaccatttacccaaataaagtataggcgatagaaattgaaacctggcgcaatagatatagtaccgcaagggaaagatgaaaaattataaccaagcataatatagcaaggactaacccctataccttctgcataatgaattaactagaaataactttgcaaggagagccaaagctaagacccccgaaaccagacgagctacctaagaacagctaaaagagcacacccgtctatgtagcaaaatagtgggaagatttataggtagaggcgacaaacctaccgagcctggtgatagctggttgtccaagatagaatcttagttcaactttaaatttgcccacagaaccctctaaatccccttgtaaatttaactgttagtccaaagaggaacagctctttggacactaggaaaaaaccttgtagagagagtaaaaaatttaacacccatagtaggcctaaaagcagccaccaattaagaaagcgttcaagctcaacacccactacctaaaaaatcccaaacatataactgaactcctcacacccaattggaccaatctatcaccctatagaagaactaatgttagtataagtaacatgaaaacattctcctccgcataagcctgcgtcagattaaaacactgaactgacaattaacagcccaatatctacaatcaaccaacaagtcattattaccctcactgtcaacccaacacaggcatgctcataaggaaaggttaaaaaaagtaaaaggaactcggcaaatcttaccccgcctgtttaccaaaaacatcacctctagcatcaccagtattagaggcaccgcctgcccagtgacacatgtttaacggccgcggtaccctaaccgtgcaaaggtagcataatcacttgttccttaaatagggacctgtatgaatggctccacgagggttcagctgtctcttacttttaaccagtgaaattgacctgcccgtgaagaggcgggcatgacacagcaagacgagaagaccctatggagctttaatttattaatgcaaacagtacctaacaaacccacaggtcctaaactaccaaacctgcattaaaaatttcggttggggcgacctcggagcagaacccaacctccgagcagtacatgctaagacttcaccagtcaaagcgaactactatactcaattgatccaataacttgaccaacggaacaagttaccctagggataacagcgcaatcctattctagagtccatatcaacaatagggtttacgacctcgatgttggatcaggacatcccgatggtgcagccgctattaaaggttcgtttgttcaacgattaaagtcctacgtgatctgagttcagaccggagtaatccaggtcggtttctatctacnttcaaattcctccctgtacgaaaggacaagagaaataaggcctacttcacaaagcgccttcccccgtaaatgatatcatctcaacttagcattatacccacacccacccaagaacagggtttgttaagatggcagagcccggtaatcgcataaaacttaaaactttacagtcagaggttcaattcctcttcttaacaacatacccatggccaacctcctactcctcattgtacccattctaatcgcaatggcattcctaatgcttaccgaacgaaaaattctaggctatatacaactacgcaaaggccccaacgttgtaggcccctacgggctactacaacccttcgctgacgccataaaactcttcaccaaagagcccctaaaacccgccacatctaccatcaccctctacatcaccgccccgaccttagctctcaccatcgctcttctactatgaacccccctccccatacccaaccccctggtcaacctcaacctaggcctcctatttattctagccacctctagcctagccgtttactcaatcctctgatcagggtgagcatcaaactcaaactacgccctgatcggcgcactgcgagcagtagcccaaacaatctcatatgaagtcaccctagccatcattctactatcaacattactaataagtggctcctttaacctctccacccttatcacaacacaagaacacctctgattactcctgccatcatgacccttggccataatatgatttatctccacactagcagagaccaaccgaacccccttcgaccttgccgaaggggagtccgaactagtctcaggcttcaacatcgaatacgccgcaggccccttcgccctattcttcatagccgaatacacaaacattattataataaacaccctcaccactacaatcttcctaggaacaacatatgacgcactctcccctgaactctacacaacatattttgtcaccaagaccctacttctaacctccctgttcttatgaattcgaacagcatacccccgattccgctacgaccaactcatacacctcctatgaaaaaacttcctaccactcaccctagcattacttatatgatatgtctccatacccattacaatctccagcattccccctcaaacctaagaaatatgtctgataaaagagttactttgatagagtaaataataggagcttaaacccccttatttctaggactatgagaatcgaacccatccctgagaatccaaaattctccgtgccacctatcacaccccatcctaaagtaaggtcagctaaataagctatcgggcccataccccgaaaatgttggttatacccttcccgtactaattaatcccctggcccaacccgtcatctactctaccatctttgcaggcacactcatcacagcgctaagctcgcactgattttttacctgagtaggcctagaaataaacatgctagcttttattccagttctaaccaaaaaaataaaccctcgttccacagaagctgccatcaagtatttcctcacgcaagcaaccgcatccataatccttctaatagctatcctcttcaacaatatactctccggacaatgaaccataaccaatactaccaatcaatactcatcattaataatcataatggctatagcaataaaactaggaatagccccctttcacttctgagtcccagaggttacccaaggcacccctctgacatccggcctgcttcttctcacatgacaaaaactagcccccatctcaatcatataccaaatctctccctcactaaacgtaagccttctcctcactctctcaatcttatccatcatagcaggcagttgaggtggattaaaccaaacccagctacgcaaaatcttagcatactcctcaattacccacataggatgaataatagcagttctaccgtacaaccctaacataaccattcttaatttaactatttatattatcctaactactaccgcattcctactactcaacttaaactccagcaccacgaccctactactatctcgcacctgaaacaagctaacatgactaacacccttaattccatccaccctcctctccctaggaggcctgcccccgctaaccggctttttgcccaaatgggccattatcgaagaattcacaaaaaacaatagcctcatcatccccaccatcatagccaccatcaccctccttaacctctacttctacctacgcctaatctactccacctcaatcacactactccccatatctaacaacgtaaaaataaaatgacagtttgaacatacaaaacccaccccattcctccccacactcatcgcccttaccacgctactcctacctatctccccttttatactaataatcttatagaaatttaggttaaatacagaccaagagccttcaaagccctcagtaagttgcaatacttaatttctgtaacagctaaggactgcaaaaccccactctgcatcaactgaacgcaaatcagccactttaattaagctaagcccttactagaccaatgggacttaaacccacaaacacttagttaacagctaagcaccctaatcaactggcttcaatctacttctcccgccgccgggaaaaaaggcgggagaagccccggcaggtttgaagctgcttcttcgaatttgcaattcaatatgaaaatcacctcggagctggtaaaaagaggcctaacccctgtctttagatttacagtccaatgcttcactcagccattttacctcacccccactgatgttcgccgaccgttgactattctctacaaaccacaaagacattggaacactatacctattattcggcgcatgagctggagtcctaggcacagctctaagcctccttattcgagccgagctgggccagccaggcaaccttctaggtaacgaccacatctacaacgttatcgtcacagcccatgcatttgtaataatcttcttcatagtaatacccatcataatcggaggctttggcaactgactagttcccctaataatcggtgcccccgatatggcgtttccccgcataaacaacataagcttctgactcttacctccctctctcctactcctgctcgcatctgctatagtggaggccggagcaggaacaggttgaacagtctaccctcccttagcagggaactactcccaccctggagcctccgtagacctaaccatcttctccttacacctagcaggtgtctcctctatcttaggggccatcaatttcatcacaacaattatcaatataaaaccccctgccataacccaataccaaacgcccctcttcgtctgatccgtcctaatcacagcagtcctacttctcctatctctcccagtcctagctgctggcatcactatactactaacagaccgcaacctcaacaccaccttcttcgaccccgccggaggaggagaccccattctataccaacacctattctgatttttcggtcaccctgaagtttatattcttatcctaccaggcttcggaataatctcccatattgtaacttactactccggaaaaaaagaaccatttggatacataggtatggtctgagctatgatatcaattggcttcctagggtttatcgtgtgagcacaccatatatttacagtaggaatagacgtagacacacgagcatatttcacctccgctaccataattatcgctatccccaccggcgtcaaagtatttagctgactcgccacactccacggaagcaatatgaaatgatctgctgcagtgctctgagccctaggattcatctttcttttcaccgtaggtggcctgactggcattgtattagcaaactcatcactagacatcgtactacacgacacgtactacgttgtagctcacttccactatgtcctatcaataggagctgtatttgccatcataggaggcttcattcactgatttcccctattctcaggctacaccctagaccaaacctacgccaaaatccatttcactatcatattcatcggcgtaaatctaactttcttcccacaacactttctcggcctatccggaatgccccgacgttactcggactaccccgatgcatacaccacatgaaacatcctatcatctgtaggctcattcatttctctaacagcagtaatattaataattttcatgatttgagaagccttcgcttcgaagcgaaaagtcctaatagtagaagaaccctccataaacctggagtgactatatggatgccccccaccctaccacacattcgaagaacccgtatacataaaatctagacaaaaaaggaaggaatcgaaccccccaaagctggtttcaagccaaccccatggcctccatgactttttcaaaaaggtattagaaaaaccatttcataactttgtcaaagttaaattataggctaaatcctatatatcttaatggcacatgcagcgcaagtaggtctacaagacgctacttcccctatcatagaagagcttatcacctttcatgatcacgccctcataatcattttccttatctgcttcctagtcctgtatgcccttttcctaacactcacaacaaaactaactaatactaacatctcagacgctcaggaaatagaaaccgtctgaactatcctgcccgccatcatcctagtcctcatcgccctcccatccctacgcatcctttacataacagacgaggtcaacgatccctcccttaccatcaaatcaattggccaccaatggtactgaacctacgagtacaccgactacggcggactaatcttcaactcctacatacttcccccattattcctagaaccaggcgacctgcgactccttgacgttgacaatcgagtagtactcccgattgaagcccccattcgtataataattacatcacaagacgtcttgcactcatgagctgtccccacattaggcttaaaaacagatgcaattcccggacgtctaaaccaaaccactttcaccgctacacgaccgggggtatactacggtcaatgctctgaaatctgtggagcaaaccacagtttcatgcccatcgtcctagaattaattcccctaaaaatctttgaaatagggcccgtatttaccctatagcaccccctctaccccctctagagcccactgtaaagctaacttagcattaaccttttaagttaaagattaagagaaccaacacctctttacagtgaaatgccccaactaaatactaccgtatggcccaccataattacccccatactccttacactattcctcatcacccaactaaaaatattaaacacaaactaccacctacctccctcaccaaagcccataaaaataaaaaattataacaaaccctgagaaccaaaatgaacgaaaatctgttcgcttcattcattgcccccacaatcctaggcctacccgccgcagtactgatcattctatttccccctctattgatccccacctccaaatatctcatcaacaaccgactaatcaccacccaacaatgactaatcaaactaacctcaaaacaaatgataaccatacacaacactaaaggacgaacctgatctcttatactagtatccttaatcatttttattgccacaactaacctcctcggactcctgcctcactcatttacaccaaccacccaactatctataaacctagccatggccatccccttatgagcgggcgcagtgattataggctttcgctctaagattaaaaatgccctagcccacttcttaccacaaggcacacctacaccccttatccccatactagttattatcgaaaccgtcagcctactcattcaaccaatagccctggccgtacgcctaaccgctaacattactgcaggccacctactcatgcacctaattggaagcgccaccctagcaatatcaaccattaaccttccctctacacttatcatcttcacaattctaattctactgactatcctagaaatcgctgtcgccttaatccaagcctacgttttcacacttctagtaagcctctacctgcacgacaacacataatgacccaccaatcacatgcctatcatatagtaaaacccagcccatgacccctaacaggggccctctcagccctcctaatgacctccggcctagccatgtgatttcacttccactccataacgctcctcatactaggcctactaaccaacacactaaccatataccaatgatggcgcgatgtaacacgagaaagcacataccaaggccaccacacaccacctgtccaaaaaggccttcgatacgggataatcctatttattacctcagaaatttttttcttcgcaggatttttctgagccttttaccactccagcctagcccctaccccccaattaggaggacactggcccccaacaggcatcaccccgctaaatcccctagaagtcccactcctaaacacatccgtattactcgcatcaggagtatcaatcacctgagctcaccatagtctaatagaaaacaaccgaaaccaaataattcaagcactgcttattacaattttactgggtctctattttaccctcctacaagcctcagagtacttcgagtctcccttcaccatttccgacggcatctacggctcaacattttttgtagccacaggcttccacggacttcacgtcattattggctcaactttcctcactatctgcttcatccgccaactaatatttcactttacatccaaacatcactttggcttcgaagccgccgcctgatactggcattttgtagatgtggtttgactatttctgtatgtctccatctattgatgagggtcttactcttttagtataaatagtaccgttaacttccaattaactagttttgacaacattcaaaaaagagtaataaacttcgccttaattttaataatcaacaccctcctagccttactactaataattattacattttgactaccacaactcaacggctacatagaaaaatccaccccttacgagtgcggcttcgaccctatatcccccgcccgcgtccctttctccataaaattcttcttagtagctattaccttcttattatttgatctagaaattgccctccttttacccctaccatgagccctacaaacaactaacctgccactaatagttatgtcatccctcttattaatcatcatcctagccctaagtctggcctatgagtgactacaaaaaggattagactgaaccgaattggtatatagtttaaacaaaacgaatgatttcgactcattaaattatgataatcatatttaccaaatgcccctcatttacataaatattatactagcatttaccatctcacttctaggaatactagtatatcgctcacacctcatatcctccctactatgcctagaaggaataatactatcgctgttcattatagctactctcataaccctcaacacccactccctcttagccaatattgtgcctattgccatactagtctttgccgcctgcgaagcagcggtgggcctagccctactagtctcaatctccaacacatatggcctagactacgtacataacctaaacctactccaatgctaaaactaatcgtcccaacaattatattactaccactgacatgactttccaaaaaacacataatttgaatcaacacaaccacccacagcctaattattagcatcatccctctactattttttaaccaaatcaacaacaacctatttagctgttccccaaccttttcctccgaccccctaacaacccccctcctaatactaactacctgactcctacccctcacaatcatggcaagccaacgccacttatccagtgaaccactatcacgaaaaaaactctacctctctatactaatctccctacaaatctccttaattataacattcacagccacagaactaatcatattttatatcttcttcgaaaccacacttatccccaccttggctatcatcacccgatgaggcaaccagccagaacgcctgaacgcaggcacatacttcctattctacaccctagtaggctcccttcccctactcatcgcactaatttacactcacaacaccctaggctcactaaacattctactactcactctcactgcccaagaactatcaaactcctgagccaacaacttaatatgactagcttacacaatagcttttatagtaaagatacctctttacggactccacttatgactccctaaagcccatgtcgaagcccccatcgctgggtcaatagtacttgccgcagtactcttgaaactaggcggctatggtataatacgcctcacactcattctcaaccccctgacaaaacacatagcctaccccttccttgtactatccctatgaggcataattataacaagctccatctgcctacgacaaacagacctaaaatcgctcattgcatactcttcaatcagccacatagccctcgtagtaacagccattctcatccaaaccccctgaagcttcaccggcgcagtcattctcataatcgcccacggacttacatcctcattactattctgcctagcaaactcaaactacgaacgcactcacagtcgcatcataatcctctctcaaggacttcaaactctactcccactaatagctttttgatgacttctagcaagcctcgctaacctcgccttaccccccactattaacctactgggagaactctctgtgctagtaaccacgttctcctgatcaaatatcactctcctacttacaggactcaacatactagtcacagccctatactccctctacatatttaccacaacacaatggggctcactcacccaccacattaacaacataaaaccctcattcacacgagaaaacaccctcatgttcatacacctatcccccattctcctcctatccctcaaccccgacatcattaccgggttttcctcttgtaaatatagtttaaccaaaacatcagattgtgaatctgacaacagaggcttacgaccccttatttaccgagaaagctcacaagaactgctaactcatgcccccatgtctaacaacatggctttctcaacttttaaaggataacagctatccattggtcttaggccccaagaattttggtgcaactccaaataaaagtaataaccatgcacactactataaccaccctaaccctaacttccctaattccccccatccttaccaccctcgttaaccctaacaaaaaaaactcatacccccattatgtaaaatccattgtcgcatccacctttattatcagtctcttccccacaacaatattcatgtgcctagaccaagaagttattatctcgaactgacactgagccacaacccaaacaacccagctctccctaagcttcaaactagactacttctccataatattcatccctgtagcattgttcgttacatggtccatcatagaattctcactgtgatatataaactcagacccaaacattaatcagttcttcaaatatctactcatcttcctaattaccatactaatcttagttaccgctaacaacctattccaactgttcatcggctgagagggcgtaggaattatatccttcttgctcatcagttgatgatacgcccgagcagatgccaacacagcagccattcaagcaatcctatacaaccgtatcggcgatatcggtttcatcctcgccttagcatgatttatcctacactccaactcatgagacccacaacaaatagcccttctaaacgctaatccaagcctcaccccactactaggcctcctcctagcagcagcaggcaaatcagcccaattaggtctccacccctgactcccctcagccatagaaggccccaccccagtctcagccctactccactcaagcactatagttgtagcaggaatcttcttactcatccgcttccaccccctagcagaaaatagcccactaatccaaactctaacactatgcttaggcgctatcaccactctgttcgcagcagtctgcgcccttacacaaaatgacatcaaaaaaatcgtagccttctccacttcaagtcaactaggactcataatagttacaatcggcatcaaccaaccacacctagcattcctgcacatctgtacccacgccttcttcaaagccatactatttatgtgctccgggtccatcatccacaaccttaacaatgaacaagatattcgaaaaataggaggactactcaaaaccatacctctcacttcaacctccctcaccattggcagcctagcattagcaggaatacctttcctcacaggtttctactccaaagaccacatcatcgaaaccgcaaacatatcatacacaaacgcctgagccctatctattactctcatcgctacctccctgacaagcgcctatagcactcgaataatccttctcaccctaacaggtcaacctcgcttccccacccttactaacattaacgaaaataaccccaccctactaaaccccattaaacgcctggcagccggaagcctattcgcaggatttctcattactaacaacatttcccccgcatcccccttccaaacaacaatccccctctacctaaaactcacagccctcgctgtcactttcctaggacttctaacagccctagacctcaactacctaaccaacaaacttaaaataaaatccccactatgcacattttatttctccaacatactcggattctaccctagcatcacacaccgcacaatcccctatctaggccttcttacgagccaaaacctgcccctactcctcctagacctaacctgactagaaaagctattacctaaaacaatttcacagcaccaaatctccacctccatcatcacctcaacccaaaaaggcataattaaactttacttcctctctttcttcttcccactcatcctaaccctactcctaatcacataacctattcccccgagcaatctcaattacaatatatacaccaacaaacaatgttcaaccagtaactactactaatcaacgcccataatcatacaaagcccccgcaccaataggatcctcccgaatcaaccctgacccctctccttcataaattattcagcttcctacactattaaagtttaccacaaccaccaccccatcatactctttcacccacagcaccaatcctacctccatcgctaaccccactaaaacactcaccaagacctcaacccctgacccccatgcctcaggatactcctcaatagccatcgctgtagtatatccaaagacaaccatcattccccctaaataaattaaaaaaactattaaacccatataacctcccccaaaattcagaataataacacacccgaccacaccgctaacaatcaatactaaacccccataaataggagaaggcttagaagaaaaccccacaaaccccattactaaacccacactcaacagaaacaaagcatacatcattattctcgcacggactacaaccacgaccaatgatatgaaaaaccatcgttgtatttcaactacaagaacaccaatgaccccaatacgcaaaattaaccccctaataaaattaattaaccgctcattcatcgacctccccaccccatccaacatctccgcatgatgaaacttcggctcactccttggcgcctgcctgatcctccaaatcaccacaggactattcctagccatgcactactcaccagacgcctcaaccgccttttcatcaatcgcccacatcactcgagacgtaaattatggctgaatcatccgctaccttcacgccaatggcgcctcaatattctttatctgcctcttcctacacatcgggcgaggcctatattacggatcatttctctactcagaaacctgaaacatcggcattatcctcctgcttgcaactatagcaacagccttcataggctatgtcctcccgtgaggccaaatatcattctgaggggccacagtaattacaaacttactatccgccatcccatacattgggacagacctagttcaatgaatctgaggaggctactcagtagacagtcccaccctcacacgattctttacctttcacttcatcttacccttcattattgcagccctagcagcactccacctcctattcttgcacgaaacgggatcaaacaaccccctaggaatcacctcccattccgataaaatcaccttccacccttactacacaatcaaagacgccctcggcttacttctcttccttctctccttaatgacattaacactattctcaccagacctcctaggcgacccagacaattataccctagccaaccccttaaacacccctccccacatcaagcccgaatgatatttcctattcgcctacacaattctccgatccgtccctaacaaactaggaggcgtccttgccctattactatccatcctcatcctagcaataatccccatcctccatatatccaaacaacaaagcataatatttcgcccactaagccaatcactttattgactcctagccgcagacctcctcattctaacctgaatcggaggacaaccagtaagctacccttttaccatcattggacaagtagcatccgtactatacttcacaacaatcctaatcctaataccaactatctccctaattgaaaacaaaatactcaaatgggcctgtccttgtagtataaactaatacaccagtcttgtaaaccggagatgaaaacctttttccaaggacaaatcagagaaaaagtctttaactccaccattagcacccaaagctaagattctaatttaaactattctctgttctttcatggggaagcagatttgggtaccacccaagtattgactcacccatcaacaaccgctatgtatttcgtacattactgccagccaccatgaatattgtacggtaccataaatacttgaccacctgtagtacataaaaacccaatccacatcaaaaccccctcctcatgcttacaagcaagtgcagcaatcaaccctcaactatcacacatcaactgcaactccaaagtcacccctcacccattaggataccaacaaacctacccacccttaacagtacatagtacataaagccatttaccgtacatagcacattacagtcaaatcccttctcgtccccatggatgacccccctcagataggggtcccttgaccaccatcctccgtgaaatcaatatcccgcacaagagtgctactctcctcgctccgggcccataacacttgggggtagctaaagtgaactgtatccgacatctggttcctacttcagggtcataaaacctaaatagcccacacgttccccttaaataagacatcacgatg

SEQ ID NO: 229 - DNA, 16570 bp, Homo sapiens mitochondrial
  3108: "n" refers to a nucleotide at position 3107 of the Cambridge Reference Sequence (CRS, Anderson et al. 1981 Nature 290:457-465), later determined to be absent from the human mtDNA sequence according to the revised CRS (rCRS, Andrews et al. 1999 Nature Genetics 23:147); "n" therefore represents a single nucleotide deletion at a position corresponding to nucleotide 3107 of SEQ ID NO:1 as provided herein.
gatcacaggtctatcaccctattaaccactcacgggagctctccatgcatttggtattttcgtctggggggtgtgcacgcgatagcattgcgagacgctggagccggagcaccctatgtcgcagtatctgtctttgattcctgcctcatcctattatttatcgcacctacgttcaatattacagacgaacatacttactaaagtgtgttaattaattaatgcttgtaagacataataataacaattgaatgtctgcacagccgctttccacacagacatcataacaaaaaattttcaccaaaccccccctcccccgccttctggccacagcacttaaacacatctctgccaaaccccaaaaacaaagaaccctaacaccagcctaaccagatttcaaattttatcttttggcggtatgcacttttaacagtcaccccccaactaacacattattttcccctctcactcccatactactaatctcatcaacacaacccccgcccatcctacccagcacacacacaccgctgctaaccccataccccgaaccaaccaaaccccaaagacaccccccacagtttatgtagcttacctcctcaaagcaatacactgaaaatgtttagacgggctcacatcaccccataaacaaataggtttggtcctagcctttctattagctcttagtaagattacacatgcaagcatccccgttccagtgagttcaccctctaaatcaccacgatcaaaagggacaagcatcaagcacgcagcaatgcagctcaaaacgcttagcctagccacacccccacgggaaacagcagtgattaacctttagcaataaacgaaagtttaactaagctatactaaccccagggttggtcaatttcgtgccagccaccgcggtcacacgattaacccaagtcaatagaagccggcgtaaagagtgttttagatcaccccctccccaataaagctaaaactcacctgagttgtaaaaaactccagttgacacaaaatagactacgaaagtggctttaacatatctgaacacacaatagctaagacccaaactgggattagataccccactatgcttagccctaaacctcaacagttaaatcaacaaaactgctcgccagaacactacgagccacagcttaaaactcaaaggacctggcggtgcttcatatccctctagaggagcctgttctgtaatcgataaaccccgatcaacctcaccacctcttgctcagcctatataccgccatcttcagcaaaccctgatgaaggctacaaagtaagcgcaagtacccacgtaaagacgttaggtcaaggtgtagcccatgaggtggcaagaaatgggctacattttctaccccagaaaactacgatagcccttatgaaacttaagggtcgaaggtggatttagcagtaaactgagagtagagtgcttagttgaacagggccctgaagcgcgtacacaccgcccgtcaccctcctcaagtatacttcaaaggacatttaactaaaacccctacgcatttatatagaggagacaagtcgtaacatggtaagtgtactggaaagtgcacttggacgaaccagagtgtagcttaacacaaagcacccaacttacacttaggagatttcaacttaacttgaccgctctgagctaaacctagccccaaacccactccaccttactaccagacaaccttagccaaaccatttacccaaataaagtataggcgatagaaattgaaacctggcgcaatagatatagtaccgcaagggaaagatgaaaaattataaccaagcataatatagcaaggactaacccctataccttctgcataatgaattaactagaaataactttgcaaggagagccaaagctaagacccccgaaaccagacgagctacctaagaacagctaaaagagcacacccgtctatgtagcaaaatagtgggaagatttataggtagaggcgacaaacctaccgagcctggtgatagctggttgtccaagatagaatcttagttcaactttaaatttgcccacagaaccctctaaatccccttgtaaatttaactgttagtccaaagaggaacagctctttggacactaggaaaaaaccttgtagagagagtaaaaaatttaacacccatagtaggcctaaaagcagccaccaattaagaaagcgttcaagctcaacacccactacctaaaaaatcccaaacatataactgaactcctcacacccaattggaccaatctatcaccctatagaagaactaatgttagtataagtaacatgaaaacattctcctccgcataagcctgcgtcagattaaaacactgaactgacaattaacagcccaatatctacaatcaaccaacaagtcattattaccctcactgtcaacccaacacaggcatgctcataaggaaaggttaaaaaaagtaaaaggaactcggcaaatcttaccccgcctgtttaccaaaaacatcacctctagcatcaccagtattagaggcaccgcctgcccagtgacacatgtttaacggccgcggtaccctaaccgtgcaaaggtagcataatcacttgttccttaaatagggacctgtatgaatggctccacgagggttcagctgtctcttacttttaaccagtgaaattgacctgcccgtgaagaggcgggcataacacagcaagacgagaagaccctatggagctttaatttattaatgcaaacagtacctaacaaacccacaggtcctaaactaccaaacctgcattaaaaatttcggttggggcgacctcggagcagaacccaacctccgagcagtacatgctaagacttcaccagtcaaagcgaactactatactcaattgatccaataacttgaccaacggaacaagttaccctagggataacagcgcaatcctattctagagtccatatcaacaatagggtttacgacctcgatgttggatcaggacatcccaatggtgcagccgctattaaaggttcgtttgttcaacgattaaagtcctacgtgatctgagttcagaccggagtaatccaggtcggtttctatctacnttcaaattcctccctgtacgaaaggacaagagaaataaggcctacttcacaaagcgccttcccccgtaaatgatatcatctcaacttagtattatacccacacccacccaagaacagggtttgttaagatggcagagcccggtaatcgcataaaacttaaaactttacagtcagaggttcaattcctcttcttaacaacatacccatggccaacctcctactcctcattgtacccattctaatcgcaatggcattcctaatgcttaccgaacgaaaaattctaggctatatacaactacgcaaaggccccaacgttgtaggcccctacgggctactacaacccttcgctgacgccataaaactcttcaccaaagagcccctaaaacccgccacatctaccatcaccctctacatcaccgccccgaccttagctctcaccatcgctcttctactatgaacccccctccccatacccaaccccctggtcaacctcaacctaggcctcctatttattctagccacctctagcctagccgtttactcaatcctctgatcagggtgagcatcaaactcaaactacgccctgatcggcgcactgcgagcagtagcccaaacaatctcatatgaagtcaccctagccatcattctactatcaacattactaataagtggctcctttaacctctccacccttatcacaacacaagaacacctctgattactcctgccatcatgacccttggccataatatgatttatctccacactagcagagaccaaccgaacccccttcgaccttgccgaaggggagtccgaactagtctcaggcttcaacatcgaatacgccgcaggccccttcgccctattcttcatagccgaatacacaaacattattataataaacaccctcaccactacaatcttcctaggaacaacatatgacgcactctcccctgaactctacacaacatattttgtcaccaagaccctacttctaacctccctgttcttatgaattcgaacagcatacccccgattccgctacgaccaactcatacacctcctatgaaaaaacttcctaccactcaccctagcattacttatatgacatgtctccatacccattacaatctccagcattccccctcaaacctaagaaatatgtctgataaaagagttactttgatagagtaaataataggagcttaaacccccttatttctaggactatgagaatcgaacccatccctgagaatccaaaattctccgtgccacctatcacaccccatcctaaagtaaggtcagctaaataagctatcgggcccataccccgaaaatgttggttatacccttcccgtactaattaatcccctggcccaacccgtcatctactctaccatctttgcaggcacactcatcacagcgctaagctcgcactgattttttacctgagtaggcctagaaataaacatgctagcttttattccagttctaaccaaaaaaataaaccctcgttccacagaagctgccatcaagtatttcctcacgcaagcaaccgcatccataatccttctaatagctatcctcttcaacaatatactctccggacaatgaaccataaccaatactaccaatcaatactcatcattaataatcataatggctatagcaataaaactaggaatagccccctttcacttctgagtcccagaggttacccaaggcacccctctgacatccggcctgcttcttctcacatgacaaaaactagcccccatctcaatcatataccaaatctctccctcactaaacgtaagccttctcctcactctctcaatcttatccatcatagcaggcagttgaggtggattaaaccaaacccagctacgcaaaatcttagcatactcctcaattacccacataggatgaataatagcagttctaccgtacaaccctaacataaccattcttaatttaactatttatattatcctaactactaccgcattcctactactcaacttaaactccagcaccacgaccctactactatctcgcacctgaaacaagctaacatgactaacacccttaattccatccaccctcctctccctaggaggcctgcccccgctaaccggctttttgcccaaatgggccattatcgaagaattcacaaaaaacaatagcctcatcatccccaccatcatagccaccatcaccctccttaacctctacttctacctacgcctaatctactccacctcaatcacactactccccatatctaacaacgtaaaaataaaatgacagtttgaacatacaaaacccaccccattcctccccacactcatcgcccttaccacgctactcctacctatctccccttttatactaataatcttatagaaatttaggttaaatacagaccaagagccttcaaagccctcagtaagttgcaatacttaatttctgtaacagctaaggactgcaaaaccccactctgcatcaactgaacgcaaatcagccactttaattaagctaagcccttactagaccaatgggacttaaacccacaaacacttagttaacagctaagcaccctaatcaactggcttcaatctacttctcccgccgccgggaaaaaaggcgggagaagccccggcaggtttgaagctgcttcttcgaatttgcaattcaatatgaaaatcacctcggagctggtaaaaagaggcctaacccctgtctttagatttacagtccaatgcttcactcagccattttacctcacccccactgatgttcgccgaccgttgactattctctacaaaccacaaagacattggaacactatacctattattcggcgcatgagctggagtcctaggcacagctctaagcctccttattcgagccgagctgggccagccaggcaaccttctaggtaacgaccacatctacaacgttatcgtcacagcccatgcatttgtaataatcttcttcatagtaatacccatcataatcggaggctttggcaactgactagttcccctaataatcggtgcccccgatatggcgtttccccgcataaacaacataagcttctgactcttacctccctctctcctactcctgctcgcatctgctatagtggaggccggagcaggaacaggttgaacagtctaccctcccttagcagggaactactcccaccctggagcctccgtagacctaaccatcttctccttacacctagcaggtgtctcctctatcttaggggccatcaatttcatcacaacaattatcaatataaaaccccctgccataacccaataccaaacgcccctcttcgtctgatccgtcctaatcacagcagtcctacttctcctatctctcccagtcctagctgctggcatcactatactactaacagaccgcaacctcaacaccaccttcttcgaccccgccggaggaggagaccccattctataccaacacctattctgatttttcggtcaccctgaagtttatattcttatcctaccaggcttcggaataatctcccatattgtaacttactactccggaaaaaaagaaccatttggatacataggtatggtctgagctatgatatcaattggcttcctagggtttatcgtgtgagcacaccatatatttacagtaggaatagacgtagacacacgagcatatttcacctccgctaccataatcatcgctatccccaccggcgtcaaagtatttagctgactcgccacactccacggaagcaatatgaaatgatctgctgcagtgctctgagccctaggattcatctttcttttcaccgtaggtggcctgactggcattgtattagcaaactcatcactagacatcgtactacacgacacgtactacgttgtagctcacttccactatgtcctatcaataggagctgtatttgccatcataggaggcttcattcactgatttcccctattctcaggctacaccctagaccaaacctacgccaaaatccatttcactatcatattcatcggcgtaaatctaactttcttcccacaacactttctcggcctatccggaatgccccgacgttactcggactaccccgatgcatacaccacatgaaacatcctatcatctgtaggctcattcatttctctaacagcagtaatattaataattttcatgatttgagaagccttcgcttcgaagcgaaaagtcctaatagtagaagaaccctccataaacctggagtgactatatggatgccccccaccctaccacacattcgaagaacccgtatacataaaatctagacaaaaaaggaaggaatcgaaccccccaaagctggtttcaagccaaccccatggcctccatgactttttcaaaaaggtattagaaaaaccatttcataactttgtcaaagttaaattataggctaaatcctatatatcttaatggcacatgcagcgcaagtaggtctacaagacgctacttcccctatcatagaagagcttatcacctttcatgatcacgccctcataatcattttccttatctgcttcctagtcctgtatgcccttttcctaacactcacaacaaaactaactaatactaacatctcagacgctcaggaaatagaaaccgtctgaactatcctgcccgccatcatcctagtcctcatcgccctcccatccctacgcatcctttacataacagacgaggtcaacgatccctcccttaccatcaaatcaattggccaccaatggtactgaacctacgagtacaccgactacggcggactaatcttcaactcctacatacttcccccattattcctagaaccaggcgacctgcgactccttgacgttgacaatcgagtagtactcccgattgaagcccccattcgtataataattacatcacaagacgtcttgcactcatgagctgtccccacattaggcttaaaaacagatgcaattcccggacgtctaaaccaaaccactttcaccgctacacgaccgggggtatactacggtcaatgctctgaaatctgtggagcaaaccacagtttcatgcccatcgtcctagaattaattcccctaaaaatctttgaaatagggcccgtatttaccctatagcaccccctctaccccctctagagcccactgtaaagctaacttagcattaaccttttaagttaaagattaagagaaccaacacctctttacagtgaaatgccccaactaaatactaccgtatggcccaccataattacccccatactccttacactattcctcatcacccaactaaaaatattaaacacaaactaccacctacctccctcaccaaagcccataaaaataaaaaattataacaaaccctgagaaccaaaatgaacgaaaatctgttcgcttcattcattgcccccacaatcctaggcctacccgccgcagtactgatcattctatttccccctctattgatccccacctccaaatatctcatcaacaaccgactaatcaccacccaacaatgactaatcaaactaacctcaaaacaaatgataaccatacacaacactaaaggacgaacctgatctcttatactagtatccttaatcatttttattgccacaactaacctcctcggactcctgcctcactcatttacaccaaccacccaactatctataaacctagccatggccatccccttatgagcgggcgcagtgattataggctttcgctctaagattaaaaatgccctagcccacttcttaccacaaggcacacctacaccccttatccccatactagttattatcgaaaccatcagcctactcattcaaccaatagccctggccgtacgcctaaccgctaacattactgcaggccacctactcatgcacctaattggaagcgccaccctagcaatatcaaccattaaccttccctctacacttatcatcttcacaattctaattctactgactatcctagaaatcgctgtcgccttaatccaagcctacgttttcacacttctagtaagcctctacctgcacgacaacacataatgacccaccaatcacatgcctatcatatagtaaaacccagcccatgacccctaacaggggccctctcagccctcctaatgacctccggcctagccatgtgatttcacttccactccataacgctcctcatactaggcctactaaccaacacactaaccatataccaatgatggcgcgatgtaacacgagaaagcacataccaaggccaccacacaccacctgtccaaaaaggccttcgatacgggataatcctatttattacctcagaagtttttttcttcgcaggatttttctgagccttttaccactccagcctagcccctaccccccaattaggagggcactggcccccaacaggcatcaccccgctaaatcccctagaagtcccactcctaaacacatccgtattactcgcatcaggagtatcaatcacctgagctcaccatagtctaatagaaaacaaccgaaaccaaataattcaagcactgcttattacaattttactgggtctctattttaccctcctacaagcctcagagtacttcgagtctcccttcaccatttccgacggcatctacggctcaacattttttgtagccacaggcttccacggacttcacgtcattattggctcaactttcctcactatctgcttcatccgccaactaatatttcactttacatccaaacatcactttggcttcgaagccgccgcctgatactggcattttgtagatgtgatttgactatttctgtatgtctccatctattgatgagggtcttactcttttagtataaatagtaccgttaacttccaattaactagttttgacaacattcaaaaaagagtaataaacttcgccttaattttaataatcaacaccctcctagccttactactaataattattacattttgactaccacaactcaacggctacatagaaaaatccaccccttacgagtgcggcttcgaccctatatcccccgcccgcgtccctttctccataaaattcttcttagtagctattaccttcttattatttgatctagaaattgccctccttttacccctaccatgagccctacaaacaactaacctgccactaatagttatgtcatccctcttattaatcatcatcctagccctaagtctggcctatgagtgactacaaaaaggattagactgagccgaattggtatatagtttaaacaaaacgaatgatttcgactcattaaattatgataatcatatttaccaaatgcccctcatttacataaatattatactagcatttaccatctcacttctaggaatactagtatatcgctcacacctcatatcctccctactatgcctagaaggaataatactatcgctgttcattatagctactctcataaccctcaacacccactccctcttagccaatattgtgcctattgccatactagtctttgccgcctgcgaagcagcggtgggcctagccctactagtctcaatctccaacacatatggcctagactacgtacataacctaaacctactccaatgctaaaactaatcgtcccaacaattatattactaccactgacatgactttccaaaaaacacataatttgaatcaacacaaccacccacagcctaattattagcatcatccctctactattttttaaccaaatcaacaacaacctatttagctgttccccaaccttttcctccgaccccctaacaacccccctcctaatactaactacctgactcctacccctcacaatcatggcaagccaacgccacttatccagtgaaccactatcacgaaaaaaactctacctctctatactaatctccctacaaatctccttaattataacattcacagccacagaactaatcatattttatatcttcttcgaaaccacacttatccccaccttggctatcatcacccgatgaggcaaccagccagaacgcctgaacgcaggcacatacttcctattctacaccctagtaggctcccttcccctactcatcgcactgatttacactcacaacaccctaggctcactaaacattctactactcactctcactgcccaagaactatcaaactcctgagccaacaacttaatatgactagcttacacaatagcttttatagtaaagatacctctttacggactccacttatgactccctaaagcccatgtcgaagcccccatcgctgggtcaatagtacttgccgcagtactcttaaaactaggcggctatggtataatacgcctcacactcattctcaaccccctgacaaaacacatagcctaccccttccttgtactatccctatgaggcataattataacaagctccatctgcctacgacaaacagacctaaaatcgctcattgcatactcttcaatcagccacatagccctcgtagtaacagccattctcatccaaaccccctgaagcttcaccggcgcagtcattctcataatcgcccacggacttacatcctcattactattctgcctagcaaactcaaactacgaacgcactcacagtcgcatcataatcctctctcaaggacttcaaactctactcccactaatagctttttgatgacttctagcaagcctcgctaacctcgccttaccccccactattaacctactgggagaactctctgtgctagtaaccacgttctcctgatcaaatatcactctcctacttacaggactcaacatactagtcacagccctatactccctctacatatttaccacaacacaatggggctcactcacccaccacattaacaacataaaaccctcattcacacgagaaaacaccctcatgttcatacacctatcccccattctcctcctatccctcaaccccgacatcattaccgggttttcctcttgtaaatatagtttaaccaaaacatcagattgtgaatctgacaacagaggcttacgaccccttatttaccgagaaagctcacaagaactgctaactcatgcccccatgtctaacaacatggctttctcaacttttaaaggataacagctatccattggtcttaggccccaaaaattttggtgcaactccaaataaaagtaataaccatgcacactactataaccaccctaaccctgacttccctaattccccccatccttaccaccctcgttaaccctaacaaaaaaaactcatacccccattatgtaaaatccattgtcgcatccacctttattatcagtctcttccccacaacaatattcatgtgcctagaccaagaagttattatctcgaactgacactgagccacaacccaaacaacccagctctccctaagcttcaaactagactacttctccataatattcatccctgtggcattgttcgttacatggtccatcatagaattctcactgtgatatataaactcagacccaaacattaatcagttcttcaaatatctactcatcttcctaattaccatactaatcttagttaccgctaacaacctattccaactgttcatcggctgagagggcgtaggaattatatccttcttgctcatcagttgatgatacgcccgagcagatgccaacacagcagccattcaagcaatcctatacaaccgtatcggcgatatcggtttcatcctcgccttagcatgatttatcctacactccaactcatgagacccacaacaaatagcccttctaaacgctaatccaagcctcaccccactactaggcctcctcctagcagcagcaggcaaatcagcccaattaggtctccacccctgactcccctcagccatagaaggccccaccccagtctcagccctactccactcaagcactatagttgtagcaggaatcttcttactcatccgcttccaccccctagcagaaaatagcccactaatccaaactctaacactatgcttaggcgctatcaccactctgttcgcagcagtctgcgcccttacacaaaatgacatcaaaaaaatcgtagccttctccacttcaagtcaactaggactcataatagttacaatcggcatcaaccaaccacacctagcattcctgcacatctgtacccacgccttcttcaaagccatactatttatgtgctccgggtccatcatccacaaccttaacaatgaacaagatattcgaaaaataggaggactactcaaaaccatacctctcacttcaacctccctcaccattggcagcctagcattagcaggaatacctttcctcacaggtttctactccaaagaccacatcatcgaaaccgcaaacatatcatacacaaacgcctgagccctatctattactctcatcgctacctccctgacaagcgcctatagcactcgaataattcttctcaccctaacaggtcaacctcgcttccccacccttactaacattaacgaaaataaccccaccctactaaaccccattaaacgcctgacagccggaagcctattcgcaggatttctcattactaacaacatttcccccgcatcccccttccaaacaacaatccccctctacctaaaactcacagccctcgctgtcactttcctaggacttctaacagccctagacctcaactacctaaccaacaaacttaaaataaaatccccactatgcacattttatttctccaacatactcggattctaccctagcatcatacaccgcacaatcccctatctaggccttcttacgagccaaaacctgcccctactcctcctagacctaacctgactagaaaagctattacctaaaacaatttcacagcaccaaatctccacctccatcatcacctcaacccaaaaaggcataattaaactttacttcctctctttcttcttcccactcatcctaaccctactcctaatcacataacctattcccccgagcaatctcaattacaatatatacaccaacaaacaatgttcaaccagtaactactactaatcaacgcccataatcatacaaagcccccgcaccaataggatcctcccgaatcaaccctgacccctctccttcataaattattcagcttcctacactattaaagtttaccacaaccaccaccccatcatactctttcacccacagcaccaatcctacctccatcgctaaccccactaaaacactcaccaagacctcaacccctgacccccatgcctcaggatactcctcaatagccatcgctgtagtatatccaaagacaaccatcattccccctaaataaattaaaaaaactattaaacccatataacctcccccaaaattcagaataataacacacccgaccacaccgctaacaatcaatactaaacccccataaataggagaaggcttagaagaaaaccccacaaaccccattactaaacccacactcaacagaaacaaagcatacatcattattctcgcacggactacaaccacgaccaatgatatgaaaaaccatcgttgtatttcaactacaagaacaccaatgaccccaatacgcaaaattaaccccctaataaaattaattaaccactcactcatcgacctccccaccccatccaacatctccgcatgatgaaacttcggctcactccttggcgcctgcctgatcctccaaatcaccacaggactattcctagccatgcactactcaccagacgcctcaaccgccttttcatcaatcgcccacatcactcgagacgtaaattatggctgaatcatccgctaccttcacgccaatggcgcctcaatattctttatctgcctcttcctacacatcgggcgaggcctatattacggatcatttctctactcagaaacctgaaacatcggcattatcctcctgcttgcaactatagcaacagccttcataggctatgtcctcccgtgaggccaaatatcattctgaggggccacagtaattacaaacttactatccgccatcccatacattgggacagacctagttcaatgaatctgaggaggctactcagtagacagtcccaccctcacacgattctttacctttcacttcatcttgcccttcattattgcagccctagcagcactccacctcctattcttgcacgaaacgggatcaaacaaccccctaggaatcacctcccattccgataaaatcaccttccacccttactacacaatcaaagacgccctcggcttacttctcttcattctctccttaatgacattaacactattctcaccagacctcctaggcgacccagacaattataccctagccaaccccttaaacacccctccccacatcaagcccgaatgatatttcctattcgcctacacaattctccgatccgtccctaacaaactaggaggcgtccttgccctattactatccatcctcatcctagcaataatccccatcctccatatatccaaacaacaaagcataatatttcgcccactaagccaatcactttattgactcctagccgcagacctcctcattctaacctgaatcggaggacaaccagtaagctacccttttaccatcattggacaagtagcatccgtactatacttcacaacaatcctaatcctaataccaactatctccctaattgaaaacaaaatactcaaatgggcctgtccttgtagtataaactaatacaccagtcttgtaaaccggagatgaaaacctttttccaaggacaaatcagagaaaaagtctttaactccaccattagcacccaaagctaagattctaatttaaactattctctgttctttcatggggaagcagatttgggtaccacccaagtattgacttacccatcaacaaccgctatgtatttcgtacattactgccagccaccatgaatattgcacggtaccataaatacttgaccacctgtagtacataaaaacccaatccacatcaaaaccccctccccatgcttacaagcaagtacagcaatcaaccctcaactatcacacatcaactgcaactccaaagccacccctcacccactaggataccaacaaacctacccacccttaacagtacatagtacataaagccatttaccgtacatagcacattacagtcaaatcccttctcgtccccatggatgacccccctcagataggggtcccttgaccaccatcctccgtgaaatcaatatcccgcacaagagtgctactctcctcgctccgggcccataacacttgggggtagctaaagtgaactgtatccgacatctggttcctacttcagggtcataaagcctaaatagcccacacgttccccttaaataagacatcacgatg

SEQ ID NO: 230 - DNA, 16569 bp, Homo sapiens mitochondrial
  3107: "n" refers to a nucleotide at position 3107 of the Cambridge Reference Sequence (CRS, Anderson et al. 1981 Nature 290:457-465), later determined to be absent from the human mtDNA sequence according to the revised CRS (rCRS, Andrews et al. 1999 Nature Genetics 23:147); "n" therefore represents a single nucleotide deletion at a position corresponding to nucleotide 3107 of SEQ ID NO:1 as provided herein.
gatcacaggtctatcaccctattaaccactcacgggagctctccatgcatttggtattttcgtctggggggtgtgcacgcgatagcattgcgagacgctggagccggagcaccctatgtcgcagtatctgtctttgattcctgcctcatcctattatttatcgcacctacgttcaatattacaggcgaacatacttactaaagtgtgttaattaattaatgcttgtaggacataataataacaattgaatgtctgcacagccgctttccacacagacatcataacaaaaaatttccaccaaaccccccctcccccgcttctggccacagcacttaaacacatctctgccaaaccccaaaaacaaagaaccctaacaccagcctaaccagatttcaaattttatcttttggcggtatgcacttttaacagtcaccccccaactaacacattattttcccctcccactcccatactactaatctcatcaatacaacccccgcccatcctacccagcacacacacaccgctgctaaccccataccccgaaccaaccaaaccccaaagacaccccccacagtttatgtagcttacctcctcaaagcaatacactgaaaatgtttagacgggctcacatcaccccataaacaaataggtttggtcctagcctttctattagctcttagtaagattacacatgcaagcatccccgttccagtgagttcaccctctaaatcaccacgatcaaaagggacaagcatcaagcacgcagcaatgcagctcaaaacgcttagcctagccacacccccacgggaaacagcagtgattaacctttagcaataaacgaaagtttaactaagctatactaaccccagggttggtcaatttcgtgccagccaccgcggtcacacgattaacccaagtcaatagaagccggcgtaaagagtgttttagatcaccccctccccaataaagctaaaactcacctgagttgtaaaaaactccagttgacacaaaatagactacgaaagtggctttaacatatctgaacacacaatagctaagacccaaactgggattagataccccactatgcttagccctaaacctcaacagttaaatcaacaaaactgctcgccagaacactacgagccacagcttaaaactcaaaggacctggcggtgcttcatatccctctagaggagcctgttctgtaatcgataaaccccgatcaacctcaccacctcttgctcagcctatataccgccatcttcagcaaaccctgatgaaggctacaaagtaagcgcaagtacccacgtaaagacgttaggtcaaggtgtagcccatgaggtggcaagaaatgggctacattttctaccccagaaaactacgatagcccttatgaaacttaagggtcgaaggtggatttagcagtaaactgagagtagagtgcttagttgaacagggccctgaagcgcgtacacaccgcccgtcaccctcctcaagtatacttcaaaggacatttaactaaaacccctacgcatttatatagaggagacaagtcgtaacatggtaagtgtactggaaagtgcacttggacgaaccagagtgtagcttaacacaaagcacccaacttacacttaggagatttcaacttaacttgaccgctctgagctaaacctagccccaaacccactccaccttactaccagacaaccttagccaaaccatttacccaaataaagtataggcgatagaaattgaaacctggcgcaatagatatagtaccgcaagggaaagatgaaaaattataaccaagcataatatagcaaggactaacccctataccttctgcataatgaattaactagaaataactttgcaaggagagccaaagctaagacccccgaaaccagacgagctacctaagaacagctaaaagagcacacccgtctatgtagcaaaatagtgggaagatttataggtagaggcgacaaacctaccgagcctggtgatagctggttgtccaagatagaatcttagttcaactttaaatttgcccacagaaccctctaaatccccttgtaaatttaactgttagtccaaagaggaacagctctttggacactaggaaaaaaccttgtagagagagtaaaaaatttaacacccatagtaggcctaaaagcagccaccaattaagaaagcgttcaagctcaacacccactacctaaaaaatcccaaacatataactgaactcctcacacccaattggaccaatctatcaccctatagaagaactaatgttagtataagtaacatgaaaacattctcctccgcataagcctgcgtcagattaaaacactgaactgacaattaacagcccaatatctacaatcaaccaacaagtcattattaccctcactgtcaacccaacacaggcatgctcataaggaaaggttaaaaaaagtaaaaggaactcggcaaatcttaccccgcctgtttaccaaaaacatcacctctagcatcaccagtattagaggcaccgcctgcccagtgacacatgtttaacggccgcggtaccctaaccgtgcaaaggtagcataatcacttgttccttaaatagggacctgtatgaatggctccacgagggttcagctgtctcttacttttaaccagtgaaattgacctgcccgtgaagaggcgggcatgacacagcaagacgagaagaccctatggagctttaatttattaatgcaaacagtacctaacaaacccacaggtcctaaactaccaaacctgcattaaaaatttcggttggggcgacctcggagcagaacccaacctccgagcagtacatgctaagacttcaccagtcaaagcgaactactatactcaattgatccaataacttgaccaacggaacaagttaccctagggataacagcgcaatcctattctagagtccatatcaacaatagggtttacgacctcgatgttggatcaggacatcccgatggtgcagccgctattaaaggttcgtttgttcaacgattaaagtcctacgtgatctgagttcagaccggagtaatccaggtcggtttctatctacnttcaaattcctccctgtacgaaaggacaagagaaataaggcctacttcacaaagcgccttcccccgtaaatgatatcatctcaacttagtattatacccacacccacccaagaacagggtttgttaagatggcagagcccggtaatcgcataaaacttaaaactttacagtcagaggttcaattcctcttcttaacaacatacccatggccaacctcctactcctcattgtacccattctgatcgcaatggcattcctaatgcttaccgaacgaaaaattctaggctatatacaactacgcaaaggccccaacgttgtaggcccctacgggctactacaacccttcgctgacgccataaaactcttcaccaaagagcccctaaaacccgccacatctaccatcaccctctacatcaccgccccgaccttagctctcaccatcgctcttctactatgaacccccctccccatacccaaccccctggtcaacctcaacctaggcctcctatttattctagccacctctagcctagccgtttactcaatcctctgatcagggtgagcatcaaactcaaactacgccctgatcggcgcactgcgagcagtagcccaaacaatctcatatgaagtcaccctagccatcattctactatcaacattactaataagtggctcctttaacctctccacccttatcacaacacaagaacacctctgattactcctgccatcatgacccttggccataatatgatttatctccacactagcagagaccaaccgaacccccttcgaccttgccgaaggggagtccgaactagtctcaggcttcaacatcgaatacgccgcaggccccttcgctctattcttcatagccgaatacacaaacattattataataaacaccctcaccactacaatcttcctaggaacaacatatgacgcactctcccctgaactctacacaacatattttgtcaccaagaccctacttctaacctccctgttcttatgaattcgaacagcatacccccgattccgctacgaccaactcatacacctccaatgaaaaaacttcctaccactcaccctagcattacttatatgatatgtctccatacccattacaatctccagcattccccctcaaacctaagaaatatgtctgataaaagagttactttgatagagtaaataataggagcttaaacccccttatttctaggactatgagaatcgaacccatccctgagaatccaaaattctccgtgccacctatcacaccccatcctaaagtaaggtcagctaaataagctatcgggcccataccccgaaaatgttggttatacccttcccgtactaattaatcccctggcccaacccgtcatctactctaccatctttgcaggcacactcatcacagcgctaagctcgcactgattttttacctgagtaggcctagaaataaacatgctagcttttattccagttctaaccaaaaaaataaaccctcgttccacagaagctgccatcaagtatttcctcacgcaagcaaccgcatccataatccttctaatagctatcctcttcaacaatatactctccggacaatgaaccataaccaatactaccaatcaatactcatcattaataatcataatggctatagcaataaaactaggaatagccccctttcacttctgagtcccagaggttacccaaggcacccctctgacatccggcctgcttcttctcacatgacaaaaactagcccccatctcaatcatataccaaatctctccctcactaaacgtaagccttctcctcactctctcaatcttatccatcatagcaggcagttgaggtggattaaaccaaacccagctacgcaaaatcttagcatactcctcaattacccacataggatgaataatagcagttctaccgtacaaccctaacataaccattcttaatttaactatttatattatcctaactactaccgcattcctactactcaacttaaactccagcaccacgaccctactactatctcgcacctgaaacaagctaacatgactaacacccttaattccatccaccctcctctccctaggaggcctgcccccgctaaccggctttttgcccaaatgggccattatcgaagaattcacaaaaaacaatagcctcatcatccccaccatcatagccaccatcaccctccttaacctctacttctacctacgcctaatctactccacctcaatcacactactccccatatctaacaacgtaaaaataaaatgacagtttgaacatacaaaacccaccccattcctccccacactcatcgcccttaccacgctactcctacctatctccccttttatactaataatcttatagaaatttaggttaaatacagaccaagagccttcaaagccctcagtaagttgcaatacttaatttctgtaacagctaaggactgcaaaaccccactctgcatcaactgaacgcaaatcagccactttaattaagctaagcccttactagaccaatgggacttaaacccacaaacacttagttaacagctaagcaccctaatcaactggcttcaatctacttctcccgccgccgggaaaaaaggcgggagaagccccggcaggtttgaagctgcttcttcgaatttgcaattcaatatgaaaatcacctcggagctggtaaaaagaggcctaacccctgtctttagatttacagtccaatgcttcactcagccattttacctcacccccactgatgttcgccgaccgttgactattctctacaaaccacaaagacattggaacactatacctattattcggcgcatgagctggagtcctaggcacagctctaagcctccttattcgagccgagctgggccagccaggcaaccttctaggtaacgaccacatctacaacgttatcgtcacagcccatgcatttgtaataatcttcttcatagtaatacccatcataatcggaggctttggcaactgactagttcccctaataatcggtgcccccgatatggcgtttccccgcataaacaacataagcttctgactcttacctccctctctcctactcctgctcgcatctgctatagtggaggccggagcaggaacaggttgaacagtctaccctcccttagcagggaactactcccaccctggagcctccgtagacctaaccatcttctccttacacctagcaggtgtctcctctatcttaggggccatcaatttcatcacaacaattatcaatataaaaccccctgccataacccaataccaaacgcccctcttcgtctgatccgtcctaatcacagcagtcctacttctcctatctctcccagtcctagctgctggcatcactatactactaacagaccgcaacctcaacaccaccttcttcgaccccgccggaggaggagaccccattctataccaacacctattctgatttttcggtcaccctgaagtttatattcttatcctaccaggcttcggaataatctcccatattgtaacttactactccggaaaaaaagaaccatttggatacataggtatggtctgagctatgatatcaattggcttcctagggtttatcgtgtgagcacaccatatatttacagtaggaatagacgtagacacacgagcatatttcacctccgctaccataatcatcgctatccccaccggcgtcaaagtatttagctgactcgccacactccacggaagcaatatgaaatgatctgctgcagtgctctgagccctaggattcatctttcttttcaccgtaggtggcctgactggcattgtattagcaaactcatcactagacatcgtactacacgacacgtactacgttgtagctcacttccactatgtcctatcaataggagctgtatttgccatcataggaggcttcattcactgatttcccctattctcaggctacaccctagaccaaacctacgccaaaatccatttcactatcatattcatcggcgtaaatctaactttcttcccacaacactttctcggcctatccggaatgccccgacgttactcggactaccccgatgcatacaccacatgaaacatcctatcatctgtaggctcattcatttctctaacagcagtaatattaataattttcatgatttgagaagccttcgcttcgaagcgaaaagtcctaatagtagaagaaccctccataaacctggagtgactatatggatgccccccaccctaccacacattcgaagaacccgtatacataaaatctagacaaaaaaggaaggaatcgaaccccccaaagctggtttcaagccaaccccatggcctccatgactttttcaaaaaggtattagaaaaaccatttcataactttgtcaaagttaaattataggctaaatcctatatatcttaatggcacatgcagcgcaagtaggtctacaagacgctacttcccctatcatagaagagcttatcacctttcatgatcacgccctcataatcattttccttatctgcttcctagtcctgtatgcccttttcctaacactcacaacaaaactaactaatactaacatctcagacgctcaggaaatagaaaccgtctgaactatcctgcccgccatcatcctaatcctcatcgccctcccatccctacgcatcctttacataacagacgaggtcaacgatccctcccttaccatcaaatcaattggccaccaatggtactgaacctacgagtacaccgactacggcggactaatcttcaactcctacatacttcccccattattcctagaaccaggcgacctgcgactccttgacgttgacaatcgagtagtactcccgattgaagcccccattcgtataataattacatcacaagacgtcttgcactcatgagctgtccccacattaggcttaaaaacagatgcaattcccggacgtctaaaccaaaccactttcaccgctacacgaccgggggtatactacggtcaatgctctgaaatctgtggagcaaaccacagtttcatgcccatcgtcctagaattaattcccctaaaaatctttgaaatagggcccgtatttaccctatagcaccccctctaccccctctagagcccactgtaaagctaacttagcattaaccttttaagttaaagattaagagaaccaacacctctttacagtgaaatgccccaactaaatactaccgtatggcccaccataattacccccatactccttacactattcctcatcacccaactaaaaatattaaacacaaactaccacctacctccctcaccaaagcccataaaaataaaaaattataacaaaccctgagaaccaaaatgaacgaaaatctgttcgcttcattcattgcccccacaatcctaggcctacccgccgcagtactgatcattctatttccccctctattgatccccacctccaaatatctcatcaacaaccgactaatcaccacccaacaatgactaatcaaactaacctcaaaacaaatgataaccatacacaacactaaaggacgaacctgatctcttatactagtatccttaatcatttttattgccacaactaacctcctcggactcctgcctcactcatttacaccaaccacccaactatctataaacctagccatggccatccccttatgagcgggcgcagtgattataggctttcgctctaagattaaaaatgccctagcccacttcttaccacaaggcacacctacaccccttatccccatactagttattatcgaaaccatcagcctactcattcaaccaatagccctggccgtacgcctaaccgctaacattactgcaggccacctactcatgcacctaattggaagcgccaccctagcaatatcaaccattaaccttccctctacacttatcatcttcacaattctaattctactgactatcctagaaatcgctgtcgccttaatccaagcctacgttttcacacttctagtaagcctctacctgcacgacaacacataatgacccaccaatcacatgcctatcatatagtaaaacccagcccatgacccctaacaggggccctctcagccctcctaatgacctccggcctagccatgtgatttcacttccactccataacgctcctcatactaggcctactaaccaacacactaaccatataccaatgatggcgcgatgtaacacgagaaagcacataccaaggccaccacacaccacctgtccaaaaaggccttcgatacgggataatcctatttattacctcagaagtttttttcttcgcaggatttttctgagccttttaccactccagcctagcccctaccccccaattaggagggcactggcccccaacaggcatcaccccgctaaatcccctagaagtcccactcctaaacacatccgtattactcgcatcaggagtatcaatcacctgagctcaccatagtctaatagaaaacaaccgaaaccaaataattcaagcactgcttattacaattttactgggtctctattttaccctcctacaagcctcagagtacttcgagtctcccttcaccatttccgacggcatctacggctcaacattttttgtagccacaggcttccacggacttcacgtcattattggctcaactttcctcactatctgcttcatccgccaactaatatttcactttacatccaaacatcactttggcttcgaagccgccgcctgatactggcattttgtagatgtggtttgactatttctgtatgtctccatctattgatgagggtcttactcttttagtataaatagtaccgttaacttccaattaactagttttgacaacattcaaaaaagagtaataaacttcgccttaattttaataatcaacaccctcctagccttactactaataattattacattttgactaccacaactcaacggctacatagaaaaatccaccccttacgagtgcggcttcgaccctatatcccccgcccgcgtccctttctccataaaattcttcttagtagctattaccttcttattatttgatctagaaattgccctccttttacccctaccatgagccctacaaacaactaacctgccactaatagttatgtcatccctcttattaatcatcatcctagccctaagtctggcctatgagtgactacaaaaaggattagactgaaccgaattggtatatagtttaaacaaaacgaatgatttcgactcattaaattatgataatcatatttaccaaatgcccctcatttacataaatattatactagcatttaccatctcacttctaggaatactagtatatcgctcacacctcatatcctccctactatgcctagaaggaataatactatcgctgttcattatagctactctcataaccctcaacacccactccctcttagccaatattgtgcctattgccatactagtctttgccgcctgcgaagcagcggtgggcctagccctactagtctcaatctccaacacatatggcctagactacgtacataacctaaacctactccaatgctaaaactaatcgtcccaacaattatattactaccactgacatgactttccaaaaaacacataatttgaatcaacacaaccacccacagcctaattattagcatcatccctctactattttttaaccaaatcaacaacaacctatttagctgttccccaaccttttcctccgaccccctaacaacccccctcctaatactaactacctgactcctacccctcacaatcatggcaagccaacgccacttatccagtgaaccactatcacgaaaaaaactctacctctctatactaatctccctacaaatctccttaattataacattcacagccacagaactaatcatattttatatcttcttcgaaaccacacttatccccaccttggctatcatcacccgatgaggcaaccagccagaacgcctgaacgcaggcacatacttcctattctacaccctagtaggctcccttcccctactcatcgcactaatttacactcacaacaccctaggctcactaaacattctactactcactctcactgcccaagaactatcaaactcctgagccaacaacttaatatgactagcttacacaatagcttttatagtaaagatacctctttacggactccacttatgactccctaaagcccatgtcgaagcccccatcgctgggtcaatagtacttgccgcagtactcttgaaactaggcggctatggtataatacgcctcacactcattctcaaccccctgacaaaacacatagcctaccccttccttgtactatccctatgaggcataattataacaagctccatctgcctacgacaaacagacctaaaatcgctcattgcatactcttcaatcagccacatagccctcgtagtaacagccattctcatccaaaccccctgaagcttcaccggcgcagtcattctcataatcgcccacggacttacatcctcattactattctgcctagcaaactcaaactacgaacgcactcacagtcgcatcataatcctctctcaaggacttcaaactctactcccactaatagctttttgatgacttctagcaagcctcgctaacctcgccttaccccccactattaacctactgggagaactctctgtgctagtaaccacgttctcctgatcaaatatcactcttctacttacaggactcaacatactagtcacagccctatactccctctacatatttaccacaacacaatggggctcactcacccaccacattaacaacataaaaccctcattcacacgagaaaacaccctcatgttcatacacctatcccccattctcctcctatccctcaaccccgacatcattaccgggttttcctcttgtaaatatagtttaaccaaaacatcagattgtgaatctgacaacagaggcttacgaccccttatttaccgagaaagctcacaagaactgctaactcatgcccccatgtctaacaacatggctttctcaacttttaaaggataacagctatccattggtcttaggccccaagaattttggtgcaactccaaataaaagtaataaccatgcacactactataaccaccctaaccctaacttccctaattccccccatccttaccaccctcgttaaccctaacaaaaaaaactcatacccccattatgtaaaatccattgtcgcatccacctttattatcagtctcttccccacaacaatattcatgtgcctagaccaagaagttattatctcgaactgacactgagccacaacccaaacaacccagctctccctaagcttcaaactagactacttctccataatattcatccctgtagcattgttcgttacatggtccatcatagaattctcactgtgatatataaactcagacccaaacattaatcagttcttcaaatatctactcatcttcctaattaccatactaatcttagttaccgctaacaacctattccaactgttcatcggctgagagggcgtaggaattatatccttcttgctcatcagttgatgatacgcccgagcagatgccaacacagcagccattcaagcaatcctatacaaccgtatcggcgatatcggtttcatcctcgccttagcatgatttatcctacactccaactcatgagacccacaacaaatagcccttctaaacgctaatccaagcctcaccccactactaggcctcctcctagcagcagcaggcaaatcagcccaattaggtctccacccctgactcccctcagccatagaaggccccaccccagtctcagctctactccactcaagcactatagttgtagcaggaatcttcttactcatccgcttccaccccctagcagaaaatagcccactaatccaaactctaacactatgcttaggcgctatcaccactctgttcgcagcagtctgcgcccttacacaaaatgacatcaaaaaaatcgtagccttctccacttcaagtcaactaggactcataatagttacaatcggcatcaaccaaccacacctagcattcctgcacatctgtacccacgccttcttcaaagccatactatttatgtgctccgggtccatcatccacaaccttaacaatgaacaagatattcgaaaaataggaggactactcaaaaccatacctctcacttcaacctccctcaccattggcagcctagcattagcaggaatacctttcctcacaggtttctactccaaagaccacatcatcgaaaccgcaaacatatcatacacaaacgcctgagccctatctattactctcatcgctacctccctgacaagcgcctatagcactcgaataattcttctcaccctaacaggtcaacctcgcttccccacccttactaacattaacgaaaataaccccaccctactaaaccccattaaacgcctggcagccggaagcctattcgcaggatttctcattactaacaacatttcccccgcatcccccttccaaacaacaatccccctctacctaaaactcacagccctcgctgtcactttcctaggacttctaacagccctagacctcaactacctaaccaacaaacttaaaataaaatccccactatgcacattttatttctccaacatactcggattctaccctagcatcacacaccgcacaatcccctatctaggccttcttacgagccaaaacctgcccctactcctcctagacctaacctgactagaaaagctattacctaaaacaatttcacagcaccaaatctccacctccatcatcacctcaacccaaaaaggcataattaaactttacttcctctctttcttcttcccactcatcctaaccctactcctaatcacataacctattcccccgagcaatctcaattacaatgtatacaccaacaaacaatgttcaaccagtaactactactaatcaacgcccataatcatacaaagcccccgcaccaataggatcctcccgaatcaaccctgacccctctccttcataaattattcagcttcctacactattaaagtttaccacaaccaccaccccatcatactctttcacccacagcaccaatcctacctccatcgctaaccccactaaaacactcaccaagacctcaacccctgacccccatgcctcaggatactcctcaatagccatcgctgtagtatatccaaagacaaccatcattccccctaaataaattaaaaaaactattaaacccatataacctcccccaaaattcagaataataacacacccgaccacaccgctaacaatcaatactaaacccccataaataggagaaggcttagaagaaaaccccacaaaccccattactaaacccacactcaacagaaacaaagcatacatcattattctcgcacggactacaaccacgaccaatgatatgaaaaaccatcgttgtatttcaactacaagaacaccaatgaccccaatacgcaaaattaaccccctaataaaattaattaaccactcattcatcgacctccccaccccatccaacatctccgcatgatgaaacttcggctcactccttggcgcctgcctgatcctccaaatcaccacaggactattcctagccatgcactactcaccagacgcctcagccgccttttcatcaatcgcccacatcactcgagacgtaaattatggctgaatcatccgctaccttcacgccaatggcgcctcaatattctttatctgcctcttcctacacatcgggcgaggcctatattacggatcatttctctactcagaaacctgaaacatcggcattatcctcctgcttgcaactatagcaacagccttcataggctatgtcctcccgtgaggccaaatatcattctgaggggccacagtaattacaaacttactatccgccatcccatacattgggacagacctagttcaatgaatctgaggaggctactcagtagacagtcccaccctcacacgattctttacctttcacttcatcttgcccttcattattgcagccctagcagcactccacctcctattcttgcacgaaacgggatcaaacaaccccctaggaatcacctcccattccgataaaatcaccttccacccttactacacaatcaaagacgccctcggcttacttctcttccttctctccttaatgacattaacactattctcaccagacctcctaggcgacccagacaattataccctagccaaccccttaaacacccctccccacatcaagcccgaatgatatttcctattcgcctacacaattctccgatccgtccctaacaaactaggaggcgtccttgccctattactatccatcctcatcctagcaataatccccatcctccatatatccaaacaacaaagcataatatttcgcccactaagccaatcactttattgactcctagccgcagacctcctcattctaacctgaatcggaggacaaccagtaagctacccttttaccatcattggacaagtagcatccgtactatacttcacaacaatcctaatcctaataccaactatctccctaattgaaaacaaaatactcaaatgggcctgtccttgtagtataaactaatacaccagtcttgtaaaccggagatgaaaacctttttccaaggacaaatcagagaaaaagtctttaactccaccattagcacccaaagctaagattctaatttaaactattctctgttctttcatggggaagcagatttgggtaccacccaagtattgactcacccatcaacaaccgctatgtatttcgtacattactgccagccaccatgaatattgtacggtaccataaatacttgaccacctgtagtacataaaaacccaacccacatcaaacccccccccccatgcttacaagcaagtacagcaatcgaccctcaactatcacacattaactgcaactccaaagccacccctcacccactaggatatcaacaaacctacccacccttaacagtacatagtacataaagccatttaccgtacatagcacattacagtcaaatcccttctcgtccccatggatgacccccctcagataggggtcccttgaccaccatcctccgtgaaatcaatatcccgcacaagagtgctactctcctcgctccgggcccataacacttgggggtagctaaagtgaactgtatccgacatctggttcctacttcagggtcataaagcctaaatagcccacacgttccccttaaataagacatcacgatg

SEQ ID NO: 231 - DNA, 16571 bp, Homo sapiens mitochondrial
  3109: "n" refers to a nucleotide at position 3107 of the Cambridge Reference Sequence (CRS, Anderson et al. 1981 Nature 290:457-465), later determined to be absent from the human mtDNA sequence according to the revised CRS (rCRS, Andrews et al. 1999 Nature Genetics 23:147); "n" therefore represents a single nucleotide deletion at a position corresponding to nucleotide 3107 of SEQ ID NO:1 as provided herein.
gatcacaggtctatcaccctattaaccactcacgggagctctccatgcatttggtattttcgtctggggggtgtgcacgcgatagcattgcgagacgctggagccggagcaccctatgtcgcagtatctgtctttgattcctgcctcatcctattatttatcgcacctacgttcaatattacaggcgaacatacttaccaaagtgtgttaattaattaatgcttgtaggacataataataacaattgaacgtctgcacagccgctttccacacagacatcataacaaaaaatttccaccaaaccccccctcccccccgcttctggccacagcacttaaacacatctctgccaaaccccaaaaacaaagaaccctaacaccagcctaaccagatttcaaattttatcttttggcggtatgcacttttaacagtcaccccccaactaacacattattttcccctcccactcccatactactaatctcatcaatacaacccccgcccatcctacccagcacacacacaccgctgctaaccccataccccgaaccaaccaaaccccaaagacaccccccacagtttatgtagcttacctcctcaaagcaatacactgaaaatgtttagacgggctcacatcaccccataaacaaataggtttggtcctagcctttctattagctcttagtaagattacacatgcaagcatccccgttccagtgagttcaccctctaaatcaccacgatcaaaagggacaagcatcaagcacgcagcaatgcagctcaaaacgcttagcctagccacacccccacgggaaacagcagtgattaacctttagcaataaacgaaagtttaactaagctatactaaccccagggttggtcaatttcgtgccagccaccgcggtcacacgattaacccaagtcaatagaagccggcgtaaagagtgttttagatcaccccctccccaataaagctaaaactcacctgagttgtaaaaaactccagttgacacaaaatagactacgaaagtggctttaacatatctgaacacacaatagctaagacccaaactgggattagataccccactatgcttagccctaaacctcaacagttaaatcaacaaaactgctcgccagaacactacgagccacagcttaaaactcaaaggacctggcggtgcttcatatccctctagaggagcctgttctgtaatcgataaaccccgatcaacctcaccacctcttgctcagcctatataccgccatcttcagcaaaccctgatgaaggctacaaagtaagcgcaagtacccacgtaaagacgttaggtcaaggtgtagcccatgaggtggcaagaaatgggctacattttctaccccagaaaactacgatagcccttatgaaacttaagggtcgaaggtggatttagcagtaaactaagagtagagtgcttagttgaacagggccctgaagcgcgtacacaccgcccgtcaccctcctcaagtatacttcaaaggacatttaactaaaacccctacgcatttatatagaggagacaagtcgtaacatggtaagtgtactggaaagtgcacttggacgaaccagagtgtagcttaacacaaagcacccaacttacacttaggagatttcaacttaacttgaccgctctgagctaaacctagccccaaacccactccaccttactaccagacaaccttaaccaaaccatttacccaaataaagtataggcgatagaaattgaaacctggcgcaatagatatagtaccgcaagggaaagatgaaaaattataaccaagcataatatagcaaggactaacccctataccttctgcataatgaattaactagaaataactttgcaaggagagccaaagctaagacccccgaaaccagacgagctacctaagaacagctaaaagagcacacccgtctatgtagcaaaatagtgggaagatttataggtagaggcgacaaacctaccgagcctggtgatagctggttgtccaagatagaatcttagttcaactttaaatttgcccacagaaccctctaaatccccttgtaaatttaactgttagtccaaagaggaacagctctttggacactaggaaaaaaccttgtagagagagtaaaaaatttaacacccatagtaggcctaaaagcagccaccaattaagaaagcgttcaagctcaacacccactacctaaaaaatcccaaacatataactgaactcctcacacccaattggaccaatctatcaccctatagaagaactaatgttagtataagtaacatgaaaacattctcctccgcataagcctgcgtcagattaaaacactgaactgacaattaacagcccaatatctacaatcaaccaacaagtcattattaccctcactgtcaacccaacacaggcatgctcataaggaaaggttaaaaaaagtaaaaggaactcggcaaatcttaccccgcctgtttaccaaaaacatcacctctagcatcaccagtattagaggcaccgcctgcccagtgacacatgtttaacggccgcggtaccctaaccgtgcaaaggtagcataatcacttgttccttaaatagggacctgtatgaatggctccacgagggttcagctgtctcttacttttaaccagtgaaattgacctgcccgtgaagaggcgggcatgacacagcaagacgagaagaccctatggagctttaatttattaatgcaaacagtacctaacaaacccacaggtcctaaactaccaaacctgcattaaaaatttcggttggggcgacctcggagcagaacccaacctccgagcagtacatgctaagacttcaccagtcaaagcgaactactatactcaattgatccaataacttgaccaacggaacaagttaccctagggataacagcgcaatcctattctagagtccatatcaacaatagggtttacgacctcgatgttggatcaggacatcccgatggtgcagccgctattaaaggttcgtttgttcaacgattaaagtcctacgtgatctgagttcagaccggagtaatccaggtcggtttctatctacnttcaaattcctccctgtacgaaaggacaagagaaataaggcctacttcacaaagcgccttcccccgtaaatgatatcatctcaacttagtattatacccacacccacccaagaacagggtttgttaagatggcagagcccggtaatcgcataaaacttaaaactttacagtcagaggttcaattcctcttcttaacaacatacccatggccaacctcctactcctcattgtacccattctaatcgcaatggcattcctaatgcttaccgaacgaaaaattctaggctatatacaactacgcaaaggccccaacgttgtaggcccctacgggctactacaacccttcgctgacgccataaaactcttcaccaaagagcccctaaaacccgccacatctaccatcaccctctacatcaccgccccgaccttagctctcaccatcgctcttctactatgaacccccctccccatacccaaccccctggtcaacctcaacctaggcctcctatttattctagccacctctagcctagccgtttactcaatcctctgatcagggtgagcatcaaactcaaactacgccctgatcggcgcactgcgagcagtagcccaaacaatctcatatgaagtcaccctagccatcattctactatcaacattactaataagtggctcctttaacctctccacccttatcacaacacaagaacacctctgattactcctgccatcatgacccttggccataatatgatttatctccacactagcagagaccaaccgaacccccttcgaccttgccgaaggggagtccgaactagtctcaggcttcaacatcgaatacgccgcaggccccttcgccctattcttcatagccgaatacacaaacattattataataaacaccctcaccactacaatcttcctaggaacaacatatgacgcactctcccctgaactctacacaacatattttgtcaccaagaccctacttctaacctccctgttcttatgaattcgaacagcatacccccgattccgctacgaccaactcatacacctcctatgaaaaaacttcctaccactcaccctagcattacttatatgatatgtctccatacccattacaatctccagcattccccctcaaacctaagaaatatgtctgataaaagagttactttgatagagtaaataataggagcttaaacccccttatttctaggactatgagaatcgaacccatccctgagaatccaaaattctccgtgccacctatcacaccccatcctaaagtaaggtcagctaaataagctatcgggcccataccccgaaaatgttggttatacccttcccgtactaattaatcccctggcccaacccgtcatctactctaccatctttgcaggcacactcatcactgcgctaagctcgcactgattttttacctgagtaggcctagaaataaacatgctagcttttattccagttctaaccaaaaaaataaaccctcgttccacagaagctgccatcaagtatttcctcacgcaagcaaccgcatccataatccttctaatagctatcctcttcaacaatatactctccggacaatgaaccataaccaatactaccaatcaatactcatcattaataatcataatggctatagcaataaaactaggaatagccccctttcacttctgagtcccagaggttacccaaggcacccctctgacatccggcctgcttcttctcacatgacaaaaactagcccccatctcaatcatataccaaatctctccctcactaaacgtaagccttctcctcactctctcaatcttatccatcatagcaggcagttgaggtggattaaaccaaacccagctacgcaaaatcttagcatactcctcaattacccacataggatgaataatagcagttctaccgtacaaccctaacataaccattcttaatttaactatttatattatcctaactactaccgcattcctactactcaacttaaactccagcaccacgaccctactactatctcgcacctgaaacaagctaacatgactaacacccttaattccatccaccctcctctccctaggaggcctgcccccgctaaccggctttttgcccaaatgggccattatcgaagaattcacaaaaaacaatagcctcatcatccccaccatcatagccaccatcaccctccttaacctctacttctacctacgcctaatctactccacctcaatcacactactccccatatctaacaacgtaaaaataaaatgacagtttgaacatacaaaacccaccccattcctccccacactcatcgcccttaccacgctactcctacctatctccccttttatactaataatcttatagaaatttaggttaaatacagaccaagagccttcaaagccctcagtaagttgcaatacttaatttctgtaacagctaaggactgcaaaaccccactctgcatcaactgaacgcaaatcagccactttaattaagctaagcccttgctagaccaatgggacttaaacccacaaacacttagttaacagctaagcaccctaatcaactggcttcaatctacttctcccgccgccgggaaaaaaggcgggagaagccccggcaggtttgaagctgcttcttcgaatttgcaattcaatatgaaaatcacctcggagctggtaaaaagaggcctaacccctgtctttagatttacagtccaatgcttcactcagccattttacctcacccccactgatgttcgccgaccgttgactattctctacaaaccacaaagacattggaacactatacctattattcggcgcatgagctggagtcctaggcacagctctaagcctccttattcgagccgagctgggccagccaggcaaccttctaggtaacgaccacatctacaacgttatcgtcacagcccatgcatttgtaataatcttcttcatagtaatacccatcataatcggaggctttggcaactgactagttcccctaataatcggtgcccccgatatggcgtttccccgcataaacaacataagcttctgactcttacctccctctctcctactcctgctcgcatctgctatagtggaggccggagcaggaacaggttgaacagtctaccctcccttagcagggaactactcccaccctggagcctccgtagacctaaccatcttctccttacacctagcaggtgtctcctctatcttaggggccatcaatttcatcacaacaattatcaatataaaaccccctgccataacccaataccaaacgcccctcttcgtctgatccgtcctaatcacagcagtcctacttctcctatctctcccagtcctagctgctggcatcactatactactaacagaccgcaacctcaacaccaccttcttcgaccccgccggaggaggagaccccattctataccaacacctattctgatttttcggtcaccctgaagtttatattcttatcctaccaggcttcggaataatctcccatattgtaacttactactccggaaaaaaagaaccatttggatacataggtatggtctgagctatgatatcaattggcttcctagggtttatcgtgtgagcacaccatatatttacagtaggaatagacgtagacacacgagcatatttcacctccgctaccataatcatcgctatccccaccggcgtcaaagtatttagctgactcgccacactccacggaagcaatatgaaatgatctgctgcagtgctctgagccctaggattcatctttcttttcaccgtaggtggcctgactggcattgtattagcaaactcatcactagacatcgtactacacgacacgtactacgttgtagctcacttccactatgtcctatcaataggagctgtatttgccatcataggaggcttcattcactgatttcccctattctcaggctacaccctagaccaaacctacgccaaaatccatttcactatcatattcatcggcgtaaatctaactttcttcccacaacactttctcggcctatccggaatgccccgacgttactcggactaccccgatgcatacaccacatgaaacatcctatcatctgtaggctcattcatttctctaacagcagtaatattaataattttcatgatttgagaagccttcgcttcgaagcgaaaagtcctaatagtagaagaaccctccataaacctggagtgactatatggatgccccccaccctaccacacattcgaagaacccgtatacataaaatctagacaaaaaaggaaggaatcgaaccccccaaagctggtttcaagccaaccccatggcctccatgactttttcaaaaaggtattagaaaaaccatttcataactttgtcaaagttaaattataggctaaatcctatatatcttaatggcacatgcagcgcaagtaggtctacaagacgctacttcccctatcatagaagagcttatcacctttcatgatcacgccctcataatcattttccttatctgcttcctagtcctgtatgcccttttcctaacactcacaacaaaactaactaatactaacatctcagacgctcaagaaatagaaaccgtctgaactatcctgcccgccatcatcctagtcctcatcgccctcccatccctacgcatcctttacataacagacgaggtcaacgatccctcccttaccatcaaatcaattggccaccaatggtactgaacctacgagtacaccgactacggcggactaatcttcaactcctacatacttcccccattattcctagaaccaggcgacctgcgactccttgacgttgacaatcgagtagtactcccgattgaagcccccattcgtataataattacatcacaagacgtcttgcactcatgagctgtccccacattaggcttaaaaacagatgcaattcccggacgtctaaaccaaaccactttcaccgctacacgaccgggggtatactacggtcaatgctctgaaatctgtggagcaaaccacagtttcatgcccatcgtcctagaattaattcccctaaaaatctttgaaataggacccgtatttaccctatagcaccccctctaccccctctagagcccactgtaaagctaacttagcattaaccttttaagttaaagattaagagaaccaacacctctttacagtgaaatgccccaactaaatactaccgtatggcccaccataattacccccatactccttacactattcctcatcacccaactaaaaatattaaacacaaactaccacctacctccctcaccaaagcccataaaaataaaaaattataacaaaccctgaaaaccaaaatgaacgaaaatctgttcgcttcattcattgcccccacaatcctaggcctacccgccgcagtactgatcattctatttccccctctattgatccccacctccaaatatctcatcaacaaccgactaatcaccacccaacaatgactaatcaaactaacctcaaaacaaataataaccatacacaacactaaaggacgaacctgatctcttatactagtatccttaatcatttttattgccacaactaacctcctcggactcctgcctcactcatttacaccaaccacccaactatctataaacctagccatggccatccccttatgagcgggcgcagtgattataggctttcgctctaagattaaaaatgccctagcccacttcttaccacaaggcacacctacaccccttatccccatactagttattatcgaaaccatcagcctactcattcaaccaatagccctggccgtacgcctaaccgctaacattactgcaggccacctactcatgcacctaattggaagcgccaccctagcaatatcaaccattaaccttccctctacacttatcatcttcacaattctaattctactgactatcctagaaatcgctgtcgccttaatccaagcctacgttttcacacttctagtaagcctctacctgcacgacaacacataatgacccaccaatcacatgcctatcatatagtaaaacccagcccatgacccctaacaggggccctctcagccctcctaatgacctccggcctagccatgtgatttcacttccactccataacgctcctcatactaggcctactaaccaacacactaaccatataccaatgatggcgcgatgtaacacgagaaagcacataccaaggccaccacacaccacctgtccaaaaaggccttcgatacgggataatcctatttattacctcagaagtttttttcttcgcaggatttttctgagccttttaccactccagcctagcccctaccccccaattaggagggcactggcccccaacaggcatcaccccgctaaatcccctagaagtcccactcctaaacacatccgtattactcgcatcaggagtatcaatcacctgagctcaccatagtctaatagaaaacaaccgaaaccaaataattcaagcactgcttattacaattttactgggtctctattttaccctcctacaagcctcagagtacttcgagtctcccttcaccatttccgacggcatctacggctcaacattttttgtagccacaggcttccacggacttcacgtcattattggctcaactttcctcactatctgcttcatccgccaactaatatttcactttacatccaaacatcactttggcttcgaagccgccgcctgatactggcattttgtagatgtggtttgactatttctgtatgtctccatctattgatgagggtcttactcttttagtataaatagtaccgttaacttccaattaactagctttgacaacattcaaaaaagagtaataaacttcgccttaattttaataatcaacaccctcctagccttactactaataattattacattttgactaccacaactcaacggctacatagaaaaatccaccccttacgagtgcggcttcgaccctatatcccccgcccgcgtccctttctccataaaattcttcttagtagctatcaccttcttattatttgatctagaaattgccctccttttacccctaccatgagccctacaaacaactaacctgccactaatagttatgtcatccctcttattaatcatcatcctagccctaagtctggcctatgagtgactacaaaaaggattagactgagccgaattggtatatagtttaaacaaaacgaatgatttcgactcattaaattatgataatcatatttaccaaatgcccctcatttacataaatattatactagcatttaccatctcacttctaggaatactagtatatcgctcacacctcatatcctccctactatgcctagaaggaataatactatcgctgttcattatagctactctcataaccctcaacacccactccctcttagccaatattgtgcctattgccatactagtctttgccgcctgcgaagcagcggtgggcctagccctactagtctcaatctccaacacatatggcctagactacgtacataacctaaacctactccaatgctaaaactaatcgtcccaacaattatattactaccactgacatgactttccaaaaagcacataatttgaatcaacacaaccacccacagcctaattattagcatcatccctctactattttttaaccaaatcaacaacaacctatttagctgttccccaaccttttcctccgaccccctaacaacccccctcctaatactaactacctgactcctacccctcacaatcatggcaagccaacgccacttatccagtgaaccactatcacgaaaaaaactctacctctctatactaatctccctacaaatctccttaattataacattcacagccacagaactaatcatattttatatcttcttcgaaaccacacttatccccaccttggctatcatcacccgatgaggcaaccagccagaacgcctgaacgcaggcacatacttcctattctacaccctagtaggctcccttcccctactcatcgcactaatttacactcacaacaccctaggctcactaaacattctactactcactctcactgcccaagaactatcaaactcctgagccaacaacttaatatgactagcttacacaatagcttttatagtaaagatacctctttacggactccacttatgactccctaaagcccatgtcgaagcccccatcgctgggtcaatagtacttgccgcagtactcttaaaactaggcggctatggtataatacgcctcacactcattctcaaccccctgacaaaacacatagcctaccccttccttgtactatccctatgaggcataattataacaagctccatctgcctacgacaaacagacctaaaatcgctcattgcatactcttcaatcagccacatagccctcgtagtaacagccattctcatccaaaccccctgaagcttcaccggcgcagtcattctcataatcgcccacggacttacatcctcattactattctgcctagcaaactcaaactacgaacgcactcacagtcgcatcataatcctctctcaaggacttcaaactctactcccactaatagctttttgatgacttctagcaagcctcgctaacctcgccttaccccccactattaacctactgggagaactctctgtgctagtaaccacgttctcctgatcaaatatcactctcctacttacaggactcaacatactagtcacagccctatactccctctacatatttaccacaacacaatggggctcactcacccaccacattaacaacataaaaccctcattcacacgagaaaacaccctcatgttcatacacctagcccccattctcctcctatccctcaaccccgacatcattaccgggttttcctcttgtaaatatagtttaaccaaaacatcagattgtgaatctgacaacagaggcttacgaccccttatttaccgagaaagctcacaagaactgctaactcatgcccccatgtctaacaacatggctttctcaacttttaaaggataacagctatccattggtcttaggccccaaaaattttggtgcaactccaaataaaagtaataaccatgcacactactataaccaccctaaccctgacttccctaattccccccatccttaccaccctcgttaaccctaacaaaaaaaactcatacccccattatgtaaaatccattgtcgcatccacctttattatcagtctcttccccacaacaatattcatatgcctagaccaagaagttattatctcgaactgacactgagccacaacccaaacaacccagctctccctaagcttcaaactagactacttctccataatattcatccctgtagcattgttcgttacatggtccatcatagaattctcactgtgatatataaactcagacccaaacattaatcagttcttcaaatatctactcattttcctaattaccatactaatcttagttaccgctaacaacctattccaactgttcatcggctgagagggcgtaggaattatatccttcttgctcatcagttgatgatacgcccgagcagatgccaacacagcagccattcaagcaatcctatacaaccgtatcggcgatatcggtttcatcctcgccttagcatgatttatcctacactccaactcatgagacccacaacaaatagcccttctaaacgctaatccaagcctcaccccactactaggcctcctcctagcagcagcaggcaaatcagcccaattaggtctccacccctgactcccctcagccatagaaggccccaccccagtctcagccctactccactcaagcactatagttgtagcaggaatcttcttactcatccgcttccaccccctagcagaaaatagcccactaatccaaactctaacactatgcttaggcgctatcaccactctgttcgcagcagtctgcgcccttacacaaaatgacatcaaaaaaatcgtagccttctccacttcaagtcaactaggactcataatagttacaatcggcatcaaccaaccacacctagcattcctgcacatctgtacccacgccttcttcaaagccatactatttatgtgctccgggtccatcatccacaaccttaacaatgaacaagatattcgaaaaataggaggactactcaaaaccatacctctcacttcaacctccctcaccattggcagcctagcattagcaggaatacctttcctcacaggtttctactccaaagaccacatcatcgaaaccgcaaacatatcatacacaaacgcctgagccctatctattactctcatcgctacctccctgacaagcgcctatagcactcgaataattcttctcaccctaacaggtcaacctcgcttccccacccttactaacattaacgaaaataaccccaccctactaaaccccattaaacgcctggcagccggaagcctattcgcaggatttctcattactaacaacatttcccccgcatcccccttccaaacaacagtccccctctacctaaaactcacagccctcgctgtcactttcctaggacttctaacagccctagacctcaactacctaaccaacaaacttaaaataaaatccccactatgcacattttatttctccaacatactcggattctaccctagcatcacacaccgcacaatcccctatctaggccttcttacgagccaaaacctgcccctactcctcctagacctaacctgactagaaaagctattacctaaaacaatttcacagcaccaaatctccacctccatcatcacctcaacccaaaaaggcataattaaactttacttcctctctttcttcttcccactcatcctaaccctactcctaatcacataacctattcccccgagcaatctcaattacaatatatacaccaacaaacaatgttcaaccagtaactactactaatcaacgcccataatcatacaaagcccccgcaccaataggatcctcccgaatcaaccctgacccctctccttcataaattattcagcttcctacactattaaagtttaccacaaccaccaccccatcatactctttcacccacagcaccaatcctacctccatcgctaaccccactaaaacactcaccaagacctcaacccctgacccccatgcctcaggatactcctcaatagccatcgctgtagtatatccaaagacaaccatcattccccctaaataaattaaaaaaactattaaacccatataacctcccccaaaattcagaataataacacacccgaccacaccgctaacaatcaatactaaacccccataaataggagaaggcttagaagaaaaccccacaaaccccattactaaacccacactcaacagaaacaaagcatacatcattattctcgcacggactacaaccacgaccaatgatatgaaaaaccatcgttgtatttcaactacaagaacaccaatgaccccaatacgcaaaattaaccccctaataaaattaattaaccactcattcatcgacctccccaccccatccaacatctccgcatgatgaaacttcggctcactccttggcacctgcctgatcctccaaatcaccacaggactattcctagccatgcactactcaccagacgcctcaaccgccttttcatcaatcgcccacatcactcgagacgtaaattatggctgaatcatccgctaccttcacgccaatggcgcctcaatattctttatctgcctcttcctacacatcggacgaggcctatattacggatcatttctctactcagaaacctgaaacatcggcattatcctcctgcttgcaactatagcaacagccttcataggctatgtcctcccgtgaggccaaatatcattctgaggggccacagtaattacaaacttactatccgccatcccatacattgggacagacctagttcaatgaatctgaggaggctactcagtagacagtcccaccctcacacgattctttacctttcacttcatcttgcccttcattattgcagccctagcagcactccacctcctattcttgcacgaaacgggatcaaacaaccccctaggaatcacctcccattccgataaaatcaccttccacccttactacacaatcaaagacgccctcggcttacttctcttccttctctccttaatgacattaacactattctcaccagacctcctaggcgacccagacaattataccctagccaaccccttaaacacccctccccacatcaagcccgaatgatatttcctattcgcctacacaattctccgatccgtccctaacaaactaggaggcgtccttgccctattactatccatcctcatcctagcaataatccccatcctccatatatccaaacaacaaagcataatatttcgcccactaagccaatcactttattgactcctagccgcagacctcctcattctaacctgaatcggaggacaaccagtaagctacccttttaccatcattggacaagtagcatccgtactatacttcacaacaatcctaatcctaataccaactatctccctaattgaaaacaaaatactcaaatgggcctgtccttgtagtataaactaatacaccagtcttgtaagccggagatgaaaacctttttccaaggacaaatcagagaaaaagtctttaactccaccattagcacccaaagctaagattctaatttaaactattctctgttctttcatggggaagcagatttgggtaccacccaagtattgactcacccatcaacaaccgctatgtatttcgtacattactgccagccaccatgaatattgtacagtaccataaatacttgaccacctgtagtacataaaaacccaatccacatcaaaaccccctccccatgcttacaagcaagtacagcaatcaaccttcaactatcacacatcaactgcaactccaaagccacccctcacccactaggataccaacaaacctacccacccttaacagcacatagtacataaagccatttaccgtacatagcacattacagtcaaatcccttctcgtccccatggatgacccccctcagatagggatcccttgaccaccatcctccgtgaaatcaatatcccgcacaagagtgctactctcctcgctccgggcccataacacttgggggtagctaaagtgaactgtatccgacatctggttcctacttcagggccataaagcctaaatagcccacacgttccccttaaataagacatcacgatg

SEQ ID NO: 232 - DNA, 16571 bp, Homo sapiens mitochondrial
  3109: "n" refers to a nucleotide at position 3107 of the Cambridge Reference Sequence (CRS, Anderson et al. 1981 Nature 290:457-465), later determined to be absent from the human mtDNA sequence according to the revised CRS (rCRS, Andrews et al. 1999 Nature Genetics 23:147); "n" therefore represents a single nucleotide deletion at a position corresponding to nucleotide 3107 of SEQ ID NO:1 as provided herein.
gatcacaggtctatcaccctattaaccactcacgggagctctccatgcatttggtattttcgtctggggggtatgcacgcgatagcattgcgagacgctggagccggagcaccctatgtcgcagtatctgtctttgattcctgcctcatcctattatttatcgcacctacgttcaatattacaggcgaacatacttactaaagtgtgttaattaattaatgcttgtaggacataataataacaattgaatgtctgcacagccgctttccacacagacatcataacaaaaaatttccaccaaaccccccctcccccccgcttctggccacagcacttaaacacatctctgccaaaccccaaaaacaaagaaccctaacaccagcctaaccagatttcaaattttatcttttggcggtatgcacttttaacagtcaccccccaactaacacattattttcccctcccactcccatactactaatctcatcaatacaacccccgcccatcctacccagcacacacacaccgctgctaaccccataccccgaaccaaccaaaccccaaagacaccccccacagtttatgtagcttacctcctcaaagcaatacactgaaaatgtttagacgggctcacatcaccccataaacaaataggtttggtcctagcctttctattagctcttagtaagattacacatgcaagcatccccgttccagtgagttcaccctctaaatcaccacgatcaaaagggacaagcatcaagcacgcagcaatgcagctcaaaacgcttagcctagccacacccccacgggaaacagcagtgattaacctttagcaataaacgaaagtttaactaagctatactaaccccagggttggtcaatttcgtgccagccaccgcggtcacacgattaacccaagtcaatagaagccggcgtaaagagtgttttagatcaccccctccccaataaagctaaaactcacctgagttgtaaaaaactccagttgacacaaaatagactacgaaagtggctttaacatatctgaacacacaatagctaagacccaaactgggattagataccccactatgcttagccctaaacctcaacagttaaatcaacaaaactgctcgccagaacactacgagccacagcttaaaactcaaaggacctggcggtgcttcatatccctctagaggagcctgttctgtaatcgataaaccccgatcaacctcaccacctcttgctcagcctatataccgccatcttcagcaaaccctgatgaaggctacaaagtaagcgcaagtacccacgtaaagacgttaggtcaaggtgtagcccatgaggtggcaagaaatgggctacattttctaccccagaaaactacgatagcccttatgaaacttaagggtcgaaggtggatttagcagtaaactgagagtagagtgcttagttgaacagggccctgaagcgcgtacacaccgcccgtcaccctcctcaagtatacttcaaaggacatttaactaaaacccctacgcatttatatagaggagacaagtcgtaacatggtaagtgtactggaaagtgcacttggacgaaccagagtgtagcttaacacaaagcacccaacttacacttaggagatttcaacttaacttgaccgctctgagctaaacctagccccaaacccactccaccttactaccagacaaccttagccaaaccatttacccaaataaagtataggcgatagaaattgaaacctggcgcaatagatatagtaccgcaagggaaagatgaaaaattataaccaagcataatatagcaaggactaacccctataccttctgcataatgaattaactagaaataactttgcaaggagagccaaagctaagacccccgaaaccagacgagctacctaagaacagctaaaagagcacacccgtctatgtagcaaaatagtgggaagatttataggtagaggcgacaaacctaccgagcctggtgatagctggttgtccaagatagaatcttagttcaactttaaatttgcccacagaaccctctaaatccccttgtaaatttaactgttagtccaaagaggaacagctctttggacactaggaaaaaaccttgtagagagagtaaaaaatttaacacccatagtaggcctaaaagcagccaccaattaagaaagcgttcaagctcaacacccactacctaaaaaatcccaaacatataactgaactcctcatacccaattggaccaatctatcaccctatagaagaactaatgttagtataagtaacatgaaaacattctcctccgcataagcctgcgtcagattaaaacactgaactgacaattaacagcccaatatctacaatcaaccaacaagtcattattaccctcactgtcaacccaacacaggcatgctcataaggaaaggttaaaaaaagtaaaaggaactcggcaaatcttaccccgcctgtttaccaaaaacatcacctctagcatcaccagtattagaggcaccgcctgcccagtgacacatgtttaacggccgcggtaccctaaccgtgcaaaggtagcataatcacttgttccttaaatagggacctgtatgaatggctccacgagggttcagctgtctcttacttttaaccagtgaaattgacctgcccgtgaagaggcgggcataacacagcaagacgagaagaccctatggagctttaatttattaatgcaaacagtacctaacaaacccacaggtcctaaactaccaaacctgcattaaaaatttcggttggggcgacctcggagcagaacccaacctccgagcagtacatgctaagacttcaccagtcaaagcgaactactatactcaattgatccaataacttgaccaacggaacaagttaccctagggataacagcgcaatcctattctagagtccatatcaacaatagggtttacgacctcgatgttggatcaggacatcccgatggtgcagccgctattaaaggttcgtttgttcaacgattaaagtcctacgtgatctgagttcagaccggagtaatccaggtcggtttctatctacnttcaaattcctccctgtacgaaaggacaagagaaataaggcctacttcacaaagcgccttcccccgtaaatgatatcatctcaacttagtattatacccacacccacccaagaacagggtttgttaagatggcagagcccggtaatcgcataaaacttaaaactttacagtcagaggttcaattcctcttcttaacaacatacccatggccaacctcctactcctcattgtacccattctaatcgcaatggcattcctaatgcttaccgaacgaaaaattctaggctatatacaactacgcaaaggccccaacgttgtaggcccctacgggctactacaacccttcgctgacgccataaaactcttcaccaaagagcccctaaaacccgccacatctaccatcaccctctacatcaccgccccgaccttagctctcaccatcgctcttctactatgaacccccctccccatacccaaccccctggtcaacctcaacctaggcctcctatttattctagccacctctagcctagccgtttactcaatcctctgatcagggtgagcatcaaactcaaactacgccctgatcggcgcactgcgagcagtagcccaaacaatctcatatgaagtcaccctagccatcattctactatcaacattactaataagtggctcctttaacctctccacccttatcacaacacaagaacacctctgattactcctgccatcatgacccttggccataatatgatttatctccacactagcagagaccaaccgaacccccttcgaccttgccgaaggggagtccgaactagtctcaggcttcaacatcgaatacgccgcaggccccttcgccctattcttcatagccgaatacacaaacattattataataaacaccctcaccactacaatcttcctaggaacaacatatgacgcactctcccctgaactctacacaacatattttgtcaccaagaccctacttctaacctccctgttcttatgaattcgaacagcatacccccgattccgctacgaccaactcatacacctcctatgaaaaaacttcctaccactcaccctagcattacttatatgatatgtctccatacccattacaatctccagcattccccctcaaacctaagaaatatgtctgataaaagagttactttgatagagtaaataataggagcttaaacccccttatttctaggactatgagaatcgaacccatccctgagaatccaaaattctccgtgccacctatcacaccccatcctaaagtaaggtcagctaaataagctatcgggcccataccccgaaaatgttggttatacccttcccgtactaattaatcccctggcccaacccgtcatctactctaccatctttgcaggcacactcatcacagcgctaagctcgcactgattttttacctgagtaggcctagaaataaacatgctagcttttattccagttctaaccaaaaaaataaaccctcgttccacagaagctgccatcaagtatttcctcacgcaagcaaccgcatccataatccttctaatagctatcctcttcaacaatatactctccggacaatgaaccataaccaatactaccaatcagtactcatcattaataatcataatggctatagcaataaaactaggaatagccccctttcacttctgagtcccagaggttacccaaggcacccctctgacatccggcctgcttcttctcacatgacaaaaactagcccccatctcaatcatataccaaatctctccctcactaaacgtaagccttctcctcactctctcaatcttatccatcatagcaggcagttgaggtggattaaaccaaacccagctacgcaaaatcttagcatactcctcaattacccacataggatgaataatagcagttctaccgtacaaccctaacataaccattcttaatttaactatttatattatcctaactactaccgcattcctactactcaacttaaactccagcaccacgaccctactactatctcgcacctgaaacaagctaacatgactaacacccttaattccatccaccctcctctccctaggaggcctgcccccgctaaccggctttttgcccaaatgggccattatcgaagaattcacaaaaaacaatagcctcatcatccccaccatcatagccaccatcaccctccttaacctctacttctacctacgcctaatctactccacctcaatcacactactccccatatctaacaacgtaaaaataaaatgacagtttgaacatacaaaacccaccccattcctccccacactcatcgcccttaccacgctactcctacctatctccccttttatactaataatcttatagaaatttaggttaaatacagaccaagagccttcaaagccctcagtaagttgcaatacttaatttctgtaacagctaaggactgcaaaaccccactctgcatcaactgaacgcaaatcagccactttaattaagctaagcccttactagaccaatgggacttaaacccacaaacacttagttaacagctaagcaccctaatcaactggcttcaatctacttctcccgccgccgggaaaaaaggcgggagaagccccggcaggtttgaagctgcttcttcgaatttgcaattcaatatgaaaatcacctcggagctggtaaaaagaggcctaacccctgtctttagatttacagtccaatgcttcactcagccattttacctcacccccactgatgttcgccgaccgttgactattctctacaaaccacaaagacattggaacactatacctattattcggcgcatgagctggagtcctaggcacagctctaagcctccttattcgagccgagctgggccagccaggcaaccttctaggtaacgaccacatctacaacgttatcgtcacagcccatgcatttgtaataatcttcttcatagtaatacccatcataatcggaggctttggcaactgactagttcccctaataatcggtgcccccgatatggcgtttccccgcataaacaacataagcttctgactcttacctccctctctcctactcctgctcgcatctgctatagtggaggccggagcaggaacaggttgaacagtctaccctcccttagcagggaactactcccaccctggagcctccgtagacctaaccatcttctccttacacctagcaggtgtctcctctatcttaggggccatcaatttcatcacaacaattatcaatataaaaccccctgccataacccaataccaaacgcccctcttcgtctgatccgtcctaatcacagcagtcctacttctcctatctctcccagtcctagctgctggcatcactatactactaacagaccgcaacctcaacaccaccttcttcgaccccgccggaggaggagaccccattctataccaacacctattctgatttttcggtcaccctgaagtttatattcttatcctaccaggcttcggaataatctcccatattgtaacttactactccggaaaaaaagaaccatttggatacataggtatggtctgagctatgatatcaattggcttcctagggtttatcgtgtgagcacaccatatatttacagtaggaatagacgtagacacacgagcatatttcacctccgctaccataatcatcgctatccccaccggcgtcaaagtatttagctgactcgccacactccacggaagcaatatgaaatgatctgctgcagtgctctgagccctaggattcatctttcttttcaccgtaggtggcctgactggcattgtattagcaaactcatcactagacatcgtactacacgacacgtactacgttgtagcccacttccactatgtcctatcaataggagctgtatttgccatcataggaggcttcattcactgatttcccctattctcaggctacaccctagaccaaacctacgccaaaatccatttcactatcatattcatcggcgtaaatctaactttcttcccacaacactttctcggcctatccggaatgccccgacgttactcggactaccccgatgcatacaccacatgaaacatcctatcatctgtaggctcattcatttctctaacagcagtaatattaataattttcatgatttgagaagccttcgcttcgaagcgaaaagtcctaatagtagaagaaccctccataaacctggagtgactatatggatgccccccaccctaccacacattcgaagaacccgtatacataaaatctagacaaaaaaggaaggaatcgaaccccccaaagctggtttcaagccaaccccatggcctccatgactttttcaaaaaggtattagaaaaaccatttcataactttgtcaaagttaaattataggctaaatcctatatatcttaatggcacatgcagcgcaagtaggtctacaagacgctacttcccctatcatagaagagcttatcacctttcatgatcacgccctcataatcattttccttatctgcttcctagtcctgtatgcccttttcctaacactcacaacaaaactaactaatactaacatctcagacgctcaggaaatagaaaccgtctgaactatcctgcccgccatcatcctagtcctcatcgccctcccatccctacgcatcctttacataacagacgaggtcaacgatccctcccttaccatcaaatcaattggccaccaatggtactgaacctacgagtacaccgactacggcggactaatcttcaactcctacatacttcccccattattcctagaaccaggcgacctgcgactccttgacgttgacaatcgagtagtactcccgattgaagcccccattcgtataataattacatcacaagacgtcttgcactcatgagctgtccccacattaggcttaaaaacagatgcaattcccggacgtctaaaccaaaccactttcaccgctacacgaccgggggtatactacggtcaatgctctgaaatctgtggagcaaaccacagtttcatgcccatcgtcctagaattaattcccctaaaaatctttgaaatagggcccgtatttaccctatagcaccccctctaccccctctagagcccactgtaaagctaacttagcattaaccttttaagttaaagattaagagaaccaacacctctttacagtgaaatgccccaactaaatactaccgtatggcccaccataattacccccatactccttacactattcctcatcacccaactaaaaatattaaacacaaactaccacctacctccctcaccaaagcccataaaaataaaaaattataacaaaccctgagaaccaaaatgaacgaaaatctgttcgcttcattcattgcccccacaatcctaggcctacccgccgcagtactgatcattctatttccccctctattgatccccacctccaaatatctcatcaacaaccgactaatcaccacccaacaatgactaatcaaactaacctcaaaacaaatgataaccatacacaacactaaaggacgaacctgatctcttatactagtatccttaatcatttttattgccacaactaacctcctcggactcctgcctcactcatttacaccaaccacccaactatctataaacctagccatggccatccccttatgagcgggcgcagtgattataggctttcgctctaagattaaaaatgccctagcccacttcttaccacaaggcacacctacaccccttatccccatactagttattatcgaaaccatcagcctactcattcaaccaatagccctggccgtacgcctaaccgctaacattactgcaggccacctactcatgcacctaattggaagcgccaccctagcaatatcaaccattaaccttccctctacacttatcatcttcacaattctaattctactgactatcctagaaatcgctgtcgccttaatccaagcctacgttttcacacttctagtaagcctctacctgcacgacaacacataatgacccaccaatcacatgcctatcatatagtaaaacccagcccatgacccctaacaggggccctctcagccctcctaatgacctccggcctagccatgtgatttcacttccactccataacgctcctcatactaggcctactaaccaacacactaaccatataccaatgatggcgcgatgtaacacgagaaagcacataccaaggccaccacacaccacctgtccaaaaaggccttcgatacgggataatcctatttattacctcagaagtttttttcttcgcaggatttttctgagccttttaccactccagcctagcccctaccccccaattaggagggcactggcccccaacaggcatcaccccgctaaatcccctagaagtcccactcctaaacacatccgtattactcgcatcaggagtatcaatcacctgagctcaccatagtctaatagaaaacaaccgaaaccaaataattcaagcactgcttattacaattttactgggtctctattttaccctcctacaagcctcagagtacttcgaatctcccttcaccatttccgacggcatctacggctcaacattttttgtagccacaggcttccacggacttcacgtcattattggctcaactttcctcactatctgcttcatccgccaactaatatttcactttacatccaaacatcactttggcttcgaagccgccgcctgatactggcattttgtagatgtggtttgactatttctgtatgtctccatctattgatgagggtcttactcttttagtataaatagtaccgttaacttccaattaactagttttgacaacattcaaaaaagagtaataaacttcgccttaattttaataatcaacaccctcctagccttactactaataattattacattttgactaccacaactcaacggctacatagaaaaatccaccccttacgagtgcggcttcgaccctatatcccccgcccgcgtccctttctccataaaattcttcttagtagctattaccttcttattatttgatctagaaattgccctccttttacccctaccatgagccctacaaacaactaacctgccactaatagttatgtcatccctcttattaatcatcatcctagccctaagtctggcctatgagtgactacaaaaaggattagactgaaccgaattggtatatagtttaaacaaaacgaatgatttcgactcattaaattatgataatcatatttaccaaatgcccctcatttacataaatattatactagcatttaccatctcacttctaggaatactagtatatcgctcacacctcatatcctccctactatgcctagaaggaataatactatcgctgttcattatagctactctcataaccctcaacacccactccctcttagccaatattgtgcctattgccatactagtctttgccgcctgcgaagcagcggtgggcctagccctactagtctcaatctccaacacatatggcctagactacgtacataacctaaacctactccaatgctaaaactaatcgtcccaacaattatattactaccactgacatgactttccaaaaaacacataatttgaatcaacacaaccacccacagcctaattattagcatcatccctctactattttttaaccaaatcaacaacaacctatttagctgttccccaaccttttcctccgaccccctaacaacccccctcctaatactaactacctgactcctacccctcacaatcatggcaagccaacgccacttatccagtgaaccactatcacgaaaaaaactctacctctctatactaatctccctacaaatctccttaattataacattcacagccacagaactaatcatattttatatcttcttcgaaaccacacttatccccaccttggctatcatcacccgatgaggcaaccagccagaacgcctgaacgcaggcacatacttcctattctacaccctagtaggctcccttcccctactcatcgcactaatttacactcacaacaccctaggctcactaaacattctactactcactctcactgcccaagaactatcaaactcctgagccaacaacttaatatgactagcttacacaatagcttttatagtaaagatacctctttacggactccacttatgactccctaaagcccatgtcgaagcccccatcgctgggtcaatagtacttgccgcagtactcttaaaactaggcggctatggtataatacgcctcacactcattctcaaccccctgacaaaacacatagcctaccccttccttgtactatccctatgaggcataattataacaagctccatctgcctacgacaaacagacctaaaatcgctcattgcatactcttcaatcagccacatagccctcgtagtaacagccattctcatccaaaccccctgaagcttcaccggcgcagtcattctcataatcgcccacgggcttacatcctcattactattctgcctagcaaactcaaactacgaacgcactcacagtcgcatcataatcctctctcaaggacttcaaactctactcccactaatagctttttgatgacttctagcaagcctcgctaacctcgccttaccccccactattaacctactgggagaactctctgtgctagtaaccacgttctcctgatcaaatatcactctcctacttacaggactcaacatactagtcacagccctatactccctctacatatttaccacaacacaatggggctcactcacccaccacattaacaacataaaaccctcattcacacgagaaaacaccctcatgttcatacacctatcccccattctcctcctatccctcaaccccgacatcattaccgggttttcctcttgtaaatatagtttaaccaaaacatcagattgtgaatctgacaacagaggcttacgaccccttatttaccgagaaagctcacaagaactgctaactcatgcccccatgtctaacaacatggctttctcaacttttaaaggataacagctatccattggtcttaggccccaaaaattttggtgcaactccaaataaaagtaataaccatgcacactactataaccaccctaaccctgacttccctaattccccccatccttaccaccctcgttaaccctaacaaaaaaaactcatacccccattatgtaaaatccattgtcgcatccacctttattatcagtctcttccccacaacaatattcatgtgcctagaccaagaagttattatctcgaactgacactgagccacaacccaaacaacccagctctccctaagcttcaaactagactacttctccataatattcatccctgtagcattgttcgttacatggtccatcatagaattctcactgtgatatataaactcagacccaaacattaatcagttcttcaaatatctactcatcttcctaattaccatactaatcttagttaccgctaacaacctattccaactgttcatcggctgagagggcgtaggaattatatccttcttgctcatcagttgatgatacgcccgagcagatgccaacacagcagccattcaagcaatcctatacaaccgtatcggcgatatcggtttcatcctcgccttagcatgatttatcctacactccaactcatgagacccacaacaaatagcccttctaaacgctaatccaagcctcaccccactactaggcctcctcctagcagcagcaggcaaatcagcccaattaggtctccacccctgactcccctcagccatagaaggccccaccccagtctcagccctactccactcaagcactatagttgtagcaggaatcttcttactcatccgcttccaccccctagcagaaaatagcccactaatccaaactctaacactatgcttaggcgctatcaccactctgttcgcagcagtctgcgcccttacacaaaatgacatcaaaaaaatcgtagccttctccacttcaagtcaactaggactcataatagttacaatcggcatcaaccaaccacacctagcattcctgcacatctgtacccacgccttcttcaaagccatactatttatgtgctccgggtccatcatccacaaccttaacaatgaacaagatattcgaaaaataggaggactactcaaaaccatacctctcacttcaacctccctcaccattggcagcctagcattagcaggaatacctttcctcacaggtttctactccaaagaccacatcatcgaaaccgcaaacatatcatacacaaacgcctgagccctatctattactctcatcgctacctccctgacaagcgcctatagcactcgaataattcttctcaccctaacaggtcaacctcgcttccccacccttactaacattaacgaaaataaccctaccctactaaaccccattaaacgcctggcagccggaagcctattcgcaggatttctcattactaacaacatttcccccgcatcccccttccaaacaacaatccccctctacctaaaactcacagccctcgctgtcactttcctaggacttctaacagccctagacctcaactacctaaccaacaaacttaaaataaaatccccactatgcacattttatttctccaacatactcggattctaccctagcatcacacaccgcacaatcccctatctaggccttcttacgagccaaaacctgcccctactcctcctagacctaacctgactagaaaagctattacctaaaacaatttcacagcaccaaatctccacctccatcatcacctcaacccaaaaaggcataattaaactttacttcctctctttcttcttcccactcatcctaaccctactcctaatcacataacctattcccccgagcaatctcaattacaatatatacaccaacaaacaatgttcaaccagtaactactactaatcaacgcccataatcatacaaagcccccgcaccaataggatcctcccgaatcaaccctgacccctctccttcataaattattcagcttcctacactattaaagtttaccacaaccaccaccccatcatactctttcacccacagcaccaatcctacctccatcgctaaccccactaaaacactcaccaagacctcaacccctgacccccatgcctcaggatactcctcaatagccatcgctgtagtatatccaaagacaaccatcattccccctaaataaattaaaaaaactattaaacccatataacctcccccaaaattcagaataataacacacccgaccacaccgctaacaatcaatactaaacccccataaataggagaaggcttagaagaaaaccccacaaaccccattactaaacccacactcaacagaaacaaagcatacatcattattctcgcacggactacaaccacgaccaatgatatgaaaaaccatcgttgtatttcaactacaagaacaccaatgaccccaatacgcaaaactaaccccctaataaaattaattaaccactcattcatcgacctccccaccccatccaacatctccgcatgatgaaacttcggctcactccttggcgcctgcctgattctccaaatcaccacaggactattcctagccatgcactactcaccagacgcctcaaccgccttttcatcaatcgcccacatcactcgagacgtaaattatggctgaatcatccgctaccttcacgccaatggcgcctcaatattctttatctgcctcttcctacacatcgggcgaggcctatattacggatcatttctctactcagaaacctgaaacatcggcattatcctcctgcttgcaactatagcaacagccttcataggctatgtcctcccgtgaggccaaatatcattctgaggggccacagtaattacaaacttactatccgccatcccatacattgggacagacctagttcaatgaatctgaggaggctactcagtagacagtcccaccctcacacgattctttacctttcacttcatcttgcccttcattattgcagccctagcagcactccacctcctattcttgcacgaaacgggatcaaacaaccccctaggaatcacctcccattccgataaaatcaccttccacccttactacacaatcaaagacgccctcggcttacttctcttccttctctccttaatgacattaacactattctcaccagacctcctaggcgacccagacaattataccctagccaaccccttaaacacccctccccacatcaagcccgaatgatatttcctattcgcctacacaattctccgatccgtccctaacaaactaggaggcgtccttgccctattactatccatcctcatcctagcaataatccccatcctccatatatccaaacaacaaagcataatatttcgcccactaagccaatcactttattgactcctagccgcagacctcctcattctaacctgaatcggaggacaaccagtaagctacccttttaccatcattggacaagtagcatccgtactatacttcacaacaatcctaatcctaataccaactatctccctaattgaaaacaaaatactcaaatgggcctgtccttgtagtataaactaatacaccagtcttgtaaaccggagatgaaaacctttttccaaggacaaatcagagaaaaagtctttaactccaccattagcacccaaagctaagattctaatttaaactattctctgttctttcatggggaagcagatttgggtaccacccaagtattgactcacccatcaacaaccgctatgtatttcgtacattactgccagccaccatgaatattgtacggtaccataaatacttgaccacctgtagtacataaaaacccaatccacatcaaaaccccctccccatgcttacaagcaagtacagcaatcaaccctcaactatcacacatcaactgcaactccaaagccacccctcacccactaggataccaacaaacctacccacccttaacagtacatagtacataaagccatttaccgtacatagcacattacagtcaaatcccttctcgtccccatggatgacccccctcagataggggtcccttgaccaccatcctccgtgaaatcaatatcccgcacaagagtgctactctcctcgctccgggcccataacacttgggggtagctaaagtgaactgtatccgacatctggttcctacttcagggtcataaagcctaaatagcccacacgttccccttaaataagacatcacgatg

SEQ ID NO: 233 - DNA, 16572 bp, Homo sapiens mitochondrial
  3110: "n" refers to a nucleotide at position 3107 of the Cambridge Reference Sequence (CRS, Anderson et al. 1981 Nature 290:457-465), later determined to be absent from the human mtDNA sequence according to the revised CRS (rCRS, Andrews et al. 1999 Nature Genetics 23:147); "n" therefore represents a single nucleotide deletion at a position corresponding to nucleotide 3107 of SEQ ID NO:1 as provided herein.
gatcacaggtctatcaccctattaaccactcacgggagctctccatgcatttggtattttcgtctggggggtgtgcacgcgatagcattgcgagacgctggagccggagcaccctatgtcgcagtatctgtctttgattcctgcctcatcctattatttatcgcacctacgttcaatattacaggcgaacatacctactaaagtgtgttaattaattaatgcttgtaggacataataataacaattgaatgtctgcacagccgctttccacacagacatcataacaaaaaatttccaccaaaccccccctcccccgccttctggccacagcacttaaacacatctctgccaaaccccaaaaacaaagaaccctaacaccagcctaaccagatttcaaattttatcttttggcggtatgcacttttaacagtcaccccccaactaacacattattttcccctcccactcccatactactaatctcatcaatacaaccctcgcccatcctacccagcacacacacaccacgctgctaaccccataccccgaaccaaccaaaccccaaagacaccccccacagtttatgtagcttacctcctcaaagcaatacactgaaaatgtttagacgggctcacatcaccccataaacaaataggtttggtcctagcctttctattagctcttagtaagattacacatgcaagcatccccgttccagtgagttcaccctctaaatcaccacgatcaaaagggacaagcatcaagcacgcagcaatgcagctcaaaacgcttagcctagccacacccccacgggaaacagcagtgattaacctttagcaataaacgaaagtttaactaagctatactaaccccagggttggtcaatttcgtgccagccaccgcggtcacacgattaacccaagtcaatagaagccggcgtaaagagtgttttagatcaccccctccccaataaagctaaaactcacctgagttgtaaaaaactccagttgacacaaaatagactacgaaagtggctttaacatatctgaacacacaatagctaagacccaaactgggattagataccccactatgcttagccctaaacctcaacagttaaatcaacaaaactgctcgccagaacactacgagccacagcttaaaactcaaaggacctggcggtgcttcatacccctctagaggagcctgttctgtaatcgataaaccccgatcaacctcaccacctcttgctcagcctatataccgccatcttcagcaaaccctgatgaaggctacaaagtaagcgcaagtacccacgtaaagacgttaggtcaaggtgtagcccatgaggtggcaagaaatgggctacattttctaccccagaaaactacgatagcccttatgaaacttaagggtcgaaggtggatttagcagtaaactgagagtagagtgcttagttgaacagggccctgaagcgcgtacacaccgcccgtcaccctcctcaagtatacttcaaaggacatttaactaaaacccctacgcatttatatagaggagacaagtcgtaacatggtaagtgtactggaaagtgcacttggacgaaccagagtgtagcttaacacaaagcacccaacttacacttaggagatttcaacttaacttgaccgctctgagctaaacctagccccaaacccactccaccttactaccagacaaccttagccaaaccatttacccaaataaagtataggcgatagaaattgaaacctggcgcaatagatatagtaccgcaagggaaagatgaaaaattatagccaagcataatatagcaaggactaacccctataccttctgcataatgaattaactagaaataactttgcaaggagagccaaagctaagacccccgaaaccagacgagctacctaagaacagctaaaagagcacacccgtctatgtagcaaaatagtgggaagatttataggtagaggcgacaaacctaccgagcctggtgatagctggttgtccaagatagaatcttagttcaactttaaatttgcccacagaaccctctaaatccccttgtaaatttaactgttagtccaaagaggaacagctctttggacactaggaaaaaaccttgtagagagagtaaaaaatttaacacccatagtaggcctaaaagcagccaccaattaagaaagcgttcaagctcaacacccactacctaaaaaatcccaaacatataactgaactcctcacacccaattggaccaatctatcaccctatagaagaactaatgttagtataagtaacatgaaaacattctcctccgcataagcctgcgtcagattaaaacactgaactgacaattaacagcccaatatctacaatcaaccaacaagtcattattaccctcactgtcaacccaacacaggcatgctcataaggaaaggttaaaaaaagtaaaaggaactcggcaaatcttaccccgcctgtttaccaaaaacatcacctctagcatcaccagtattagaggcaccgcctgcccagtgacacatgtttaacggccgcggtaccctaaccgtgcaaaggtagcataatcacttgttccttaaatagggacctgtatgaatggctccacgagggttcagctgtctcttacttttaaccagtgaaattgacctgcccgtgaagaggcgggcatgacacagcaagacgagaagaccctatggagctttaatttattaatgcaaacagtacctaacaaacccacaggtcctaaactaccaaacctgcattaaaaatttcggttggggcgacctcggagcagaacccaacctccgagcagtacatgctaagacttcaccagtcaaagcgaactactatactcaattgatccaataacttgaccaacggaacaagttaccctagggataacagcgcaatcctattctagagtccatatcaacaatagggtttacgacctcgatgttggatcaggacatcccgatggtgcagccgctattaaaggttcgtttgttcaacgattaaagtcctacgtgatctgagttcagaccggagtaatccaggtcggtttctatctacnttcaaattcctccctgtacgaaaggacaagagaaataaggcctacttcacaaagcgccttcccccgtaaatgatatcatctcaacttagtattatacccacacccacccaagaacagggtttgttaagatggcagagcccggtaatcgcataaaacttaaaactttacagtcagaggttcaattcctcttcttaacaacatacccatggccaacctcctactcctcattgtacccattctaatcgcaatggcattcctaatgcttaccgaacgaaaaattctaggctatatacaactacgcaaaggccccaacgttgtaggcccctacgggctactacaacccttcgctgacgccataaaactcttcaccaaggagcccctaaaacccgccacatctaccatcaccctctacatcaccgccccgaccttagctctcaccatcgctcttctactatgaacccccctccccatacccaaccccctggtcaacctcaacctaggcctcctatttattctagccacctctagcctagccgtttactcaatcctctgatcagggtgagcatcaaactcaaactacgccctgatcggcgcactgcgagcagtagcccaaacaatctcatatgaagtcaccctagccatcattctactatcaacattactaataagtggctcctttaacctctccacccttatcacaacacaagaacacctctgattactcctgccatcatgacccttggccataatatgatttatctccacactagcagagaccaaccgaacccccttcgaccttgccgaaggggagtccgaactagtctcaggcttcaacatcgaatacgccgcaggccccttcgccctattcttcatagccgaatacacaaacattattataataaacaccctcaccactacaatcttcctaggaacaacatatgacgcactctcccctgaactctacacaacatattttgtcaccaagaccctacttctaacctccctgttcttatgaattcgaacagcatacccccgattccgctacgaccaactcatacacctcctatgaaaaaacttcctaccactcaccctagcattacttatatgatatgtctccatacccattacaatctccagcattccccctcaaacctaagaaatatgtctgataaaagagttactttgatggagtaaataataggagcttaaacccccttatttctaggactatgagaatcgaacccatccctgagaatccaaaattctccgtgccacctatcacaccccatcctaaagtaaggtcagctaaataagctatcgggcccataccccgaaaatgttggttatacccttcccgtactaattaatcccctggcccaacccgtcatctactctaccatctttgcaggcacactcatcacagcgctaagctcgcactgattttttacctgagtaggcctagaaataaacatgctagcttttattccagttctaaccaaaaaaataaaccctcgttccacagaagctgccatcaagtatttcctcacgcaagcaaccgcatccataatccttctaatagctatcctcttcaacaatatactctccggacaatgaaccataaccaatactaccaatcaatactcatcattaataatcataatggctatagcaataaaactaggaatagccccctttcacttctgagtcccagaggttacccaaggcacccctctgacatccggcctgcttcttctcacatgacaaaaactagcccccatctcaatcatataccaaatctctccctcactaaacgtaagccttctcctcactctctcaatcttatccatcatagcaggcagttgaggtggattaaaccaaacccagctacgcaaaatcttagcatactcctcaattacccacataggatgaataatagcagttctaccgtacaaccctaacataaccattcttaatttaactatttatattatcctaactactaccgcattcctactactcaacttaaactccagcaccacgaccctactactatctcgcacctgaaacaagctaacatgactaacacccttaattccatccaccctcctctccctaggaggcctgcccccgctaaccggctttttgcccaaatgggccattatcgaagaattcacaaaaaacaatagcctcatcatccccaccatcatagccaccatcaccctccttaacctctacttctacctacgcctaatctactccacctcaatcacactactccccatatctaacaacgtaaaaataaaatgacagtttgaacatacaaaacccaccccattcctccccacactcatcgcccttaccacgctactcctacctatctccccttttatactaataatcttatagaaatttaggttaaatacagaccaagagccttcaaagccctcagtaagttgcaatacttaatttctgtaacagctaaggactgcaaaaccccactctgcatcaactgaacgcaaatcagccactttaattaagctaagcccttactagaccaatgggacttaaacccacaaacacttagttaacagctaagcaccctaatcaactggcttcaatctacttctcccgccgccgggaaaaaaggcgggagaagccccggcaggtttgaagctgcttcttcgaatttgcaattcaatatgaaaatcacctcggagctggtaaaaagaggcctaacccctgtctttagatttacagtccaatgcttcactcagccattttacctcacccccactgatgttcgccgaccgttgactattctctacaaaccacaaagacattggaacactatacctattattcggcgcatgagctggagtcctaggcacagctctaagcctccttattcgagccgagctgggccagccaggcaaccttctaggtaacgaccacatctacaacgttatcgtcacagcccatgcatttgtaataatcttcttcatagtaatacccatcataatcggaggctttggcaactgactagttcccctaataatcggtgcccccgatatggcgtttccccgcataaacaacataagcttctgactcttacctccctctctcctactcctgctcgcatctgctatagtggaagccggagcaggaacaggttgaacagtctaccctcccttagcagggaactactcccaccctggagcctccgtagacctaaccatcttctccttacacctagcaggtgtctcctctatcttaggggccatcaatttcatcacaacaattatcaatataaaaccccctgccataacccaataccaaacgcccctcttcgtctgatccgtcctaatcacagcagtcctacttctcctatctctcccagtcctagctgctggcatcactatactactaacagaccgcaacctcaacaccaccttcttcgaccccgccggaggaggagaccccattctataccaacacctattctgatttttcggtcaccctgaagtttatattcttatcctaccaggcttcggaataatctcccatattgtaacttactactccggaaaaaaagaaccatttggatacataggtatggtctgagctatgatatcaattggcttcctagggtttatcgtgtgagcacaccatatatttacagtaggaatagacgtagacacacgagcatatttcacctccgctaccataatcatcgctatccccaccggcgtcaaagtatttagctgactcgccacactccacggaagcaatatgaaatgatctgctgcagtgctctgagccctaggattcatctttcttttcaccgtaggtggcctgactggcattgtattagcaaactcatcactagacatcgtactacacgacacgtactacgttgtagctcacttccactatgtcctatcaataggagctgtatttgccatcataggaggcttcattcactgatttcccctattctcaggctacaccctagaccaaacctacgccaaaatccatttcactatcatattcatcggcgtaaatctaactttcttcccacaacactttctcggcctatccggaatgccccgacgttactcggactaccccgatgcatacaccacatgaaacatcctatcatctgtaggctcattcatttctctaacagcagtaatattaataattttcatgatttgagaagccttcgcttcgaagcgaaaagtcctaatagtagaagaaccctccataaacctggagtgactatatggatgccccccaccctaccacacattcgaagaacccgtatacataaaatctagacaaaaaaggaaggaatcgaaccccccaaagctggtttcaagccaaccccatggcctccatgactttttcaaaaaggtattagaaaaaccatttcataactttgtcaaagttaaattataggctaaatcctatatatcttaatggcacatgcagcgcaagtaggtctacaagacgctacttcccctatcatagaagagcttatcacctttcatgatcacgccctcataatcattttccttatctgcttcctagtcctgtatgcccttttcctaacactcacaacaaaactaactaatactaacatctcagacgctcaggaaatagaaaccgtctgaactatcctgcccgccatcatcctagtcctcatcgccctcccatccctacgcatcctttacataacagacgaggtcaacgatccctcccttaccatcaaatcaattggccaccaatggtactgaacctacgagtacaccgactacggcggactaatcttcaactcctacatacttcccccattattcctagaaccaggcgacctgcgactccttgacgttgacaatcgagtagtactcccgattgaagcccccattcgtataataattacatcacaagacgtcttgcactcatgagctgtccccacattaggcttaaaaacagatgcaattcccggacgtctaaaccaaaccactttcaccgctacacgaccgggggtatactacggtcaatgctctgaaatctgtggagcaaaccacagtttcatgcccatcgtcctagaattaattcccctaaaaatctttgaaatagggcccgtatttaccctatagcaccccctctaccccctctagagcccactgtaaagctaacttagcattaaccttttaagttaaagattaagagaaccaacacctctttacagtgaaatgccccaactaaatactaccgtatggcccaccataattacccccatactccttacactattcctcatcacccaactaaaaatattaaacacaaactaccacctacctccctcaccaaagcccataaaaataaaaaattataacaaaccctgagaaccaaaatgaacgaaaatctgttcgcttcattcattgcccccacaatcctaggcctacccgccgcagtactgatcattctatttccccctctattgatccccacctccaaatatctcatcaacaaccgactaatcaccacccaacaatgactaatcaaactaacctcaaaacaaatgataaccatacacaacactaaaggacgaacctgatctcttatactagtatccttaatcatttttattgccacaactaacctcctcggactcctgcctcactcatttacaccaaccacccaactatctataaacctagccatggccatccccttatgagcgggcgcagtgattataggctttcgctctaagattaaaaatgccctagcccacttcttaccacaaggcacacctacaccccttatccccatactagttattatcgaaaccatcagcctactcattcaaccaatagccctggccgtacgcctaaccgctaacattactgcaggccacctactcatgcacctaattggaagcaccaccctagcaatatcaaccattaaccttccctctacacttatcatcttcacaattctaattctactgactatcctagaaatcgctgtcgccttaatccaagcctacgttttcacacttctagtaagcctctacctgcacgacaacacataatgacccaccaatcacatgcctatcatatagtaaaacccagcccatgacccctaacaggggccctctcagccctcctaatgacctccggcctagccatgtgatttcacttccactccataacgctcctcatactaggcctactaaccaacacactaaccatataccaatgatggcgcgatgtaacacgagaaagcacataccaaggccaccacacaccacctgtccaaaaaggccttcgatacgggataatcctatttattacctcagaagtttttttcttcgcaggatttttctgagccttttaccactccagcctagcccctaccccccaattaggagggcactggcccccaacaggcatcaccccgctaaatcccctagaagtcccactcctaaacacatccgtattactcgcatcaggagtatcaatcacctgagctcaccatagtctaatagaaaacaaccgaaaccaaataattcaagcactgctcattacaattttactgggtctctattttaccctcctacaagcctcagagtacttcgagtctcccttcaccatttccgacggcatctacggctcaacattttttgtagccacaggcttccacggacttcacgtcattattggctcaactttcctcactatctgcttcatccgccaactaatatttcactttacatccaaacatcactttggcttcgaagccgccgcctgatactggcattttgtagatgtggtttgactatttctgtatgtctccatctattgatgagggtcttactcttttagtataaatagtaccgttaacttccaattaactagttttgacaacattcaaaaaagagtaataaacttcgccttaattttaataatcaacaccctcctagccttactactaataattattacattttgactaccacaactcaacggctacatagaaaaatccaccccttacgagtgcggcttcgaccctatatcccccgcccgcgtccctttctccataaaattcttcttagtagctattaccttcttattatttgatctagaaattgccctccttttacccctaccatgagccctacaaacaactaacctgccactaatagttatgtcatccctcttattaatcatcatcctagccctaagtctggcctatgagtgactacaaaaaggattagactgagccgaattggtatatagtttaaacaaaacgaatgatttcgactcattaaattatgataatcatatttaccaaatgcccctcatttacataaatattatactagcatttaccatctcacttctaggaatactagtatatcgctcacacctcatgtcctccctactatgcctagaaggaataatactatcgctgttcattatagctactctcataaccctcaacacccactccctcttagccaatattgtgcctattgccatactagtctttgccgcctgcgaagcagcggtgggcctagccctactagtctcaatctccaacacatatggcctagactacgtacataacctaaacctactccaatgctaaaactaatcgtcccaacaattatattactaccactgacatgactttccaaaaaacacataatttgaatcaacacaaccacccacagcctaattattagcatcatccctctactattttttaaccaaatcaacaacaacctatttagctgttccccaaccttttcctccgaccccctaacaacccccctcctaatactaactacctgactcctacccctcacaatcatggcaagccaacgccacttatccagtgaaccactatcacgaaaaaaactctacctctctatactaatctccctacaaatctccttaattataacattcacagccacagaactaatcatattttatatcttcttcgaaaccacacttatccccaccttggctatcatcacccgatgaggcaaccagccagaacgcctgaacgcaggcacatacttcctattctacaccctagtaggctcccttcccctactcatcgcactaatttacactcacaacaccctaggctcactaaacattctactactcaccctcactgcccaagaactatcaaactcctgagccaacaacttaatatgactagcttacacaatagcttttatagtaaagatacctctttacggactccacttatgactccctaaagcccatgtcgaagcccccatcgctgggtcaatagtacttgccgcagtactcttgaaactaggcggctatggcataatacgcctcacactcattctcaaccccctgacaaaacacatagcctaccccttccttgtactatccctatgaggcataattataacaagctccatctgcctacgacaaacagacctaaaatcgctcattgcatactcttcaatcagccacatagccctcgtagtaacagccattctcatccaaaccccctgaagcttcaccggcgcagtcattctcataatcgcccacggacttacatcctcattactattctgcctagcaaactcaaactacgaacgcactcacagtcgcatcataatcctctctcaaggacttcaaactctactcccactaatagctttttgatgacttttagcaagcctcgctaacctcgccttaccccccactattaacctactgggagaactctctgtgctagtaaccacgttctcctgatcaaatatcactctcctacttacaggactcaacatactagtcacagccctatactccctctacatatttaccacaacacaatggggctcactcacccaccacattaacaacataaaaccctcattcacacgagaaaacaccctcatgttcatacacctatcccccattctcctcctatccctcaaccccgacatcattaccgggttttcctcttgtaaatatagtttaaccaaaacatcagattgtgaatctgacaacagaggcttacgaccccttatttaccgagaaagctcacaagaactgctaactcatgcccccatgtctaacaacatggctttctcaacttttaaaggataacagctatccattggtcttaggccccaagaattttggtgcaactccaaataaaagtaataaccatgcacactactataaccaccctaaccctaacttccctaattccccccatccttaccaccctcgttaaccctaacaaaaaaaactcatacccccattatgtaaaatccattgtcgcatccacctttattatcagtctcttccccacaacaatattcatgtgcctagaccaagaagttattatctcgaactgacactgagccacaacccaaacaacccagctctccctaagcttcaaactagactacttctccataatattcatccctgtagcattgttcgttacatggtccatcatagaattctcactgtgatatataaactcagacccaaacattaatcagttcttcaaatatctactcatcttcctaattaccatactaatcttagttaccgctaacaacctattccaactgttcatcggctgagagggcgtaggaattatatccttcttgctcatcagttgatgatacgcccgagcagatgccaacacagcagccattcaagcaatcctatacaaccgtatcggcgatatcggtttcatcctcgccttagcatgatttatcctacactccaactcatgagacccacaacaaatagcccttctaaacgctaatccaagcctcaccccactactaggcctcctcctagcagcagcaggcaaatcagcccaattaggtctccacccctgactcccctcagccatagaaggccccaccccagtctcagccctactccactcaagcactatagttgtagcaggaatcttcttactcatccgcttccaccccctagcagaaaatagcccactaatccaaactctaacactatgcttaggcgctatcaccactctgttcgcagcagtctgcgcccttacacaaaatgacatcaaaaaaatcgtagccttctccacttcaagtcaactaggactcataatagttacaatcggcatcaaccaaccacacctagcattcctgcacatctgtacccacgccttcttcaaagccatactatttatgtgctccgggtccatcatccacaaccttaacaatgaacaagatattcgaaaaataggaggactactcaaaaccatacctctcacttcaacctccctcaccattggcagcctagcattagcaggaatacctttcctcacaggtttctactccaaagaccacatcatcgaaaccgcaaacatatcatacacaaacgcctgagccctatctattactctcatcgctacctccctgacaagcgcctatagcactcgaataattcttctcaccctaacaggtcaacctcgcttccccacccttactaacattaacgaaaataaccccaccctactaaaccccattaaacgcctggcagccggaagcctattcgcaggatttctcatcactaacaacatttcccccgcatcccccttccaaacaacaatccccctctacctaaaactcacagccctcgctgtcactttcctaggacttctaacagccctagacctcaactacctaaccaacaaacttaaaataaaatccccactatgcacattttatttctccaacatactcggattctaccctagcatcacacaccgcacaatcccctatctaggccttcttacgagccaaaacctgcccctactcctcctagacctaacctgactagaaaagctattacctaaaacaatttcacagcaccaaatctccacctccatcatcacctcaacccaaaaaggcataattaaactttacttcctctctttcttcttcccactcatcctaaccctactcctaatcacataacctattcccccgagcaatttcaattacaatatatacaccaacaaacaatgttcaaccagtaactactactaatcaacgcccataatcatacaaagcccccgcaccaataggatcctcccgaatcaaccctgacccctctccttcataaattattcagcttcctacactattaaagtttaccacaaccaccaccccatcatactctttcacccacagcaccaatcctacctccatcgctaaccccactaaaacactcaccaagacctcaacccctgacccccatgcctcaggatactcctcaatagccatcgctgtagtatatccaaagacaaccatcattccccctaaataaattaaaaaaactattaaacccatataacctcccccaaaattcagaataataacacacccgaccacaccgctaacaatcaatactaaacccccataaataggagaaggcttagaagaaaaccccacaaaccccattactaaacccacactcaacagaaacaaagcatacatcattattctcgcacggactacaaccacgaccaatgatatgaaaaaccatcgttgtatttcaactacaagaacaccaatgaccccaatacgcaaaattaaccccctaataaaattaattaaccactcactcatcgacctccccaccccatccaacatctccgcatgatgaaacttcggctcactccttggcgcctgcctgatcctccaaatcaccacaggactattcctagccatgcactactcaccagacgcctcaaccgccttttcatcaatcgcccacatcactcgagacgtaaattatggctgaatcatccgctaccttcacgccaatggcgcctcaatattctttatctgcctcttcctacacatcgggcgaggcctatattacggatcatttctctactcagaaacctgaaacatcggcattatcctcctgcttgcaactatagcaacagccttcataggctatgtcctcccgtgaggccaaatatcattctgaggggccacagtaattacaaacttactatccgccatcccatacattgggacagacctagttcaatgaatctgaggaggctactcagtagacagtcccaccctcacacgattctttacctttcacttcatcttgcccttcattattgcagccctagcagcactccacctcctattcttgcacgaaacgggatcaaacaaccccctaggaatcacctcccattccgataaaatcaccttccacccttactacacaatcaaagacgccctcggcttacttctcttccttctctccttaatgacattaacactattctcaccagacctcctaggcgacccagacaattataccctagccaaccccttaaacacccctccccacatcaagcccgaatgatatttcctattcgcctacacaattctccgatccgtccctaacaaactaggaggcgtccttgccctattactatccatcctcatcctagcaataatccccatcctccatatatccaaacaacaaagcataatatttcgcccactaagccaatcactttattgactcctagccgcagacctcctcattctaacctgaatcggaggacaaccagtaagctacccttttaccatcattggacaagtagcatccgtactatacttcacaacaatcctaatcctaataccaactatctccctaattgaaaacaaaatactcaaatggacctgtccttgtagtataaactaatacaccagtcttgtaaaccggagatgaaaacctttttccaaggacaaatcagagaaaaagtctttaactccaccattagcacccaaagctaagattctaatttaaactattctctgttctttcatggggaagcagatttgggtaccacccaagtattgactcacccatcaacaaccgctatgtatttcgtacattactgccagccaccatgaatattgtacggtaccataaatacttgaccacctgtagtacataaaaacccaatccacatcaaaaccccctccccatgcttacaagcaagtacagcaatcaacccccaactatcacacatcaactgcaactccaaagccacccctcacccactaggataccaacaaacctacccacccttaacagtacatagcacataaagccatttaccgtacatagcacattacagtcaaatcccttctcgtccccatggatgacccccctcagataggggtcccttgaccaccatcctccgtgaaatcaatatcccgcacaagagtgctactctcctcgctccgggcccataacacttgggggtagctaaagtgaactgtatccgacatctggttcctacttcagggccataaagcctaaatagcccacacgttccccttaaataagacatcacgatg

SEQ ID NO: 234 - DNA, 16571 bp, Homo sapiens mitochondrial
  3109: "n" refers to a nucleotide at position 3107 of the Cambridge Reference Sequence (CRS, Anderson et al. 1981 Nature 290:457-465), later determined to be absent from the human mtDNA sequence according to the revised CRS (rCRS, Andrews et al. 1999 Nature Genetics 23:147); "n" therefore represents a single nucleotide deletion at a position corresponding to nucleotide 3107 of SEQ ID NO:1 as provided herein.
gatcacaggtctatcaccctattaaccactcacgggagctctccatgcatttggtattttcgtctggggggtgtgcacgcgatagcattgcgagacgctggagccggagcaccctatgtcgcagtatctgtctttgattcctgccccatcccattatttatcgcacctacgttcaatattacaggcgaacatacctactaaagtgtgttaattaattaatgcttgtaggacataataataacaattgaatgtctgcacagccgctttccacacagacatcataacaaaaaatttccaccaaaccccccctcccccccgcttctggccacagcacttaaacacatctctgccaaaccccaaaaacaaagaaccctaacaccagcctaaccagatttcaaattttatcttttggcggtatgcacttttaacagtcaccccccaactaacacattattttcccctcccactcccatactactaatctcatcaatacaacccccgcccatcctacccagcacacacacaccgctgctaaccccataccccgaaccaaccaaaccccaaagacaccccccacagtttatgtagcttacctcctcaaagcaatacactgaaaatgtttagacgggctcacatcaccccataaacaaataggtttggtcctagcctttctattagctcttagtaagattacacatgcaagcatccccgttccagtgagttcaccctctaaatcaccacgatcaaaagggacaagcatcaagcacgcaacaatgcagctcaaaacgcttagcctagccacacccccacgggaaacagcagtgattaacctttagcaataaacgaaagtttaactaagctatactaaccccagggttggtcaatttcgtgccagccaccgcggtcacacgattaacccaagtcaatagaagccggcgtaaagagtgttttagatcaccccctccccaataaagctaaaactcacctgagttgtaaaaaactccagttgacacaaaataaactacgaaagtggctttaacatatctgaacacacaatagctaagacccaaactgggattagataccccactatgcttagccctaaacctcaacagttaaatcaacaaaactgctcgccagaacactacgagccacagcttaaaactcaaaggacctggcggtgcttcatatccctctagaggagcctgttctgtaatcgataaaccccgatcaacctcaccacctcttgctcagcctatataccgccatcttcagcaaaccctgatgaaggctacaaagtaagcgcaagtacccacgtaaagacgttaggtcaaggtgtagcccatgaggtggcaagaaatgggctacattttctaccccagaaaactacgatagcccttatgaaacttaagggtcgaaggtggatttagcagtaaactgagagtagagtgcttagttgaacagggccctgaagcgcgtacacaccgcccgtcaccctcctcaagtatacttcaaaggacatttaactaaaacccctacgcatttatatagaggagacaagtcgtaacatggtaagtgtactggaaagtgcacttggacgaaccagagtgtagcttaacacaaagcacccaacttacacttaggagatttcaacttaacttgaccgctctgagctaaacctagccccaaacccactccaccttactaccagacaaccttagccaaaccatttacccaaataaagtataggcgatagaaattgaaacctggcgcaatagatatagtaccgcaagggaaagatgaaaaattataaccaagcataatatagcaaggactaacccctataccttctgcataatgaattaactagaaataactttgcaaggagagccaaagctaagacccccgaaaccagacgagctacctaagaacagctaaaagagcacacccgtctatgtagcaaaatagtgggaagatttataggtagaggcgacaaacctaccgagcctggtgatagctggttgtccaagatagaatcttagttcaactttaaatttgcccacagaaccctctaaatccccttgtaaatttaactgttagtccaaagaggaacagctctttggacactaggaaaaaaccttgtagagagagtaaaaaatttaacacccatagtaggcctaaaagcagccaccaattaagaaagcgttcaagctcaacacccactacctaaaaaatcccaaacatataactgaactcctcacacccaattggaccaatctatcaccctatagaagaactaatgttagtataagtaacatgaaaacattctcctccgcataagcctgcgtcagattaaaacactgaactgacaattaacagcccaatatctacaatcaaccaacaagtcattattacccccactgtcaacccaacacaggcatgctcataaggaaaggttaaaaaaagtaaaaggaactcggcaaatcttaccccgcctgtttaccaaaaacatcacctctagcatcaccagtattagaggcaccgcctgcccagtgacacatgtttaacggccgcggtaccctaaccgtgcaaaggtagcataatcacttgttccttaaatagggacctgtatgaatggctccacgagggttcagctgtctcttacttttaaccagtgaaattgacctgcccgtgaagaggcgggcatgacacagcaagacgagaagaccctatggagctttaatttattaatgcaaacagtacctaacaaacccacaggtcctaaactactaaacctgcattaaaaatttcggttggggcgacctcggagcagaacccaacctccgagcagtacatgctaagacttcaccagtcaaagcgaactactatactcaattgatccaataacttgaccaacggaacaagttaccctagggataacagcgcaatcctattctagagtccatatcaacaatagggtttacgacctcgatgttggatcaggacatcccgatggtgcagccgctattaaaggttcgtttgttcaacgattaaagtcctacgtgatctgagttcagaccggagtaatccaggtcggtttctatctacnttcaaattcctccctgtacgaaaggacaagagaaataaggcctacttcacaaagcgccttcccccgtaaatgatatcatctcaacttagtattatacccacacccacccaagaacagggtttgttaagatggcagagcccggtaatcgcataaaacttaaaactttacagtcagaggttcaattcctcttcttaacaacatacccatggccaacctcctactcctcattgtacccattctaatcgcaatggcattcctaatgcttaccgaacgaaaaattctaggctatatacaactacgcaaaggccccaacgttgtaggcccctacgggctactacaacccttcgctgacgccataaaactcttcaccaaagagcccctaaaacccgccacatctaccatcaccctctacatcaccgccccgaccttagctctcaccatcgctcttctactatgaacccccctccccatacccaaccccctggttaacctcaacctaggcctcctatttattctagccacctctagcctagccgtttactcaatcctctgatcagggtgagcatcaaactcaaactacgccctgatcggcgcactgcgagcagtagcccaaacaatctcatatgaagtcaccctagccatcattctactatcaacattactaataagtggctcctttaacctctccacccttatcacaacacaagaacacctctgattactcctgccatcatgacccttggccataatatgatttatctccacactagcagagaccaaccgaacccccttcgaccttgccgaaggggagtccgaactagtctcaggcttcaacatcgaatacgccgcaggccccttcgccctattcttcatagccgaatacacaaacattattataataaacaccctcaccactacaatcttcctaggaacaacatatgacgcactctcccctgaactctacacaacatattttgtcaccaagaccctacttctgacctccctgttcttatgaattcgaacagcatacccccgattccgctacgaccaactcatacacctcctatgaaaaaacttcctaccactcaccctagcattacttatatgatatgtctccatacccattacaatctccagcattccccctcaaacctaagaaatatgtctgataaaagagttactttgatagagtaaataataggagcttaaacccccttatttctaggactatgagaatcgaacccatccctgagaatccaaaattctccgtgccacctatcacaccccatcctaaagtaaggtcagctaaataagctatcgggcccataccccgaaaatgttggttatacccttcccgtactaattaatcccctggcccaacccgtcatctactctaccatctttgcaggcacactcatcacagcgctaagctcgcactgattttttacctgagtaggcctagaaataaacatgctagcttttattccagttctaaccaaaaaaataaaccctcgttccacagaagctgccatcaagtatttcctcacgcaagcaaccgcatccataatccttctaatagctatcctcttcaacaatatactctccggacaatgaaccataaccaatactaccaatcaatactcatcattaataatcataatggctatagcaataaaactaggaatagccccctttcacttctgagtcccagaggttacccaaggcacccctctgacatccggcctgcttcttctcacatgacaaaaactagcccccatctcaatcatataccaaatctctccctcactaaacgtaagccttctcctcactctctcaatcttatccatcatagcaggcagttgaggtggattaaaccaaacccagctacgcaaaatcttagcatactcctcaattacccacataggatgaataatagcagttctaccgtacaaccctaacataaccattcttaatttaactatttatattatcctaactactaccgcattcctactactcaacttaaactccagcaccacgaccctactactatctcgcacctgaaacaagctaacatgactaacacccttaattccatccaccctcctctccctaggaggcctgcccccgctaaccggctttttgcccaaatgggccattatcgaagaattcacaaaaaacaatagcctcatcatccccaccatcatagccaccatcaccctccttaacctctacttctacctacgcctaatctactccacctcaatcacactactccccatatctaacaacgtaaaaataaaatgacagtttgaacatacaaaacccaccccattcctccccacactcatcgcccttaccacgctactcctacctatctccccttttatactaataatcttatagaaatttaggttaaatacagaccaagagccttcaaagccctcagtaagttgcaatacttaatttctgtgacagctaaggactgcaaaaccccactctgcatcaactgaacgcaaatcagccactttaattaagctaagcccttactagaccaatgggacttaaacccacaaacacttagttaacagctaagcaccctaatcaactggcttcaatctacttctcccgccgccgggaaaaaaggcgggagaagccccggcaggtttgaagctgcttcttcgaatttgcaattcaatatgaaaatcacctcggagctggtaaaaagaggcctaacccctgtctttagatttacagtccaatgcttcactcagccattttacctcacccccactgatgttcgccgaccgttgactattctctacaaaccacaaagacattggaacactatacctattattcggcgcatgagctggagtcctaggcacagctctaagcctccttattcgagccgagctgggccagccaggcaaccttctaggtaacgaccacatctacaacgttatcgtcacagcccatgcatttgtaataatcttcttcatagtaatacccatcataatcggaggctttggcaactgactagttcccctaataatcggtgcccccgatatggcgtttccccgcataaacaacataagcttctgactcttacctccctctctcctactcctgctcgcatctgctatagtggaggccggagcaggaacaggttgaacagtctaccctcccttagcagggaactactcccaccctggagcctccgtagacctaaccatcttctccttacacctagcaggtgtctcctctatcttaggggccatcaatttcatcacaacaattatcaatataaaaccccctgccataacccaataccaaacgcccctcttcgtctgatccgtcctaatcacagcagtcctacttctcctatctctcccagtcctagctgctggcatcactatactactaacagaccgcaacctcaacaccaccttcttcgaccccgccggaggaggagaccccattctataccaacacctattctgatttttcggtcaccctgaagtttatattcttatcctaccaggcttcggaataatctcccatattgtaacttactactccggaaaaaaagaaccatttggatacataggtatggtctgagctatgatatcaattggcttcctagggtttatcgtgtgagcacaccatatatttacagtaggaatagacgtagacacacgagcatatttcacctccgctaccataatcatcgctatccccaccggcgtcaaagtatttagctgactcgccacactccacggaagcaatatgaaatgatctgctgcagtgctctgagccctaggattcatctttcttttcaccgtaggtggcctgactggcattgtattagcaaactcatcactagacatcgtactacacgacacgtactacgttgtagctcacttccactatgtcctatcaataggagctgtatttgccatcataggaggcttcattcactgatttcccctattctcaggctacaccctagaccaaacctacgccaaaatccatttcactatcatattcatcggcgtaaatctaaccttcttcccacaacactttctcggcctatccggaatgccccgacgttactcggactaccccgatgcatacaccacatgaaatatcctatcatctgtaggttcattcatttctctaacagcagtaatattaataattttcatgatttgagaagccttcgcttcgaagcgaaaagtcctaatagtagaagaaccctccataaacctggagtgactatatggatgccccccaccctaccacacattcgaagaacccgtatacataaaatctagacaaaaaaggaaggaatcgaaccccccaaagctggtttcaagccaaccccatggcctccatgactttttcaaaaagatattagaaaaaccatttcataactttgtcaaagttaaattataggctaaatcctatatatcttaatggcacatgcagcgcaagtaggtctacaagacgctacttcccctatcatagaagagcttatcacctttcatgatcacgccctcataatcattttccttatctgcttcctagtcctgtatgcccttttcctaacactcacaacaaaactaactaatactaacatctcagacgctcaggaaatagagaccgtctgaactatcctgcccgccatcatcctagtcctcatcgccctcccatccctacgcatcctttacataacagacgaggtcaacgatccctcccttaccatcaaatcaattggccaccaatggtactgaacctacgagtacaccgactacggcggactaatcttcaactcctacatacttcccccattattcctagaaccaggcgacctgcgactccttgacgttgacaatcgagtagtactcccgattgaagcccccattcgtataataattacatcacaagacgtcttgcactcatgagctgtccccacattaggcttaaaaacagatgcaattcccggacgtctaaaccaaaccactttcaccgctacacgaccgggggtatactacggtcaatgctctgaaatctgtggagcaaaccacagtttcatacccatcgtcctagaattaattcccctaaaaatctttgaaatagggcccgtatttaccctatagcaccccctctaccccctctagagcccactgtaaagctaacttagcattaaccttttaagttaaagattaagagaaccaacacctctttacagtgaaatgccccaactaaatactaccgtatggcccaccataattacccccatactccttacactattcctcatcacccaactaaaaatattaaacacaaactaccacctacctccctcaccaaagcccataaaaataaaaaattataacaaaccctgagaaccaaaatgaacgaaaatctgttcgcttcattcattgcccccacaatcctaggcctacccgccgcagtactgatcattctatttccccctctattgatccccacctccaaatatctcatcaacaaccgactaatcaccacccaacaatgactaatcaaactaacctcaaaacaaatgatagccatacacaacactaaaggacgaacctgatctcttatactagtatccttaatcatttttattgccacaactaacctcctcggactcctgcctcactcatttacaccaaccacccaactatctataaacctagccatggccatccccttatgagcgggcgcagtgattataggctttcgctctaagattaaaaatgccctagcccacttcttaccacaaggcacacctacaccccttatccccatactagttattatcgaaaccatcagcctactcattcaaccaatagccctggccgtacgcctaaccgctaacattactgcaggccacctactcatgcacctaattggaagcgccaccctagcaatatcaaccattaaccttccctctacacttatcatcttcacaattctaattctactgactatcctagaaatcgctgtcgccttaatccaagcctacgttttcacacttctagtaagcctctacctgcacgacaacacataatgacccaccaatcgcatgcctatcatatagtaaaacccagcccatgacccctaacaggggccctctcagccctcctaatgacctccggcctagccatgtgatttcacttccactccataacgctcctcatactaggcctactaaccaacacactaaccatataccaatgatggcgcgatgtaacacgagaaagcacataccaaggccaccacacaccacctgtccaaaaaggccttcgatacgggataatcctatttattacctcagaagtttttttcttcgcaggatttttctgagccttttaccactccagcctagcccctaccccccaactaggagggcactggcccccaacaggcatcaccccgctaaatcccctagaagtcccactcctaaacacatccgtattactcgcatcaggagtatcaatcacctgagctcaccatagtctaatagaaaacaaccgaaaccaaataattcaagcactgcttattacaattttactgggtctctattttaccctcctacaagcctcagagtacttcgagtctcccttcaccatttccgacggcatctacggctcaacattttttgtagccacaggcttccacggacttcacgtcattattggctcaactttcctcactatctgcttcatccgccaactaatatttcactttacatccaaacatcactttggcttcgaagccgccgcctgatactggcattttgtagatgtggtttgactatttctgtatgtctccatctattgatgagggtcttactcttttagtataaatagtaccgttaacttccaattaactagttttgacaacattcaaaaaagagtaataaacttcgccttaattttaataatcaacaccctcctagccttactactaataatcattacattttgactaccacaactcaacggctacatagaaaaatccaccccttacgagtgcggcttcgaccctatatcccccgcccgcgtccctttctccataaaattcttcttagtagctattaccttcttattatttgatctagaaattgccctccttttacccctaccatgagccctacaaacaactaacctgccactaatagttatgtcatccctcttattaatcatcatcctagccctaagtctggcctatgagtgactacaaaaaggattagactgagccgaattggtatatagtttaaacaaaacgaatgatttcgactcattaaattatgataatcatatttaccaaatgcccctcatttacataaatattatactagcatttaccatctcacttctaggaatactagtatatcgctcacacctcatatcctccctactatgcctagaaggaataatactatcgctgttcattatagctactctcataaccctcaacacccactccctcttagccaatattgtgcctattgccatactagtctttgccgcctgcgaagcagcggtgggcctagccctactagtctcaatctccaacacatatggcctagactacgtacataacctaaacctactccaatgctaaaactaatcgtcccaacaattatattactaccactgacatgactttccaaaaaacacataatttgaatcaacacaaccacccacagcctaattattagcatcatccccctactattttttaaccaaatcaacaacaacctatttagctgttccccaaccttttcctccgaccccctaacaacccccctcctaatactaactacctgactcctacccctcacaatcatggcaagccaacgccacttatccagtgaaccactatcacgaaaaaaactctacctctctatactaatctccctacaaatctccttaattataacattcacagccacagaactaatcatattttatatcttcttcgaaaccacacttatccccaccttggctatcatcacccgatgaggcaaccagccagaacgcctgaacgcaggcacatacttcctattctacaccctagtaggctcccttcccctactcatcgcactaatttacactcacaacaccctaggctcactaaacattctactactcactctcactgcccaagaactatcaaactcctgagccaacaacttaatatgactagcttacacaatagcttttatagtaaagatacctctttacggactccacttatgactccctaaagcccatgtcgaagcccccatcgctgggtcaatagtacttgccgcagtactcttaaaactaggcggctatggtataatacgcctcacactcattctcaaccccctgacaaaacacatagcctaccccttccttgtactatccctatgaggcataattataacaagctccatctgcctacgacaaacagacctaaaatcgctcattgcatactcttcaatcagccacatagccctcgtagtaacagccattctcatccaaaccccctgaagcttcaccggcgcagtcattctcataatcgcccacggacttacatcctcattactattctgcctagcaaactcaaactacgaacgcactcacagtcgcatcataatcctctctcaaggacttcaaactctactcccactaatagctttttgatgacttctagcaagcctcgctaacctcgccttaccccccactattaacctactgggagaactctctgtgctagtaaccacattctcctgatcaaatatcactctcctactcacaggactcaacatactagtcacagccctatactccctctacatatttaccacaacacaatggggctcactcacccaccacattaacaacataaaaccctcattcacacgagaaaacaccctcatgttcatacacctatcccccattctcctcctatccctcaaccccgacatcattaccgggttttcctcttgtaaatatagtttaaccaaaacatcagattgtgaatctgacaacagaggcttacgaccccttatttaccgagaaagctcacaagaactgctaactcatgcccccatgtctaacaacatggctttctcaacttttaaaggataacagctatccattggtcttaggccccaaaaattttggtgcaactccaaataaaagtaataaccatgcacactactataaccaccctaaccctgacttccctaattccccccatccttaccaccctcgttaaccctaacaaaaaaaactcatacccccattatgtaaaatccattgtcgcatccacctttattatcagtctcttccccacaacaatattcatgtgcctagaccaagaagttattatctcgaactgacactgagccacaacccaaacaacccagctctccctaagcttcaaactagactacttctccataatattcatccctgtagcattgttcgttacatggtccatcatagaattctcactgtgatatataaactcagacccaaacattaatcagttcttcaagtatctactcattttcctaattaccatactaatcttagttaccgctaacaacctattccaactgttcatcggctgagagggcgtaggaattatatccttcttgctcatcagttgatgatacgcccgagcagatgccaacacagcagccattcaagcaatcctatacaaccgtatcggcgatatcggtttcatcctcgccttagcatgatttatcctacactccaactcatgagacccacaacaaatagcccttctaaacgctaatccaagcctcaccccactactaggcctcctcctagcagcagcaggcaaatcagcccaattaggtctccacccctgactcccctcagccatagaaggccccaccccagtctcagccctactccactcaagcactatagttgtagcaggaatcttcttactcatccgcttccaccccctagcagaaaatagcccactaatccaaactctaacactatgcttaggcgctatcaccactctgttcgcagcagtctgcgcccttacacaaaatgacatcaaaaaaatcgtagccttctccacttcaagtcaactaggactcataatagttacaatcggcatcaaccaaccacacctagcattcctgcacatctgtacccacgccttcttcaaagccatactatttatgtgctccgggtccatcatccacaaccttaacaatgaacaagatattcgaaaaataggaggactactcaaaaccatacctctcacttcaacctccctcaccattggcagcctagcattagcaggaatacctttcctcacaggtttctactccaaagaccacatcatcgaaaccgcaaacatatcatacacaaacgcctgagccctatctattactctcatcgctacctccctaacaagcgcctatagcactcgaataattcttctcaccctaacaggtcaacctcgcttccctacccttactaacattaacgaaaataaccccaccctactaaaccccattaaacgcctggcagccggaagcctattcgcaggatttctcattactaacaacatttcccccgcatcccccttccaaacaacaatccccctctacctaaaactcacggccctcgctgtcactttcctaggacttctaacagccctagacctcaactacctaaccaacaaacttaaaataaaatccccactatgcacattttatttctccaacatactcggattctaccctagcatcacacaccgcacaatcccctatctaggccttcttacgagccaaaacctgcccctactcctcctagacctaacctgactagaaaagctattacctaaaacaatttcacagcaccaaatctccacctccatcatcacctcaacccaaaaaggcataattaaactttacttcctctctttcttcttcccactcatcctaaccctactcctaatcacataacctattcccccgagcaatctcaattacaatatatacaccaacaaacaatgttcaaccagtaactactactaatcaacgcccataatcatacaaagcccccgcaccaataggatcctcccgaatcaaccctgacccctctccttcataaattattcagcttcctacactattaaagtttaccacaaccaccaccccatcatactctttcacccacagcaccaatcctacctccatcgctaaccccactaaaacactcaccaagacctcaacccctgacccccatgcctcaggatactcctcaatagccatcgctgtagtatatccaaagacaaccatcattccccctaaataaattaaaaaaactattaaacccatataacctcccccaaaattcagaataataacacacccgaccacgccgctaacaatcaatactaaacccccataaataggagaaggcttagaagaaaaccccacaaaccccattactaaacccacactcaacagaaacaaagcatacatcattattctcgcacggactacaaccacgaccaatgatatgaaaaaccatcgttgtatttcaactacaagaacaccaatgaccccaatacgcaaaattaaccccctaataaaattaattaaccactcattcatcgacctccccaccccatccaacatctccgcatgatgaaacttcggctcactccttggcgcctgcctgatcctccaaatcaccacaggactattcctagccatgcactactcaccagacgcctcaaccgccttttcatcaatcgcccacatcactcgagacgtaaattatggctgaatcatccgctaccttcacgccaatggcgcctcaatattctttatctgcctcttcctacacatcgggcgaggcctatattacggatcatttctctactcagaaacctgaaacatcggcattatcctcctgcttgcaactatagcaacagccttcataggctatgtcctcccgtgaggccaaatatcattctgaggggccacagtaattacaaacttactatccgccatcccatacattgggacagacctagttcaatgaatctgaggaggctactcagtagacagtcccaccctcacacgattctttacctttcacttcatcttacccttcattattgcagccctagcagcactccacctcctattcttgcacgaaacgggatcaaacaaccccctaggaatcacctcccattccgataaaatcaccttccacccttactacacaatcaaagacgccctcggcttacttctcttccttctctccttaatgacattaacactattctcaccagacctcctaggcgacccagacaattataccctagccaaccccttaaacacccctccccacatcaagcccgaatgatatttcctattcgcctacacaattctccgatccgtccctaacaaactaggaggcgtccttgccctattactatccatcctcatcctagcaataatccccatcctccatatatccaaacaacaaagcataatatttcgcccactaagccaatcactttattgactcctagccgcagacctcctcattctaacctgaatcggaggacaaccagtaagctacccctttaccatcattggacaagtagcatccgtactatacttcacaacaatcctaatcctaataccaactatctccctaattgaaaacaaaatactcaaatgggcctgtccttgtagtataaactaatacaccagtcttgtaaaccggagatgaaaacctttttccaaggacaaatcagagaaaaagtctttaactccaccattagcacccaaagctaagattctaatttaaactattctctgttctttcatggggaagcagatttgggtaccacccaagtattgactcacccatcaacaaccgctatgtatttcgtacattactgccagccaccatgaatattgtacggtaccataaatacttgaccacctgtagtacataaaaacccaatccacatcaaaacccccccctcatgcttacaagcaagtacagcaatcaaccttcaactatcacacatcaactgcaactccaaagccacccctcacccactaggatatcaacaaacctacccatccttaacagtacatggtacataaagccatttaccgtacatagcacattacagtcaaatcccttctcgtccccatggatgacccccctcagataggagtcccttgaccaccatcctccgtgaaatcaatatcccgcacaagagtgctactctcctcgctccgggcccataacacttgggggtagctaaagtgaactgtatccgacatctggttcctacttcagggccataaagcctaaatagcccacacgttccccttaaataagacatcacgatg

SEQ ID NO: 235 - DNA, 16570 bp, Homo sapiens mitochondrial
  3108: "n" refers to a nucleotide at position 3107 of the Cambridge Reference Sequence (CRS, Anderson et al. 1981 Nature 290:457-465), later determined to be absent from the human mtDNA sequence according to the revised CRS (rCRS, Andrews et al. 1999 Nature Genetics 23:147); "n" therefore represents a single nucleotide deletion at a position corresponding to nucleotide 3107 of SEQ ID NO:1 as provided herein.
gatcacaggtctatcaccctattaaccactcacgggagctctccatgcatttggtattttcgtctggggggtgtgcacgcgatagcattgcgagacgctggagccggagcaccctatgtcgcagtatctgtctttgattcctgcctcatcctattatttatcgcacctacgttcaatattacaggcgaacatacttactaaagtgtgttaattaattaatgcttgtaggacataataataacaattgaatgtctgcacagccgctttccacacagacatcataacaaaaaatttccaccaaaccccccctcccccgccttctggccacagcacttaaacacatctctgccaaaccccaaaaacaaagaaccctaacaccagcctaaccagatttcaaattttatcttttggcggtatgcacttttaacagtcaccccccaactaacacattattttcccctcccactcccatactactaatctcatcaatacaacccccgcccatcctacccagcacacacacaccgctgctaaccccataccccgaaccaaccaaaccccaaagacaccccccacagtttatgtagcttacctcctcaaagcaatacactgaaaatgtttagacgggctcacatcaccccataaacaaataggtttggtcctagcctttctattagctcttagtaagattacacatgcaagcatccccattccagtgagttcaccctctaaatcaccacgatcaaaagggacaagcatcaagcacgcagcaatgcagctcaaaacgcttagcctagccacacccccacgggaaacagcagtgattaacctttagcaataaacgaaagtttaactaagctatactaaccccagggttggtcaatttcgtgccagccaccgcggtcacacgattaacccaagtcaatagaagccggcgtaaagagtgttttagatcaccccctccccaataaagctaaaactcacctgagttgtaaaaaactccagttgacacaaaatagactacgaaagtggctttaacatatctgaacacacaatagctaagacccaaactgggattagataccccactatgcttagccctaaacctcaacagttaaatcaacaaaactgctcgccagaacactacgagccacagcttaaaactcaaaggacctggcggtgcttcatatccctctagaggagcctgttctgtaatcgataaaccccgatcaacctcaccacctcttgctcagcctatataccgccatcttcagcaaaccctgatgaaggctacaaagtaagcgcaagtacccacgtaaagacgttaggtcaaggtgtagcccatgaggtggcaagaaatgggctacattttctaccccagaaaactacgatagcccttatgaaacttaagggtcgaaggtggatttagcagtaaactgagagtagagtgcttagttgaacagggccctgaagcgcgtacacaccgcccgtcaccctcctcaagtatacttcaaaggacatttaactaaaacccctacgcatttatatagaggagacaagtcgtaacatggtaagtgtactggaaagtgcacttggacgaaccagagtgtagcttaacacaaagcacccaacttacacttaggagatttcaacttaacttgaccgctctgagctaaacctagccccaaacccactccaccttactaccagacaaccttagccaaaccatttacccaaataaagtataggcgatagaaattgaaacctggcgcaatagatatagtaccgcaagggaaagatgaaaaattataaccaagcataatatagcaaggactaacccctataccttctgcataatgaattaactagaaataactttgcaaggagaaccaaagctaagacccccgaaaccagacgagctacctaagaacagctaaaagagcacacccgtctatgtagcaaaatagtgggaagatttataggtagaggcgacaaacctaccgagcctggtgatagctggttgtccaagatagaatcttagttcaactttaaatttgcccacagaaccctctaaatccccttgtaaatttaactgttagtccaaagaggaacagctctttggacactaggaaaaaaccttgcagagagagtaaaaaatttaacacccatagtaggcctaaaagcagccaccaattaagaaagcgttcaagctcaacacccactacctaaaaaatcccaaacatataactgaactcctcacacccaattggaccaatctatcaccctatagaagaactaatgttagtataagtaacatgaaaacattctcctccgcataagcctgcgtcagattaaaacactgaactgacaattaacagcccaatatctacaatcaaccaacaagtcattattaccctcactgtcaacccaacacaggcatgctcataaggaaaggttaaaaaaagtaaaaggaactcggcaaatcttaccccgcctgtttaccaaaaacatcacctctagcatcaccagtattagaggcaccgcctgcccagtgacacatgtttaacggccgcggtaccctaaccgtgcaaaggtagcataatcacttgttccttaaatagggacctgtatgaatggctccacgagggttcagctgtctcttacttttaaccagtgaaattgacctgcccgtgaagaggcgggcatgacacagcaagacgagaagaccctatggagctttaatttattaatgcaaacagtacctaacaaacccacaggtcctaaactaccaaacctgcattaaaaatttcggttggggcgacctcggagcagaacccaacctccgagcagtacatgctaagacttcaccagtcaaagcgaactactatactcaattgatccaataacttgaccaacggaacaagttaccctagggataacagcgcaatcctattctagagtccatatcaacaatagggtttacgacctcgatgttggatcaggacatcccgatggtgcagccgctattaaaggttcgtttgttcaacgattaaagtcctacgtgatctgagttcagaccggagtaatccaggtcggtttctatctacnttcaaattcctccctgtacgaaaggacaagagaaataaggcctacttcacaaagcgccttcccccgtaaatgatatcatctcaacttagtattatacccacacccacccaagaacagggtttgttaagatggcagagcccggtaatcgcataaaacttaaaactttacagtcagaggttcaattcctcttcttaacaacatacccatggccaacctcctactcctcattgtacccattctaaccgcaatggcattcctaatgcttaccgaacgaaaaattctaggctatatacaactacgcaaaggccccaacgttgtaggcccctacgggctactacaacccttcgctgacgccataaaactcttcaccaaagagcccctaaaacccgccacatctaccatcaccctctacatcaccgccccgaccttagctctcaccatcgctcttctactatgaacccccctccccatacccaaccccctggtcaacctcaacctaggcctcctatttattctagccacctctagcctagccgtttactcaatcctctgatcagggtgagcatcaaactcaaactacgccctgatcggcgcactgcgagcagtagcccaaacaatctcatatgaagtcaccctagccatcattctactatcaacattactaataagtggctcctttaacctctccacccttatcacaacacaagaacacctctgattactcctgccatcatgacccttggccataatatgatttatctccacactagcagagaccaaccgaacccccttcgaccttgccgaaggggagtccgaactagtctcaggcttcaacatcgaatacgccgcaggccccttcgccctattcttcatagccgaatacacaaacattattataataaacaccctcaccactacaatcttcctaggaacaacatatgacgcactctcccctgaactctacacaacatattttgtcaccaagaccctacttctaacctccctgttcttatgaattcgaacagcatacccccgattccgctacgaccaactcatacacctcctatgaaaaaacttcctaccactcaccctagcattacttatatgacatgtctccatacccattacaatctccagcattccccctcaaacctaagaaatatgtctgataaaagagttactttgatagagtaaataataggagcttaaacccccttatttctaggactatgagaatcgaacccatccctgagaatccaaaattctccgtgccacctatcacaccccatcctaaagtaaggtcagctaaataagctatcgggcccataccccgaaaatgttggttatacccttcccgtactaattaatcccctggcccaacccgtcatctactctaccatctttgcaggcacactcatcacagcgctaagctcgcactgattttttacctgagtaggcctagaaataaacatgctagcttttattccagttctaaccaaaaaaataaaccctcgttccacagaagctgccatcaagtatttcctcacgcaagcaaccgcatccataatccttctaatagctatcctcttcaacaatatactctccggacaatgaaccataaccaatactaccaatcaatactcatcattaataatcataatggctatagcaataaaactaggaatagccccctttcacttctgagtcccagaggttacccaaggcacccctctgacatccggcctgcttcttctcacatgacaaaaactagcccccatctcaatcatataccaaatctctccctcactagacgtaagccttctcctcactctctcaatcttatccatcatagcaggcagttgaggtggattaaaccaaacccagctacgcaaaatcttagcatactcctcaattacccacataggatgaataatagcagttctaccgtacaaccctaacataaccattcttaatttaactatttatattatcctaactactaccgcattcctactactcaacttaaactccagcaccacgaccctactactatctcgcacctgaaacaagctaacatgactaacacccttaattccatccaccctcctctccctaggaggcctgcccccgctaaccggctttttgcccaaatgggccattatcgaagaattcacaaaaaacaatagcctcatcatccccaccatcatagccaccatcaccctccttaacctctacttctacctacgcctaatctactccacctcaatcacactactccccatatctaacaacgtaaaaataaaatgacagtttgaacatacaaaacccaccccattcctccccacactcatcgcccttaccacgctactcctacctatctccccttttatactaataatcttatagaaatttaggttaaatacagaccaagagccttcaaagccctcagtaagttgcaatacttaatttctgtaacagctaaggactgcaaaaccccactctgcatcaactgaacgcaaatcagccactttaattaagctaagcccttactagaccaatgggacttaaacccacaaacacttagttaacagctaagcaccctaatcaactggcttcaatctacttctcccgccgccgggaaaaaaggcgggagaagccccggcaggtttgaagctgcttcttcgaatttgcaattcaatatgaaaatcacctcggagctggtaaaaagaggcctaacccctgtctttagatttacagtccaatgcttcactcagccattttacctcacccccactgatgttcgccgaccgttgactattctctacaaaccacaaagacattggaacactatacctattattcggcgcatgagctggagtcctaggcacagctctaagcctccttattcgagccgagctgggccagccaggcaaccttctaggtaacgaccacatctacaacgttatcgtcacagcccatgcatttgtaataatcttcttcatagtaatacccatcataatcggaggctttggcaactgactagttcccctaataatcggtgcccccgatatggcgtttccccgcataaacaacataagcttctgactcttacctccctctctcctactcctgctcgcatctgctatagtggaggccggagcaggaacaggttgaacagtctaccctcccttagcagggaactactcccaccctggagcctccgtagacctaaccatcttctccttacacctagcaggtgtctcctctatcttaggggccatcaatttcatcacaacaattatcaatataaaaccccctgccataacccaataccaaacgcccctcttcgtctgatccgtcctaatcacagcagtcctacttctcctatctctcccagtcctagctgctggcatcactatactactaacagaccgcaacctcaacaccaccttcttcgaccccgccggaggaggagaccccattctataccaacacctattctgatttttcggtcaccctgaagtttatattcttatcctaccaggcttcggaataatctcccatattgtaacttactactccggaaaaaaagaaccatttggatacataggtatggtctgagctatgatatcaattggcttcctagggtttatcgtgtgagcacaccatatatttacagtaggaatagacgtagacacacgagcatatttcacctccgctaccataatcatcgctatccccaccggcgtcaaagtatttagctgactcgccacactccacggaagcaatatgaaatgatctgctgcagtgctctgagccctaggattcatctttcttttcaccgtaggtggcctgactggcattgtattagcaaactcatcactagacatcgtactacacgacacgtactacgttgtagctcacttccactatatcctatcaataggagctgtatttgccatcataggaggcttcattcactgatttcccctattctcaggctacaccctagaccaaacctacgccaaaatccatttcactatcatattcatcggcgtaaatctaactttcttcccacaacactttctcggcctatccggaatgccccgacgttactcggactaccccgatgcatacaccacatgaaacatcctatcatctgtaggctcattcatttctctaacagcagtaatattaataattttcatgatttgagaagccttcgcttcgaagcgaaaagtcctaatagtagaagaaccctccataaacctggagtgactatatggatgccccccaccctaccacacattcgaagaacccgtatacataaaatctagacaaaaaaggaaggaatcgaaccccccaaagctggtttcaagccaaccccatggcctccatgactttttcaaaaaggtattagaaaaaccatttcataactttgtcaaagttaaattataggctaaatcctatatatcttaatggcacatgcagcgcaagtaggtctacaagacgctacttcccctatcatagaagagcttatcacctttcatgatcacgccctcataatcattttccttatctgcttcctagtcctgtatgcccttttcctaacactcacaacaaaactaactaatactaacatctcagacgctcaggaaatagaaaccgtctgaactatcctgcccgccatcatcctagtcctcatcgccctcccatccctacgcatcctttacataacagacgaggtcaacgatccctcccttaccatcaaatcaattggccaccaatggtactgaacctacgagtacaccgactacggcggactaatcttcaactcctacatacttcccccattattcctagaaccaggcgacctgcgactccttgacgttgacaatcgagtagtactcccgattgaagcccccattcgtataataattacatcacaagacgtcttgcactcatgagctgtccccacattaggcttaaaaacagatgcaattcccggacgtctaaaccaaaccactttcaccgctacacgaccgggggtatactacggtcaatgctctgaaatctgtggagcaaaccacagtttcatgcccatcgtcctagaattaattcccctaaaaatctttgaaatagggcccgtatttaccctatagcaccccctctaccccctctagagcccactgtaaagctaacttagcattaaccttttaagttaaagattaagagaaccaacacctctttacagtgaaatgccccaactaaatactaccgtatggcccaccataattacccccatactccttacactattcctcatcacccaactaaaaatattaaacacaaactaccacctacctccctcaccaaagcccataaaaataaaaaattataacaaaccctgagaaccaaaatgaacgaaaatctgttcgcttcattcattgcccccacaatcctaggcctacccgccgcagtactgatcattctatttccccctctattgatccccacctccaaatatctcatcaacaaccgactaatcaccacccaacaatgactaatcaaactaacctcaaaacaaataataaccatacacaacactaaaggacgaacctgatctcttatactagtatccttaatcatttttattgccacaactaacctcctcggactcctgcctcactcatttacaccaaccacccaactatctataaacctagccatggccatccccttatgagcgggcgcagtgattataggctttcgctctaagattaaaaatgccctagcccacttcttaccacaaggcacacctacaccccttatccccatactagttattatcgaaaccatcagcctactcattcaaccaatagccctggccgtacgcctaaccgctaacattactgcaggccacctactcatgcacctaattggaagcgccaccctagcaatatcaaccattaaccttccctctacacttatcatcttcacaattctaatcctactgactatcctagaaatcgctgtcgccttaatccaagcctacgttttcacacttctagtaagcctctacctgcacgacaacacataatgacccaccaatcacatgcctatcatatagtaaaacccagcccatgacccctaacaggggccctctcagccctcctaatgacctccggcctagccatgtgatttcacttccactccataacgctcctcatactaggcctactaaccaacacactaaccatataccaatgatggcgcgatgtaacacgagaaagcacataccaaggccaccacacaccacctgtccaaaaaggccttcgatacgggataatcctatttattacctcagaagtttttttcttcgcaggatttttctgagccttttaccactccagcctagcccctaccccccaattaggagggcactggcccccaacaggcatcaccccgctaaatcccctagaagtcccactcctaaacacatccgtattactcgcatcaggagtatcaatcacctgagctcaccatagtctaatagaaaacaaccgaaaccaaataattcaagcactgcttattacaattttactgggtctctattttaccctcctacaagcctcagagtacttcgagtctcccttcaccatttccgacggcatctacggctcaacattttttgtagccacaggcttccacggacttcacgtcattattggctcaactttcctcactatctgcttcatccgccaactaatatttcactttacatccaaacatcactttggcttcgaagccgccgcctgatactggcattttgtagatgtggtttgactatttctgtatgtctccatctattgatgagggtcttactcttttagtataaatagtaccgttaacttccaattaactagttttgacaacattcaaaaaagagtaataaacttcgccttaattttaataatcaacaccctcctagccttactactaataattattacattttgactaccacaactcaacggctacatagaaaaatccaccccttacgagtgcggcttcgaccctatatcccccgcccgcgtccctttctccataaaattcttcttagtagctattaccttcttattatttgatctagaaattgccctccttttacccctaccatgagccctacaaacaactaacctgccactaatagttatgtcatccctcttattaatcatcatcctagccctaagtctggcctatgagtgactacaaaaaggattagactgaaccgaattggtatatagtttaaacaaaacgaatgatttcgactcattaaattatgataatcatatctaccaaatgcccctcatttacataaatattatactagcatttaccatctcacttctaggaatactagtatatcgctcacacctcatatcctccctactatgcctagaaggaataatactatcgctattcattatagctactctcataaccctcaacacccactccctcttagccaatattgtgcctattgccatactagtctttgccgcctgcgaagcagcggtgggcctagccctactagtctcaatctccaacacatatggcctagactacgtacataacctaaacctactccaatgctaaaactaatcgtcccaacaattatattactaccactgacatgactttccaaaaaacacataatttgaatcaacacaaccacccacagcctaattattagcatcatccctctactattttttaaccaaatcaacaacaacctatttagctgttccccaaccttttcctccgaccccctaacaacccccctcctaatactaactacctgactcctacccctcacaatcatggcaagccaacgccacttatccagtgaaccactatcacgaaaaaaactctacctctctatactaatctccctacaaatctccttaattataacattcacagccacagaactaatcatattttatatcttcttcgaaaccacacttatccccaccttggctatcatcacccgatgaggcaaccagccagaacgcctgaacgcaggcacatacttcctattctacaccctagtaggctcccttcccctactcatcgcactgatttacactcacaacaccctaggctcactaaacattctactactcactctcactgcccaagaactatcaaactcctgagccaacaacttaatatgactagcttacacaatagcttttatagtaaagatacctctttacggactccacttatgactccctaaagcccatgtcgaagcccccatcgctgggtcaatagtacttgccgcagtactcttaaaactaggcggctatggtataatacgcctcacactcattctcaaccccctgacaaaacacatagcctaccccttccttgtactatccctatgaggcataattataacaagctccatctgcctacgacaaacagacctaaaatcgctcattgcatactcttcaatcagccacatagccctcgtagtaacagccattctcatccaaaccccctgaagcttcaccggcgcagtcattctcataatcgcccacggacttacatcctcattactattctgcctagcaaactcaaactacgaacgcactcacagtcgcatcataatcctctctcaaggacttcaaactctgctcccactaatagctttttgatgacttctagcaagcctcgctaacctcgccttaccccccactattaacctactgggagaactctctgtgctagtaaccacgttctcctgatcaaatatcactctcctacttacaggactcaacatactagtcacagccctatactccctctacatatttaccacaacacaatggggctcactcacccaccacattaacaacataaaaccctcattcacacgagaaaacaccctcatgttcatacacctatcccccattctcctcctatccctcaaccccgacatcattaccgggttttcctcttgtaaatatagtttaaccaaaacatcagattgtgaatctgacaacagaggcttacgaccccttatttaccgagaaagctcacaagaactgctaactcatgcccccatgtctaacaacatggctttctcaacttttaaaggataacagctatccattggtcttaggccccaaaaattttggtgcaactccaaataaaagtaataaccatgcacactactataaccaccctaaccctgacttccctaattccccccatccttaccaccctcgttaaccctaacaaaaaaaactcatacccccattatgtaaaatccattgtcgcatccacctttattatcagtctcttccccacaacaatattcatgtgcctagaccaagaagttattatctcgaactgacactgagccacaacccaaacaacccagctctccctaagcttcaaactagactacttctccataatattcatccctgtagcattgttcgttacatggtccatcatagaattctcactgtgatatataaactcagacccaaacattaatcagttcttcaaatatctactcatcttcctaattaccatactaatcttagttaccgctaataacctattccaactgttcatcggctgagagggcgtaggaattatatccttcttgctcatcagttgatgatacgcccgagcagatgccaacacagcagccattcaagcaatcctatacaaccgtatcggcgatatcggtttcatcctcgccttagcatgatttatcctacactccaactcatgagacccacaacaaatagcccttctaaacgctaatccaagcctcaccccactactaggcctcctcctagcagcagcaggcaaatcagcccaattaggtctccacccctgactcccctcagccatagaaggccccaccccagtctcagccctactccactcaagcactatagttgtagcaggaatcttcttactcatccgcttccaccccctagcagaaaatagcccactaatccaaactctaacactatgcttaggcgctatcaccactctgttcgcagcagtctgcgcccttacacaaaatgacatcaaaaaaatcgtagccttctccacttcaagtcaactaggactcataatagttacaatcggcatcaaccaaccacacctagcattcctgcacatctgtacccacgccttcttcaaagccatactatttatgtgctccggatccatcatccacaaccttaacaatgaacaagatattcgaaaaataggaggactactcaaaaccatacctctcacttcaacctccctcaccattggcagcctagcattagcaggaatacctttcctcacaggtttctactccaaagaccacatcatcgaaaccgcaaacatatcatacacaaacgcctgagccctatctattactctcatcgctacctccctgacaagcgcctatagcactcgaataattcttctcaccctaacaggtcaacctcgcttccccacccttactaacattaacgaaaataaccccaccctactaaaccccattaaacgcctggcagccggaagcctattcgcaggatttctcattactaacaacatttcccccgcatcccccttccaaacaacaatccccctctacctaaaactcacagccctcgctgtcactttcctaggacttctaacagccctagacctcaactacctaaccaacaaacttaaaataaaatccccactatgcacattttatttctccaacatactcggattctaccctagcatcacacaccgcacaatcccctatctaggccttctcgcgagccaaaacctgcccctactcctcctagacctaacctgactagaaaagctattacctaaaacaatttcacagcaccaaatctccacctccatcatcacctcaacccaaaaaggcataattaaactttacttcctctctttcttcttcccactcatcctaaccctactcctaatcacataacctattcccccgagcaatctcaattacaatatatacaccaacaaacaatgttcaaccagtaactactactaatcaacgcccatagtcatacaaagcccccgcaccaataggatcctcccgaatcaaccctgacccctctccttcataaattattcagcttcctacactattaaagtttaccacaaccaccaccccatcatactctttcacccacagcaccaatcctacctccatcgctaaccccactaaaacactcaccaagacctcaacccctgacccccatgcctcaggatactcctcaatagccatcgctgtagtatatccaaagacaaccatcattccccctaaataaattaaaaaaactattaaacccatataacctcccccaaaattcagaataataacacacccgaccacaccgctaacaatcaatactaaacccccataaataggagaaggcttagaagaaaaccccacaaaccccattactaaacccacactcaacagaaacaaagcatacatcattattctcgcacgggctacaaccacgaccaatgatatgaaaaaccatcgttgtatttcaactacaagaacaccaatgaccccaatacgcaaaattaaccccctaataaaattaattaaccactcattcatcgacctccccaccccatccaacatctccgcatgatgaaacttcggctcactccttggcgcctgcctgatcctccaaatcaccacaggactattcctagccatacactactcaccagacgcctcaaccgccttttcatcaatcgcccacatcactcgagacgtaaattatggctgaatcatccgctaccttcacgccaatggcgcctcaatattctttatctgcctcttcctacacatcgggcgaggcctatattacggatcatttctctactcagaaacctgaaacatcggcattatcctcctgcttgcaactatagcaacagccttcataggctatgtcctcccgtgaggccaaatatcattctgaggggccacagtaattacaaacttactatccgccatcccatacattgggacagacctagttcaatgaatctgaggaggctactcagtagacagtcccaccctcacacgattctttacctttcacttcatcttgcccttcattattgcagccctagcagcactccacctcctattcttgcacgaaacgggatcaaacaaccccctaggaatcacctcccattccgataaaatcaccttccacccttactacacaatcaaagacgccctcggcttacttctcttcattctctccttaatgacattaacactattctcaccagacctcctaggcgacccagacaattataccctagccaaccccttaaacacccctccccacatcaagcccgaatgatatttcctattcgcctacacaattctccgatccgtccctaacaagctaggaggcgtccttgccctattactatccatcctcatcctagcaataatccccatcctccatatatccaaacaacaaagcataatatttcgcccactaagccaatcactttattgactcctagccgcagacctcctcattctaacctgaatcggaggacaaccagtaagctacccttttaccatcattggacaagtagcatccgtactatacttcacaacaatcctaatcctaataccaactatctccctaattgaaaacaaaatactcaaatgggcctgtccttgtagtataaactaatacaccagtcttgtaaaccgaagatgaaaacctttttccaaggacaaatcagagaaaaagtctttaactccaccattagcacccaaagctaagattctaatttaaactattctctgttctttcatggggaagcagatttgggtaccacccaagtattgactcacccatcaacaaccgctatgtatttcgtacattactgccagccaccatgaatattgcacggtaccataaatacttgaccacctgtagtacataaaaacccaatccacatcaaaaccccctccccatgcttacaagcaagtacagcaatcaaccctcaactatcacacatcaactgcaactccaaagccacccctcacccactaggataccaacaaacctacccatctttaacagtacatagtacataaagccatctaccgtacatagcacattacagtcaaatcccttctcgtccccatggatgacccccctcagataggggtcccttgaccaccatcctccgtgaaatcaatatcccgcacaagagtgctactctcctcgctccgggcccataacacttgggggtagctaaagtgaactgtatccgacatctggttcctacttcagggccataaagtctaaatagcccacacgttccccttaaataagacatcacgatg

SEQ ID NO: 236 - DNA, 16571 bp, Homo sapiens mitochondrial
  3109: "n" refers to a nucleotide at position 3107 of the Cambridge Reference Sequence (CRS, Anderson et al. 1981 Nature 290:457-465), later determined to be absent from the human mtDNA sequence according to the revised CRS (rCRS, Andrews et al. 1999 Nature Genetics 23:147); "n" therefore represents a single nucleotide deletion at a position corresponding to nucleotide 3107 of SEQ ID NO:1 as provided herein.
gatcacaggtctatcaccctattaaccactcacgggagctctccatgcatttggtattttcgtctggggggtatgcacgcgatagcattgcgagacgctggagccggagcaccctatgtcgcagtatctgtctttgattcctgcctcatcctattatttatcgcacctacgttcaatattacaggcgaacatacttactaaagtgtgttaattaattaatgcttgtaggacataataataacaattgaatgtctgcacagccgctttccacacagacatcataacaaaaaatttccaccaaaccccccctcccccccgcttctggccacagcacttaaacacatctctgccaaaccccaaaaacaaagaaccctaacaccagcctaaccagatttcaaattttatcttttggcggtatgcacttttaacagtcaccccccaactaacacattatttttccctcccactcccatactactaatctcatcaatacaacccccgcccatcctacccagcacacacacaccgctgctaaccccataccccgaaccaaccaaaccccaaagacaccccccacagtttatgtagcttacctcctcaaagcaatacactgaaaatgtttagacgggctcacatcaccccataaacaaataggtttggtcctagcctttctattagctcttagtaagattacacatgcaagcatccccgttccagtgagttcaccctctaaatcaccacgatcaaaagggacaagcatcaagcacgcagcaatgcagctcaaaacgcttagcctagccacacccccacgggaaacagcagtgattaacctttagcaataaacgaaagtttaactaagctatactaaccccagggttggtcaatttcgtgccagccaccgcggtcacacgattaacccaagtcaatagaagccggcgtaaagagtgttttagatcaccccctccccaataaagctaaaactcacctgagttgtaaaaaactccagttgacacaaaatagactacgaaagtggctttaacatatctgaacacacaatagctaagacccaaactgggattagataccccactatgcttagccctaaacctcaacagttaaatcaacaaaactgctcgccagaacactacgagccacagcttaaaactcaaaggacctggcggtgcttcatatccctctagaggagcctgttctgtaatcgataaaccccgatcaacctcaccacctcttgctcagcctatataccgccatcttcagcaaaccctgatgaaggctacaaagtaagcgcaagtacccacgtaaagacgttaggtcaaggtgtagcccatgaggtggcaagaaatgggctacattttctaccccagaaaactacgatagcccttatgaaacttaagggtcgaaggtggatttagcagtaaactgagagtagagtgcttagttgaacagggccctgaagcgcgtacacaccgcccgtcaccctcctcaagtatacttcaaaggacatttaactaaaacccctacgcatttatatagaggagacaagtcgtaacatggtaagtgtactggaaagtgcacttggacgaaccagagtgtagcttaacacaaagcacccaacttacacttaggagatttcaacttaacttgaccgctctgagctaaacctagccccaaacccactccaccttactaccagacaaccttagccaaaccatttacccaaataaagtataggcgatagaaattgaaacctggcgcaatagatatagtaccgcaagggaaagatgaaaaattataaccaagcataatatagcaaggactaacccctataccttctgcataatgaattaactagaaataactttgcaaggagagccaaagctaagacccccgaaaccagacgagctacctaagaacagctaaaagagcacacccgtctatgtagcaaaatagtgggaagatttataggtagaggcgacaaacctaccgagcctggtgatagctggttgtccaagatagaatcttagttcaactttaaatttgcccacagaaccctctaaatccccttgtaaatttaactgttagtccaaagaggaacagctctttggacactaggaaaaaaccttgtagagagagtaaaaaatttaacacccatagtaggcctaaaagcagccaccaattaagaaagcgttcaagctcaacacccactacctaaaaaatcccaaacatataactgaactcctcacacccaattggaccaatctatcaccctatagaagaactaatgttagtataagtaacatgaaaacattctcctccgcataagcctgcgtcagattaaaacactgaactgacaattaacagcccaatatctacaatcaaccaacaagtcattattaccctcactgtcaacccaacacaggcatgctcataaggaaaggttaaaaaaagtaaaaggaactcggcaaatcttaccccgcctgtttaccaaaaacatcacctctagcatcaccagtattagaggcaccgcctgcccagtgacacatgtttaacggccgcggtaccctaaccgtgcaaaggtagcataatcacttgttccttaaatagggacctgtatgaatggctccacgagggttcagctgtctcttacttttaaccagtgaaattgacctgcccgtgaagaggcgggcataacacagcaagacgagaagaccctatggagctttaatttattaatgcaaacagtacctaacaaacccacaggtcctaaactaccaaacctgcattaaaaatttcggttggggcgacctcggagcagaacccaacctccgagcagtacatgctaagacttcaccagtcaaagcgaactactatactcaattgatccaataacttgaccaacggaacaagttaccctagggataacagcgcaatcctattctagagtccatatcaacaatagggtttacgacctcgatgttggatcaggacatcccgatggtgcagccgctattaaaggttcgtttgttcaacgattaaagtcctacgtgatctgagttcagaccggagtaatccaggtcggtttctatctacnttcaaattcctccctgtacgaaaggacaagagaaataaggcctacttcacaaagcgccttcccccgtaaatgatatcatctcaacttagtattatacccacacccacccaagaacagggtttgttaagatggcagagcccggtaatcgcataaaacttaaaactttacagtcagaggttcaattcctcttcttaacaacatacccatggccaacctcctactcctcattgtacccattctaatcgcaatggcattcctaatgcttaccgaacgaaaaattctaggctatatacaactacgcaaaggccccaacgttgtaggcccctacgggctactacaacccttcgctgacgccataaaactcttcaccaaagagcccctaaaacccgccacatctaccatcaccctctacatcaccgccccgaccttagctctcaccatcgctcttctactatgaacccccctccccatacccaaccccctggtcaacctcaacctaggcctcctatttattctagccacctctagcctagccgtttactcaatcctctgatcaggatgagcatcaaactcaaactacgccctgatcggcgcactgcgagcagtagcccaaacaatctcatatgaagtcaccctagccatcattctactatcaacattactaataagtggctcctttaacctctccacccttatcacaacacaagaacacctctgattactcctgccatcatgacccttggccataatatgatttatctccacactagcagagaccaaccgaacccccttcgaccttgccgaaggggagtccgaactagtctcaggcttcaacatcgaatacgccgcaggccccttcgccctattcttcatagccgaatacacaaacattattataataaacaccctcaccactacaatcttcctaggaacaacatatgacgcactctcccctgaactctacacaacatattttgtcaccaagaccctacttctaacctccctgttcttatgaattcgaacagcatacccccgattccgctacgaccaactcatacacctcctatgaaaaaacttcctaccactcaccctagcattacttatatgatatgtctccatacccattacaatctccagcattccccctcaaacctaagaaatatgtctgataaaagagttactttgatagagtaaataataggagcttaaacccccttatttctaggactatgagaatcgaacccatccctgagaatccaaaattctccgtgccacctatcacaccccatcctaaagtaaggtcagctaaataagctatcgggcccataccccgaaaatgttggttatacccttcccgtactaattaatcccctggcccaacccgtcatctactctaccatctttgcaggcacactcatcacagcgctaagctcgcactgattttttacctgagtaggcctagaaataaacatgctagcttttattccagttctaaccaaaaaaataaaccctcgttccacagaagctgccatcaagtatttcctcacgcaagcaaccgcatccataatccttctaatagctatcctcttcaacaatatactctccggacaatgaaccataaccaatactaccaatcaatactcatcattaataatcataatggctatagcaataaaactaggaatagccccctttcacttctgagtcccagaggttacccaaggcacccctctgacatccggcctgcttcttctcacatgacaaaaactagcccccatctcaatcatataccaaatctctccctcactaaacgtaagccttctcctcactctctcaatcttatccatcatagcaggcagttgaggtggattaaaccaaacccagctacgcaaaatcttagcatactcctcaattacccacataggatgaataatagcagttctaccgtacaaccctaacataaccattcttaatttaactatttatattatcctaactactaccgcattcctactactcaacttaaactccagcaccacgaccctactactatctcgcacctgaaacaagctaacatgactaacacccttaattccatccaccctcctctccctaggaggcctgcccccgctaaccggctttttgcccaaatgggccattatcgaagaattcacaaaaaacaatagcctcatcatccccaccatcatagccaccatcaccctccttaacctctacttctacctacgcctaatctactccacctcaatcacactactccccatatctaacaacgtaaaaataaaatgacagtttgaacatacaaaacccaccccattcctccccacactcatcgcccttaccacgctactcctacctatctccccttttatactaataatcttatagaaatttaggttaaatacagaccaagagccttcaaagccctcagtaagttgcaatacttaatttctgtaacagctaaggactgcaaaaccccactctgcatcaactgaacgcaaatcagccactttaattaagctaagcccttactagaccaatgggacttaaacccacaaacacttagttaacagctaagcaccctaatcaactggcttcaatctacttctcccgccgccgggaaaaaaggcgggagaagccccggcaggtttgaagctgcttcttcgaatttgcaattcaatatgaaaatcacctcggagctggtaaaaagaggcctaacccctgtctttagatttacagtccaatgcttcactcagccattttacctcacccccactgatgttcgccgaccgttgactattctctacaaaccacaaagacattggaacactatacctattattcggcgcatgagctggagtcctaggcacagctctaagcctccttattcgagccgagctgggccagccaggcaaccttctaggtaacgaccacatctacaacgttatcgtcacagcccatgcatttgtaataatcttcttcatagtaatacccatcataatcggaggctttggcaactgactagttcccctaataatcggtgcccccgatatggcgtttccccgcataaacaacataagcttctgactcttacctccctctctcctactcctgctcgcatctgctatagtggaggccggagcaggaacaggttgaacagtctaccctcccttagcagggaactactcccaccctggagcctccgtagacctaaccatcttctccttacacctagcaggtgtctcctctatcttaggggccatcaatttcatcacaacaattatcaatataaaaccccctgccataacccaataccaaacgcccctcttcgtctgatccgtcctaatcacagcagtcctacttctcctatctctcccagtcctagctgctggcatcactatactactaacagaccgcaacctcaacaccaccttcttcgaccccgccggaggaggagaccccattctataccaacacctattctgatttttcggtcaccctgaagtttatattcttatcctaccaggcttcggaataatctcccatattgtaacttactactccggaaaaaaagaaccatttggatacataggtatggtctgagctatgatatcaattggcttcctagggtttatcgtgtgagcacaccatatatttacagtaggaatagacgtagacacacgagcatatttcacctccgctaccataatcatcgctatccccaccggcgtcaaagtatttagctgactcgccacactccacggaagcaatatgaaatgatctgctgcagtgctctgagccctaggattcatctttcttttcaccgtaggtggcctgactggcattgtattagcaaactcatcactagacatcgtactacacgacacgtactacgttgtagcccacttccactatgtcctatcaataggagctgtatttgccatcataggaggcttcattcactgatttcccctattctcaggctacaccctagaccaaacctacgccaaaatccatttcactatcatattcatcggcgtaaatctaactttcttcccacaacactttctcggcctatccggaatgccccgacgttactcggactaccccgatgcatacaccacatgaaacatcctatcatctgtaggctcattcatttctctaacagcagtaatattaataattttcatgatttgagaagccttcgcttcgaagcgaaaagtcctaatagtagaagaaccctccataaacctggagtgactatatggatgccccccaccctaccacacattcgaagaacccgtatacataaaatctagacaaaaaaggaaggaatcgaaccccccaaagctggtttcaagccaaccccatggcctccatgactttttcaaaaaggtattagaaaaaccatttcataactttgtcaaagttaaattataggctaaatcctatatatcttaatggcacatgcagcgcaagtaggtctacaagacgctacttcccctatcatagaagagcttatcacctttcatgatcacgccctcataatcattttccttatctgcttcctagtcctgtatgcccttttcctaacactcacaacaaaactaactaatactaacatctcagacgctcaggaaatagaaaccgtctgaactatcctgcccgccatcatcctagtcctcatcgccctcccatccctacgcatcctttacataacagacgaggtcaacgatccctcccttaccatcaaatcaattggccaccaatggtactgaacctacgagtacaccgactacggcggactaatcttcaactcctacatacttcccccattattcctagaaccaggcgacctgcgactccttgacgttgacaatcgagtagtactcccgattgaagcccccattcgtataataattacatcacaagacgtcttgcactcatgagctgtccccacattaggcttaaaaacagatgcaattcccggacgtctaaaccaaaccactttcaccgctacacgaccgggggtatactacggtcaatgctctgaaatctgtggagcaaaccacagtttcatgcccatcgtcctagaattaattcccctaaaaatctttgaaatagggcccgtatttaccctatagcaccccctctaccccctctagagcccactgtaaagctaacttagcattaaccttttaagttaaagattaagagaaccaacacctctttacagtgaaatgccccaactaaatactaccgtatggcccaccataattacccccatactccttacactattcctcatcacccaactaaaaatattaaacacaaactaccacctacctccctcaccaaagcccataaaaataaaaaattataacaaaccctgagaaccaaaatgaacgaaaatctgttcgcttcattcattgcccccacaatcctaggcctacccgccgcagtactgatcattctatttccccctctattgatccccacctccaaatatctcatcaacaaccgactaatcaccacccaacaatgactaatcaaactaacctcaaaacaaatgataaccatacacaacactaaaggacgaacctgatctcttatactagtatccttaatcatttttattgccacaactaacctcctcggactcctgcctcactcatttacaccaaccacccaactatctataaacctagccatggccatccccttatgagcgggcgcagtgattataggctttcgctctaagattaaaaatgccctagcccacttcttaccacaaggcacacctacaccccttatccccatactagttattatcgaaaccatcagcctactcattcaaccaatagccctggccgtacgcctaaccgctaacattactgcaggccacctactcatgcacctaattggaagcgccaccctagcaatatcaaccattaaccttccctctacacttatcatcttcacaattctaattctactgactatcctagaaatcgctgtcgccttaatccaagcctacgttttcacacttctagtaagcctctacctgcacgacaacacataatgacccaccaatcacatgcctatcatatagtaaaacccagcccatgacccctaacaggggccctctcagccctcctaatgacctccggcctagccatgtgatttcacttccactccataacgctcctcatactaggcctactaaccaacacactaaccatataccaatgatggcgcgatgtaacacgagaaagcacataccaaggccaccacacaccacctgtccaaaaaggccttcgatacgggataatcctatttattacctcagaagtttttttcttcgcaggatttttctgagccttttaccactccagcctagcccctaccccccaattaggagggcactggcccccaacaggcatcaccccgctaaatcccctagaagtcccactcctaaacacatccgtattactcgcatcaggagtatcaatcacctgagctcaccatagtctaatagaaaacaaccgaaaccaaataattcaagcactgcttattacaattttactgggtctctattttaccctcctacaagcctcagagtacttcgagtctcccttcaccatttccgacggcatctacggctcaacattttttgtagccacaggcttccacggacttcacgtcattattggctcaactttcctcactatctgcttcatccgccaactaatatttcactttacatccaaacatcactttggcttcgaagccgccgcctgatactggcattttgtagatgtggtttgactatttctgtatgtctccatctattgatgagggtcttactcttttagtataaatagtaccgttaacttccaattaactagttttgacaacattcaaaaaagagtaataaacttcgccttaattttaataatcaacaccctcctagccttactactaataattattacattttgactaccacaactcaacggctacatagaaaaatccaccccttacgagtgcggcttcgaccctatatcccccgcccgcgtccctttctccataaaattcttcttagtagctattaccttcttattatttgatctagaaattgccctccttttacccctaccatgagccctacaaacaactaacctgccactaatagttatgtcatccctcttattaatcatcatcctagccctaagtctggcctatgagtgactacaaaaaggattagactgaaccgaattggtatatagtttaaacaaaacgaatgatttcgactcattaaattatgataatcatatttaccaaatgcccctcatttacataaatattatactagcatttaccatctcacttctaggaatactagtatatcgctcacacctcatatcctccctactatgcctagaaggaataatactatcgctgttcattatagctactctcataaccctcaacacccactccctcttagccaatattgtgcctattgccatactagtctttgccgcctgcgaagcagcggtgggcctagccctactagtctcaatctccaacacatatggcctagactacgtacataacctaaacctactccaatgctaaaactaatcgtcccaacaattatattactaccactgacatgactttccaaaaaacacataatttgaatcaacacaaccacccacagcctaattattagcatcatccctctactattttttaaccaaatcaacaacaacctatttagctgttccccaaccttttcctccgaccccctaacaacccccctcctaatactaactacctgactcctacccctcacaatcatggcaagccaacgccacttatccagtgaaccactatcacgaaaaaaactctacctctctatactaatctccctacaaatctccttaattataacattcacagccacagaactaatcatattttatatcttcttcgaaaccacacttatccccaccttggctatcatcacccgatgaggcaaccagccagaacgcctgaacgcaggcacatacttcctattctacaccctagtaggctcccttcccctactcatcgcactaatttacactcacaacaccctaggctcactaaacattctactactcactctcactgcccaagaactatcaaactcctgagccaacaacttaatatgactagcttacacaatagcttttatagtaaagatacctctttacggactccacttatgactccctaaagcccatgtcgaagcccccatcgctgggtcaatagtacttgccgcagtactcttaaaactaggcggctatggtataatacgcctcacactcattctcaaccccctgacaaaacacatagcctaccccttccttgtactatccctatgaggcataattataacaagctccatctgcctacgacaaacagacctaaaatcgctcattgcatactcttcaatcagccacatagccctcgtagtaacagccattctcatccaaaccccctgaagcttcaccggcgcagtcattctcataatcgcccacgggcttacatcctcattactattctgcctagcaaactcaaactacgaacgcactcacagtcgcatcataatcctctctcaaggacttcaaactctactcccactaatagctttttgatgacttctagcaagcctcgctaacctcgccttaccccccactattaacctactgggagaactctctgtgctagtaaccacgttctcctgatcaaatatcactctcctacttacaggactcaacatactagtcacagccctatactccctctacatatttaccacaacacaatggggctcactcacccaccacattaacaacataaaaccctcattcacacgagaaaacaccctcatgttcatacacctatcccccattctcctcctatccctcaaccccgacatcattaccgggttttcctcttgtaaatatagtttaaccaaaacatcagattgtgaatctgacaacagaggcttacgaccccttatttaccgagaaagctcacaagaactgctaactcatgcccccatgtctaacaacatggctttctcaacttttaaaggataacagctatccattggtcttaggccccaaaaattttggtgcaactccaaataaaagtaataaccatgcacactactataaccaccctaaccctgacttccctaattccccccatccttaccaccctcgttaaccctaacaaaaaaaactcatacccccattatgtaaaatccattgtcgcatccacctttattatcagtctcttccccacaacaatattcatgtgcctagaccaagaagttattatctcgaactgacactgagccacaacccaaacaacccagctctccctaagcttcaaactagactacttctccataatattcatccctgtagcattgttcgttacatggtccatcatagaattctcactgtgatatataaactcagacccaaacattaatcagttcttcaaatatctactcatcttcctaattaccatactaatcttagttaccgctaacaacctattccaactgttcatcggctgagagggcgtaggaattatatccttcttgctcatcagttgatgatacgcccgagcagatgccaacacagcagccattcaagcaatcctatacaaccgtatcggcgatatcggtttcatcctcgccttagcatgatttatcctacactccaactcatgagacccacaacaaatagcccttctaaacgctaatccaagcctcaccccactactaggcctcctcctagcagcagcaggcaaatcagcccaattaggtctccacccctgactcccctcagccatagaaggccccaccccagtctcagccctactccactcaagcactatagttgtagcaggaatcttcttactcatccgcttccaccccctagcagaaaatagcccactaatccaaactctaacactatgcttaggcgctatcaccactctgttcgcagcagtctgcgcccttacacaaaatgacatcaaaaaaatcgtagccttctccacttcaagtcaactaggactcataatagttacaatcggcatcaaccaaccacacctagcattcctgcacatctgtacccacgccttcttcaaagccatactatttatgtgctccgggtccatcatccacaaccttaacaatgaacaagatattcgaaaaataggaggactactcaaaaccatacctctcacttcaacctccctcaccattggcagcctagcattagcaggaatacctttcctcacaggtttctactccaaagaccacatcatcgaaaccgcaaacatatcatacacaaacgcctgagccctatctattactctcatcgctacctccctgacaagcgcctatagcactcgaataattcttctcaccctaacaggtcaacctcgcttccccacccttactaacattaacgaaaataaccccaccctactaaaccccattaaacgcctggcagccggaagcctattcgcaggatttctcattactaacaacatttcccccgcatcccccttccaaacaacaatccccctctacctaaaactcacagccctcgctgtcactttcctaggacttctaacagccctagacctcaactacctaaccaacaaacttaaaataaaatccccactatgcacattttatttctccaacatactcggattctaccctagcatcacacaccgcacaatcccctatctaggccttcttacgagccaaaacctgcccctactcctcctagacctaacctgactagaaaagctattacctaaaacaatttcacagcaccaaatctccacctccatcatcacctcaacccaaaaaggcataattaaactttacttcctctctttcttcttcccactcatcctaaccctactcctaatcacataacctattcccccgagcaatctcaattacaatatatacaccaacaaacaatgttcaaccagtaactactactaatcaacgcccataatcatacaaagcccccgcaccaataggatcctcccgaatcaaccctgacccctctccttcataaattattcagcttcctacactattaaagtttaccacaaccaccaccccatcatactctttcacccacagcaccaatcctacctccatcgctaaccccactaaaacactcaccaagacctcaacccctgacccccatgcctcaggatactcctcaatagccatcgctgtagtatatccaaagacaaccatcattccccctaaataaattaaaaaaactattaaacccatataacctcccccaaaattcagaataataacacacccgaccacaccgctaacaatcaatactaaacccccataaataggagaaggcttagaagaaaaccccacaaaccccattactaaacccacactcaacagaaacaaagcatacatcattattctcgcacggactacaaccacgaccaatgatatgaaaaaccatcgttgtatttcaactacaagaacaccaatgaccccaatacgcaaaactaaccccctaataaaattaattaaccactcattcatcgacctccccaccccatccaacatctccgcatgatgaaacttcggctcactccttggcgcctgcctgatcctccaaatcaccacaggactattcctagccatgcactactcaccagacgcctcaaccgccttttcatcaatcgcccacatcactcgagacgtaaattatggctgaatcatccgctaccttcacgccaatggcgcctcaatattctttatctgcctcttcctacacatcgggcgaggcctatattacggatcatttctctactcagaaacctgaaacatcggcattatcctcctgcttgcaactatagcaacagccttcataggctatgtcctcccgtgaggccaaatatcattctgaggggccacagtaattacaaacttactatccgccatcccatacattgggacagacctagttcaatgaatctgaggaggctactcagtagacagtcccaccctcacacgattctttacctttcacttcatcttgcccttcattattgcagccctagcagcactccacctcctattcttgcacgaaacgggatcaaacaaccccctaggaatcacctcccattccgataaaatcaccttccacccttactacacaatcaaagacgccctcggcttacttctcttccttctctccttaatgacattaacactattctcaccagacctcctaggcgacccagacaattataccctagccaaccccttaaacacccctccccacatcaagcccgaatgatatttcctattcgcctacacaattctccgatccgtccctaacaaactaggaggcgtccttgccctattactatccatcctcatcctagcaataatccccatcctccatatatccaaacaacaaagcataatatttcgcccactaagccaatcactttattgactcctagccgcagacctcctcattctaacctgaatcggaggacaaccagtaagctacccttttaccatcattggacaagtagcatccgtactatacttcacaacaatcctaatcctaataccaactatctccctaattgaaaacaaaatactcaaatgggcctgtccttgtagtataaactaatacaccagtcttgtaaaccggagatgaaaacctttttccaaggacaaatcagagaaaaagtctttaactccaccattagcacccaaagctaagattctaatttaaactattctctgttctttcatggggaagcagatttgggtaccacccaagtattgactcacccatcaacaaccgctatgtatttcgtacattactgccagccaccatgaatattgtacggtaccataaatacttgaccacctgtagtacataaaaacccaatccacatcaaaaccccctccccatgcttacaagcaagtacagcaatcaaccctcaactatcacacatcaactgcaactccaaagccacccctcacccactaggataccaacaaacctacccactcttaacagcacatagcacataaagccatttaccgtacatagcacattacagtcaaatcccttctcgtccccatggatgacccccctcagatagggatcccttgaccaccatcctccgtgaaatcaatatcccgcacaagagtgctactctcctcgctccgggcccataacacttgggggtagctaaagtgaactgtatccgacatctggttcctacttcagggtcataaagcctaaatagcccacacgttccccttaaataagacatcacgatg

SEQ ID NO: 237 - DNA, 16570 bp, Homo sapiens mitochondrial; identical to SEQ ID NO: 227
  3108: "n" refers to a nucleotide at position 3107 of the Cambridge Reference Sequence (CRS, Anderson et al. 1981 Nature 290:457-465), later determined to be absent from the human mtDNA sequence according to the revised CRS (rCRS, Andrews et al. 1999 Nature Genetics 23:147); "n" therefore represents a single nucleotide deletion at a position corresponding to nucleotide 3107 of SEQ ID NO:1 as provided herein.

SEQ ID NO: 238 - DNA, 16571 bp, Homo sapiens mitochondrial
  3109: "n" refers to a nucleotide at position 3107 of the Cambridge Reference Sequence (CRS, Anderson et al. 1981 Nature 290:457-465), later determined to be absent from the human mtDNA sequence according to the revised CRS (rCRS, Andrews et al. 1999 Nature Genetics 23:147); "n" therefore represents a single nucleotide deletion at a position corresponding to nucleotide 3107 of SEQ ID NO:1 as provided herein.
gatcacaggtctatcaccctattaaccactcacgggagctctccatgcatttggtattttcgtctggggggtgtgcacgcgatagcattgcgagacgctggagccggagcaccctatgtcgcagcacctgtctttgattcctgcctcatcctgttatttatcgcacctacgttcaatattacaggcgaacatatctactaaagtgtgttaattaattaatgcttgtaggacataataataacaattgaatgtctgcacagccgctttccacacagacatcataacaaaaaatttccaccaaaccccccctcccccccgcttctggccacagcacttaaacacatctctgccaaaccccaaaaacaaagaaccctaacaccagcctaaccagatttcaaattttatcttttggcggtatgcacttttaacagtcaccccccaactaacacattattttcccctcccactcccatactactaatctcatcaatacaacccccgcccatcctacccagcacacacacaccgctgctaaccccataccccgaaccaaccaaaccccaaagacaccccccacagtttatgtagcttacctcctcaaagcaatacactgaaaatgtttagacgggctcacatcaccccataaacaaataggtttggtcctagcctttctattagctcttagtaagattacacatgcaagcatccccgttccagtgagttcaccctctaaatcaccacgatcaaaagggacaagcatcaagcacgcagcaatgcagctcaaaacgcttagcctagccacacccccacgggaaacagcagtgattaacctttagcaataaacgaaagtttaactaagctatactaaccccagggttggtcaatttcgtgccagccaccgcggtcacacgattaacccaagtcaatagaagccggcgtaaagagtgttttagatcaccccctccccaataaagctaaaactcacctgagttgtaaaaaactccagttgacacaaaatagactacgaaagtggctttaacatatctgaacacacaatagctaagacccaaactgggattagataccccactatgcttagccctaaacctcaacagttaaatcaacaaaactgctcgccagaacactacgagccacagcttaaaactcaaaggacctggcggtgcttcatatccctctagaggagcctgttctgtaatcgataaaccccgatcaacctcaccacctcttgctcagcctatataccgccatcttcagcaaaccctgatgaaggctacaaagtaagcgcaagtacccacgtaaagacgttaggtcaaggtgtagcccatgaggtggcaagaaatgggctacattttctaccccagaaaactacgatagcccttatgaaacttaagggtcgaaggtggatttagcagtaaactgagagtagagtgcttagttgaacagggccctgaagcgcgtacacaccgcccgtcaccctcctcaagtatacttcaaaggacatttaactaaaacccctacgcatttatatagaggagacaagtcgtaacatggtaagtgtactggaaagtgcacttggacgaaccagagtgtagcttaacacaaagcacccaacttacacttaggagatttcaacttaacttgaccgctctgagctaaacctagccccaaacccactccaccttactaccagacaaccttaaccaaaccatttacccaaataaagtataggcgatagaaattgaaacctggcgcaatagatatagtaccgcaagggaaagatgaaaaattataaccaagcataatatagcaaggactaacccctataccttctgcataatgaattaactagaaataactttgcaaggagagccaaagctaagacccccgaaaccagacgagctacctaagaacagctaaaagagcacacccgtctatgtagcaaaatagtgggaagatttataggtagaggcgacaaacctaccgagcctggtgatagctggttgtccaagatagaatcttagttcaactttaaatttgcccacagaaccctctaaatccccttgtaaatttaactgttagtccaaagaggaacagctctttggacactaggaaaaaaccttgtagagagagtaaaaaatttaacacccatagtaggcctaaaagcagccaccaattaagaaagcgttcaagctcaacacccactacctaaaaaatcccaaacatataactgaactcctcacacccaattggaccaatctatcaccctatagaagaactaatgttagtataagtaacatgaaaacattctcctccgcataagcctgcgtcagattaaaacactgaactgacaattaacagcccaatatctacaatcaaccaacaagtcattattaccctcactgtcaacccaacacaggcatgctcataaggaaaggttaaaaaaagtaaaaggaactcggcaaatcttaccccgcctgtttaccaaaaacatcacctctagcatcaccagtattagaggcaccgcctgcccagtgacacatgtttaacggccgcggtaccctaaccgtgcaaaggtagcataatcacttgttccttaaatagggacctgtatgaatggctccacgagggttcagctgtctcttacttttaaccagtgaaattgacctgcccgtgaagaggcgggcatgacacagcaagacgagaagaccctatggagctttaatttattaatgcaaacagtacctaacaaacccacaggtcctaaactaccaaacctgcattaaaaatttcggttggggcgacctcggagcagaacccaacctccgagcagtacatgctaagacttcaccagtcaaagcgaactactatactcaattgatccaataacttgaccaacggaacaagttaccctagggataacagcgcaatcctattctagagtccatatcaacaatagggtttacgacctcgatgttggatcaggacatcccgatggtgcagccgctattaaaggttcgtttgttcaacgattaaagtcctacgtgatctgagttcagaccggagtaatccaggtcggtttctatctacnttcaaattcctccctgtacgaaaggacaagagaaataaggcctacttcacaaagcgccttcccccgtaaatgatatcatctcaacttagtattatacccacacccacccaagaacagggtttgttaagatggcagagcccggtaatcgcataaaacttaaaactttacagtcagaggttcaattcctcttcttaacaacatacccatggccaacctcctactcctcattgtacccattctaatcgcaatggcattcctaatgcttaccgaacgaaaaattctaggctatatacaactacgcaaaggccccaacgttgtaggcccctacgggctactacaacccttcgctgacgccataaaactcttcaccaaagagcccctaaaacccgccacatctaccatcaccctctacatcaccgccccgaccttagctctcaccatcgctcttctactatgaacccccctccccatacccaaccccctggtcaacctcaacctaggcctcctatttattctagccacctctagcctagccgtttactcaatcctctgatcagggtgagcatcaaactcaaactacgccctgatcggcgcactgcgagcagtagcccaaacaatctcatatgaagtcaccctagccatcattctactatcaacattactaataagtggctcctttaacctctccacccttatcacaacacaagaacacctctgattactcctgccatcatgacccttggccataatatgatttatctccacactagcagagaccaaccgaacccccttcgaccttgccgaaggggagtccgaactagtctcaggcttcaacatcgaatacgccgcaggccccttcgccctattcttcatagccgaatacacaaacattattataataaacaccctcaccactacaatcttcctaggaacaacatatgacgcactctcccctgaactctacacaacatattttgtcaccaagaccctacttctaacctccctgttcttatgaattcgaacagcatacccccgattccgctacgaccaactcatacacctcctatgaaaaaacttcctaccactcaccctagcattacttatatgatatgtctccatacccattacaatctccagcattccccctcaaacctaagaaatatgtctgataaaagagttactttgatagagtaaataataggagcttaaacccccttatttctaggactatgagaatcgaacccatccctgagaatccaaaattctccgtgccacctatcacaccccatcctaaagtaaggtcagctaaataagctatcgggcccataccccgaaaatgttggttatacccttcccgtactaattaatcccctggcccaacccgtcatctactctaccatctttgcaggcacactcatcacagcgctaagctcgcactgattttttacctgagtaggcctagaaataaacatgctagcttttattccagttctaaccaaaaaaataaaccctcgttccacagaagctgccatcaagtatttcctcacgcaagcaaccgcatccataatccttctaatagctatcctcttcaacaatatactctccggacaatgaaccataaccaatactaccaatcaatactcatcattaataatcataatggctatagcaataaaactaggaatagccccctttcacttctgagtcccagaggttacccaaggcacccctctgacatccggcctgcttcttctcacatgacaaaaactagcccccgtctcaatcatataccaaatctctccctcactaaacgtaagccttctcctcactctctcaatcttatccatcatagcaggcagttgaggtggattaaaccaaacccagctacgcaaaatcttagcatactcctcaattactcacataggatgaataatagcagttctaccgtacaaccctaacataaccattcttaatttaactatttatattatcctaactactaccgcattcctactactcaacttaaactccagcaccacgaccctactactatctcgcacctgaaacaagctaacatgactaacacccttaattccatccaccctcctctccctaggaggcctgcccccgctaaccggctttttgcccaaatgggccattatcgaagaattcacaaaaaacaatagcctcatcatccccaccatcatagccaccatcaccctccttaacctctacttctacctacgcctaatctactccacctcaatcacactactccccatatctaacaacgtaaaaataaaatgacagtttgaacatacaaaacccaccccattcctccccacactcatcgcccttaccacgctactcctacctatctccccttttatactaataatcttatagaaatttaggttaaatacagaccaagagccttcaaagccctcagtaagttgcaatacttaatttctgtaacagctaaggactgcaaaaccccactctgcatcaactgaacgcaaatcagccactttaattaagctaagcccttactagaccaatgggacttaaacccacaaacacttagttaacagctaagcaccctaatcaactggcttcaatctacttctcccgccgccgggaaaaaaggcgggagaagccccggcaggtttgaagctgcttcttcgaatttgcaattcaatatgaaaatcacctcggagctggtaaaaagaggcctaacccctgtctttagatttacagtccaatgcttcactcagccattttacctcacccccactgatgttcgccgaccgttgactattctctacaaaccacaaagacattggaacactatacctattattcggcgcatgagctggagtcctaggcacagctctaagcctccttattcgagccgagctgggccagccaggcaaccttctaggtaacgaccacatctacaacgttatcgtcacagcccatgcatttgtaataatcttcttcatagtaatacccatcataatcggaggctttggcaactgactagttcccctaataatcggtgcccccgatatggcgtttccccgcataaacaacataagcttctgactcttacccccctctctcctactcctgctcgcatctgctatagtggaggccggagcaggaacaggttgaacagtctaccctcccttagcagggaactactcccaccctggagcctccgtagacctaaccatcttctccttacacctagcaggtgtctcttctatcttaggggccatcaatttcatcacaacaattatcaatataaaaccccctgccataacccaataccaaacgcccctcttcgtctgatccgtcctaatcacagcagtcctacttctcctatctctcccagtcctagctgctggcatcactatactactaacagaccgcaacctcaacaccaccttcttcgaccccgccggaggaggagaccccattctataccaacacctattctgatttttcggtcaccctgaagtttatattcttatcctaccaggcttcggaataatctcccatattgtaacttactactccggaaaaaaagaaccatttggatacataggtatggtctgagctatgatatcaattggcttcctagggtttatcgtgtgagcacaccatatatttacagtaggaatagacgtagacacacgagcatatttcacctccgctaccataatcatcgctatccccaccggcgtcaaagtatttagctgactcgccacactccacggaagcaatatgaaatgatctgctgcagtgctctgagccctaggattcatctttcttttcaccgtaggcggcctgactggcattgtattagcaaactcatcactagacatcgtactacacgacacgtactacgttgtagctcacttccactatgtcctatcaataggagctgtatttgccatcataggaggcttcattcactgatttcccctattctcaggctacaccctagaccaaacctacgccaaaatccatttcactatcatattcatcggcgtaaatctaactttcttcccacaacactttctcggcctatccggaatgccccgacgttactcggactaccccgatgcatacaccacatgaaacatcctatcatctgtaggctcattcatttctctaacagcagtaatattaataattttcatgatttgagaagccttcgcttcgaagcgaaaagtcctaatagtagaagaaccctccataaacctggagtgactatatggatgccccccaccctaccacacattcgaagaacccgtatacataaaatctagacaaaaaaggaaggaatcgaaccccccaaagctggtttcaagccaaccccatggcctccatgactttttcaaaaaggtattagaaaaaccatttcataactttgtcaaagttaaattataggctaaatcctatatatcttaatggcacatgcagcgcaagtaggtctacaagacgctacttcccctatcatagaagagcttatcacctttcatgatcacgccctcataatcattttccttatctgcttcctagtcctgtatgcccttttcctaacactcacaacaaaactaactaatactaacatctcagacgctcaggaaatagaaaccgtctgaactatcctgcccgccatcatcctagtcctcatcgccctcccatccctacgcatcctttacataacagacgaggtcaacgatccctcccttaccatcaaatcaattggccaccaatggtactgaacctacgagtacaccgactacggcggactaatcttcaactcctacatacttcccccattattcctagaaccaggcgacctgcgactccttgacgttgacaatcgagtagtactcccgattgaagcccccattcgtataataattacatcacaagacgtcttgcactcatgagctgtccccacattaggcttaaaaacagatgcaattcccggacgtctaaaccaaaccactttcaccgctacacgaccgggggtatactacggtcaatgctctgaaatctgtggagcaaaccacagtttcatgcccatcgtcctagaattaattcccctaaaaatctttgaaatagggcccgtatttaccctatagcaccccctctaccccctctagagcccactgtaaagctaacttagcattaaccttttaagttaaagattaagagaaccaacacctctttacagtgaaatgccccaactaaatactaccgtatggcccaccataattacccccatactccttacactattcctcatcacccaactaaaaatattaaacacaaactaccacctacctccctcaccaaagcccataaaaataaaaaattataacaaaccctgagaaccaaaatgaacgaaaatctgttcgcttcattcattgcccccacaatcctaggcctacccgccgcagtactgatcattctatttccccctctattgatccccacctccaaatatctcatcaacaaccgactaatcaccacccaacaatgactaatcaaactaacctcaaaacaaatgataaccatacacaacactaaaggacgaacctgatctcttatactagtatccttaatcatttttattgccacaactaacctcctcggactcctgcctcactcatttacaccaaccacccaactatctataaacctagccatggccatccccttatgagcgggcgcagtgattataggctttcgctctaagattaaaaatgccctagcccacttcttaccacaaggcacacctacaccccttatccccatactagttattatcgaaaccatcagcctactcattcaaccaatagccctggccgtacgcctaaccgctaacattactgcaggccacctactcatgcacctaattggaagcgccaccctagcaatatcaaccattaaccttccctctacacttatcatcttcacaattctaattctactgactatcctagaaatcgctgtcgccttaatccaagcctacgttttcacacttctagtaagcctctacctgcacgacaacacataatgacccaccaatcacatgcctatcatatagtaaaacccagcccatgacccctaacaggggccctctcagccctcctaatgacctccggcctagccatgtgatttcacttccactccataacgctcctcatactaggcctactaaccaacacactaaccatataccaatgatggcgcgatgtaacacgagaaagcacataccaaggccaccacacaccacctgtccaaaaaggccttcgatacgggataatcctatttattacctcagaagtttttttcttcgcaggatttttctgagccttttaccactccagcctagcccctaccccccaattaggagggcactggcccccaacaggcatcaccccgctaaatcccctagaagtcccactcctaaacacatccgtattactcgcatcaggagtatcaatcacctgagctcaccatagtctaatagaaaacaaccgaaaccaaataattcaagcgctgcttattacaattttactgggtctctattttaccctcctacaagcctcagagtacttcgagtctcccttcaccatttccgacggcatctacggctcaacattttttgtagccacaggcttccacggacttcacgtcattattggctcaactttcctcactatctgcttcatccgccaactaatatttcactttacatccaaacatcactttggcttcgaagccgccgcctgatactggcattttgtagatgtggtttgactatttctgtatgtctccatctattgatgaggatcttactcttttagtataaatagtaccgttaacttccaattaactagttttgacaacattcaaaaaagagtaataaacttcgccttaattttaataatcaacaccctcctagccttactactaataattattacattttgactaccacaactcaacggctacatagaaaaatccaccccttacgagtgcggcttcgaccctatatcccccgcccgcgtccctttctccataaaattcttcttagtagctattaccttcttattatttgatctagaaattgccctccttttacccctaccatgagccctacaaacaactaacctgccactaatagttatgtcatccctcttattaatcatcatcctagccctaagtctggcctatgagtgactacaaaaaggattagactgaaccgaattggtatatagtttaaacaaaacgaatgatttcgactcattaaattatgataatcatatttaccaaatgcccctcatttacataaatattatactagcatttaccatctcacttctaggaatactagtatatcgctcacacctcatatcctccctactatgcctagaaggaataatactatcgctgttcattatagctactctcataaccctcaacacccactccctcttagccaatattgtgcctattgccatactagtctttgccgcctgcgaagcagcggtgggcctagccctactagtctcaatctccaacacatatggcctagactacgtacataacctaaacctactccaatgctaaaactaatcatcccaacaattatattactaccactgacatgactttccaaaaaacacataatttgaatcaacacaaccacccacagcctaattattagcatcatccctctactattttttaaccaaatcaacaacaacctatttagctgttccccaaccttttcctccgaccccctaacaacccccctcctaatactaactacctgactcctacccctcacaatcatggcaagccaacgccacttatccagtgaaccactatcacgaaaaaaactctacctctctatactaatctccctacaaatctccttaattataacattcacagccacagaactaatcatattttatatcttcttcgaaaccacacttatccccaccttggctatcatcacccgatgaggcaaccagccagaacgcctgaacgcaggcacatacttcctattctacaccctagtaggctcccttcccctactcatcgcactaatttacactcacaacaccctaggctcactaaacattctactactcactctcactgcccaagaactatcaaactcctgagccaacaacttaatatgactagcttacacaatagcttttatagtaaagatacctctttacggactccacttatgactccctaaagcccatgtcgaagcccccatcgctgggtcaatagtacttgccgcagtactcttaaaactaggcggctatggtataatacgcctcacactcattctcaaccccctgacaaaacacatagcctaccccttccttgtactatccctatgaggcataattataacaagctccatctgcctacgacaaacagacctaaaatcgctcattgcatactcttcaatcagccacatagccctcgtagtaacagccattctcatccaaaccccctgaagcttcaccggcgcagtcattctcataatcgcccacggacttacatcctcattactattctgcctagcaaactcaaactacgaacgcactcacagtcgcatcataatcctctctcaaggacttcaaactctactcccactaatagctttttgatgacttctagcaagcctcgctaacctcgccttaccccccactattaacctactgggagaactctctgtgctagtaaccacgttctcctgatcaaatatcactctcctacttacaggactcaacatactagtcacagccctatactccctctacatatttaccacaacacaatggggctcactcacccaccacattaacaacataaaaccctcattcacacgagaaaacaccctcatgttcatacacctatcccccattctcctcctatccctcaaccccgacatcattaccgggttttcctcttgtaaatatagtttaaccaaaacatcagattgtgaatctgacaacagaggcttacgaccccttatttaccgagaaagctcacaagaactgctaactcatgcccccatgtctaacaacatggctttctcaacttttaaaggataacagctatccattggtcttaggccccaaaaattttggtgcaactccaaataaaagtaataaccatgcacactactataaccaccctaaccctgacttccctaattccccccatccttaccaccctcgttaaccctaacaaaaaaaactcatacccccattatgtaaaatccattgtcgcatccacctttattatcagtctcttccccacaacaatattcatgtgcctagaccaagaagttattatctcgaactgacactgagccacaacccaaacaacccagctctccctaagcttcaaactagactacttctccataatattcatccctgtagcattgttcgttacatggtccatcatagaattctcactgtgatatataaactcagacccaaacattaatcagttcttcaaatatctactcattttcctaattaccatactaatcttagttaccgctaacaacctattccaactgttcatcggctgagagggcgtaggaattatatccttcttgctcatcagttgatgatacgcccgagcagatgccaacacagcagccattcaagcaatcctatacaaccgtatcggcgatatcggtttcatcctcgccttagcatgatttatcctacactccaactcatgagacccacaacaaatagcccttctaaacgctaatccaagcctcaccccactactaggcctcctcctagcagcagcaggcaaatcagcccaattaggcctccacccctgactcccctcagccatagaaggccccaccccagtctcagccctactccactcaagcactatagttgtagcaggaatcttcttactcatccgcttccaccccctagcagaaaatagcccactaatccaaactctaacactatgcttaggcgctatcaccactctgttcgcagcagtctgcgcccttacacaaaatgacatcaaaaaaatcgtagccttctccacttcaagtcaactaggactcataatagttacaatcggcatcaaccaaccacacctagcattcctgcacatctgtacccacgccttcttcaaagccatactatttatgtgctccgggtccatcatccacaaccttaacaatgaacaagatattcgaaaaataggaggactactcaaaaccatacctctcacttcaacctccctcaccattggcagcctagcattagcaggaatacctttcctcacaggtttctactccaaagaccacatcatcgaaaccgcaaacatatcatacacaaacgcctgagccctatctattactctcatcgctacctccctgacaagcgcctatagcactcgaataattcttctcaccctaacaggtcaacctcgcttccccacccttactaacattaacgaaaataaccccaccctactaaaccccattaaacgcctggcagccggaagcctattcgcaggatttctcattactaacaacatttcccccgcatcccccttccaaacaacaatccccctctacctaaaactcacagccctcgctgtcactttcctaggacttctaacagccctagacctcaactacctaaccaacaaacttaaaataaaatccccactatgcacattttatttctccaacatactcggattctaccctagcatcacacaccgcacaatcccctatctaggccttcttgcgagccaaaacctgcccctactcctcctagacctaacctgactagaaaagctattacctaaaacaatttcacagcaccaaatctccacctccatcatcacctcaacccaaaaaggcataattaaactttacttcctctctttcttcttcccactcatcctaaccctactcctaatcacataacctattcccccgagcaatctcaattacaatatatacaccaacaaacaatgttcaaccagtaactactactaatcaacgcccataatcatacaaagcccccgcaccaataggatcctcccgaatcaaccctgacccctctccttcataaattattcagcttcctacactattaaagtttaccacaaccaccaccccatcatactctttcacccacagcaccaatcctacctccatcgctaaccccactaaaacactcaccaagacctcaacccctgacccccatgcctcaggatactcctcaatagccatcgctgtagtatacccaaagacaaccatcattccccctaaataaattaaaaaaactattaaacccatataacctcccccaaaattcagaataataacacacccgaccacaccgctaacaatcaatactaaacccccataaataggagaaggcttagaagaaaaccccacaaaccccattactaaacccacactcaacagaaacaaagcatacatcattattctcgcacggactacaaccacgaccaatgatatgaaaaaccatcgttgtatttcaactacaagaacaccaatgaccccaatacgcaaaattaaccccctaataaaattaattaaccactcattcatcgacctccccaccccatccaacatctccgcatgatgaaacttcggctcactccttggcgcctgcctgatcctccaaatcaccacaggactattcctagccatgcactactcaccagacgcctcaaccgccttttcatcaatcgcccacatcactcgagacgtaaattatggctgaatcatccgctaccttcacgccaatggcgcctcaatattctttatctgcctcttcctacacatcgggcgaggcctatattacggatcatttctctactcagaaacctgaaacatcggcattatcctcctgcttgcaactatagcaacagccttcataggctatgtcctcccgtgaggccaaatatcattctgaggggccacagtaattacaaacttactatccgccatcccatacattgggacagacctagttcaatgaatctgaggaggctactcagtagacagtcccaccctcacacgattctttacctttcacttcatcttgcccttcattattgcagccctagcagcactccacctcctattcttgcacgaaacgggatcaaacaaccccctaggaatcacctcccattccgataaaatcaccttccacccttactacacaatcaaagacgccctcggcttacttctcttccttctctccttaatgacattaacactattctcaccagacctcctaggcgacccagacaattataccctagccaaccccttaaacacccctccccacatcaagcccgaatgatatttcctattcgcctacacaattctccgatccgtccctaacaaactaggaggcgtccttgccctattactatccatcctcatcctagcaataatccccatcctccatatatccaaacaacaaagcataatatttcgcccactaagccaatcactttattgactcctagccacagacctcctcattctaacctgaatcggaggacaaccagtaagctacccttttaccatcattggacaagtagcatccgtactatacttcacaacaatcctaatcctaataccaactatctccctaattgaaaacaaaatactcaaatgggcctgtccttgtagtataaactaatacaccagtcttgtaaaccggagatgaaaacctttttccaaggacaaatcagagaaaaagtctttaactccaccattagcacccaaagctaagattctaatttaaactattctctgttctttcatggggaagcagatttgggtaccacccaagtattgactcacccatcaacaaccgctatgtatttcgtacattactgccagccaccatgaatattgtacggtaccataaatacttgaccacctgtagtacataaaaacccaatccacatcaaaaccccccccccatgcttacaagcaagtacagcaatcaaccttcaactatcacacatcaactgcaactccaaagccacccctcacccactaggatatcaacaaacctacccacccttaacagtacatagtacataaagccatttaccgtacatagcacattacagtcaaatcccttctcgtccccatggatgacccccctcagataggggtcccttgaccaccatcctccgtgaaatcaatatcccgcacaagagtgctactctcctcgctccgggcccataacacttgggggtagctaaagtgaactgtatccgacatctggttcctacttcagggccataaagcctaaatagcccacacgttccccttaaataagacatcacgatg

SEQ ID NO: 239 - DNA, 16573 bp, Homo sapiens mitochondrial
  3111: "n" refers to a nucleotide at position 3107 of the Cambridge Reference Sequence (CRS, Anderson et al. 1981 Nature 290:457-465), later determined to be absent from the human mtDNA sequence according to the revised CRS (rCRS, Andrews et al. 1999 Nature Genetics 23:147); "n" therefore represents a single nucleotide deletion at a position corresponding to nucleotide 3107 of SEQ ID NO:1 as provided herein.
gatcacaggtctatcaccctattaaccactcacgggagctctccatgcatttggtattttcgtctggggggtgtgcacgcgatagcattgcgagacgctggagccggagcaccctatgtcgcagtatctgtctttgattcctgcctcatcccattatttatcgcacctacgttcaatattacaggcgaacatacttaccaaagtgtgttaattaattaatgcttgtaggacataataataacaattgaatgtctgcacagccgctttccacacagacatcataacaaaaaatttccaccaaaccccccctcccccccgcttctggccacagcacttaaacacatctctgccaaaccccaaaaacaaagaaccctaacaccagcctaaccagatttcaaattttatcttttggcggtatgcacttttaacagtcaccccccaactaacacattattttcccctcccactcccatactactaatctcatcaatacaacccccgcccatcctacccagcacacacacaccacgctgctaaccccataccccgaaccaaccaaaccccaaagacaccccccacagtttatgtagcttacctcctcaaagcaatacactgaaaatgtttagacgggctcacatcaccccataaacaaataggtttggtcctagcctttctattagctcttagtaagattacacatgcaagcatccccattccagtgagttcaccctctaaatcaccacgatcaaaagggacaagcatcaagcacgcagcaatgcagctcaaaacgcttagcctagccacacccccacgggaaacagcagtgattaacctttagcaataaacgaaagtttaactaagctatactaaccccagggttggtcaatttcgtgccagccaccgcggtcacacgattaacccaagtcaatagaagccggcgtaaagagtgttttagatcaccccctccccaataaagctaaaactcacctgagttgtaaaaaactccagttgacacaaaatagactacgaaagtggctttaacatatctgaacacacaatagctaagacccaaactgggattagataccccactatgcttagccctaaacctcaacagttaaatcaacaaaactgctcgccagaacactacgagccacagcttaaaactcaaaggacctggcggtgcttcatacccctctagaggagcctgttctgtaatcgataaaccccgatcaacctcaccacctcttgctcagcctatataccgccatcttcagcaaaccctgatgaaggctacaaagtaagcgcaagtacccacgtaaagacgttaggtcaaggtgtagcccatgaggtggcaagaaatgggctacattttctaccccagaaaactacgatagcccttatgaaacttaagggtcgaaggtggatttagcagtaaactgagagtagagtgcttagttgaacagggccctgaagcgcgtacacaccgcccgtcaccctcctcaagtatacttcaaaggacatttaactaaaacccctacgcatttatatagaggagacaagtcgtaacatggtaagtgtactggaaagtgcacttggacgaaccagagtgtagcttaacacaaagcacccaacttacacttaggagatttcaacttaacttgaccgctctgagctaaacctagccccaaacccactccaccttactaccagacaaccttagccaaaccatttacccaaataaagtataggcgatagaaattgaaacctggcgcaatagatatagtaccgcaagggaaagatgaaaaattatagccaagcataatatagcaaggactaacccctataccttctgcataatgaattaactagaaataactttgcaaggagagccaaagctaagacccccgaaaccagacgagctacctaagaacagctaaaagagcacacccgtctatgtagcaaaatagtgggaagatttataggtagaggcgacaaacctaccgagcctggtgatagctggttgtccaagatagaatcttagttcaactttaaatttgcccacagaaccctctaaatccccttgtaaatttaactgttagtccaaagaggaacagctctttggacactaggaaaaaaccttgtagagagagtaaaaaatttaacacccatagtaggcctaaaagcagccaccaattaagaaagcgttcaagctcaacacccactacctaaaaaatcccaaacatataactgaactcctcacacccaattggaccaatctatcaccctatagaagaactaatgttagtataagtaacatgaaaacattctcctccgcataagcctgcgtcagattaaaacactgaactgacaattaacagcccaatatctacaatcaaccaacaagtcattattaccctcactgtcaacccaacacaggcatgctcataaggaaaggttaaaaaaagtaaaaggaactcggcaaatcttaccccgcctgtttaccaaaaacatcacctctagcatcaccagtattagaggcaccgcctgcccagtgacacatgtttaacggccgcggtaccctaaccgtgcaaaggtagcataatcacttgttccttaaatagggacctgtatgaatggctccacgagggttcagctgtctcttacttttaaccagtgaaattgacctgcccgtgaagaggcgggcatgacacagcaagacgagaagaccctatggagctttaatttattaatgcaaacagtacctaacaaacccacaggtcctaaactaccaaacctgcattaaaaatttcggttggggcgacctcggagcagaacccaacctccgagcagtacatgctaagacttcaccagtcaaagcgaactactatactcaattgatccaataacttgaccaacggaacaagttaccctagggataacagcgcaatcctattctagagtccatatcaacaatagggtttacgacctcgatgttggatcaggacatcccgatggtgcagccgctattaaaggttcgtttgttcaacgattaaagtcctacgtgatctgagttcagaccggagtaatccaggtcggtttctatctacnttcaaattcctccctgtacgaaaggacaagagaaataaggcctacttcacaaagcgccttcccccgtaaatgatatcatctcaacttagtattatacccacacccacccaagaacagggtttgttaagatggcagagcccggtaatcgcataaaacttaaaactttacagtcagaggttcaattcctcttcttaacaacatacccatggccaacctcctactcctcattgtacccattctaatcgcaatggcattcctaatgcttaccgaacgaaaaattctaggctatatacaactacgcaaaggccccaacgttgtaggcccctacgggctactacaacccttcgctgacgccataaaactcttcaccaaggagcccctaaaacccgccacatctaccatcaccctctacatcaccgccccgaccttagctctcaccatcgctcttctactatgaacccccctccccatacccaaccccctggtcaacctcaacctaggcctcctatttattctagccacctctagcctagccgtttactcaatcctctgatcagggtgagcatcaaactcaaactacgccctgatcggcgcactgcgagcagtagcccaaacaatctcatatgaagtcaccctagccatcattctactatcaacattactaataagtggctcctttaacctctccacccttatcacaacacaagaacacctctgattactcctgccatcatgacccttggccataatatgatttatctccacactagcagagaccaaccgaacccccttcgaccttgccgaaggggagtccgaactagtctcaggcttcaacatcgaatacgccgcaggccccttcgccctattcttcatagccgaatacacaaacattattataataaacaccctcaccactacaatcttcctaggaacaacatatgacgcactctcccctgaactctacacaacatattttgtcaccaagaccctacttctaacctccctgttcttatgaattcgaacagcatacccccgattccgctacgaccaactcatacacctcctatgaaaaaacttcctaccactcaccctagcattacttatatgatatgtctccatacccattacaatctccagcattccccctcaaacctaagaaatatgtctgataaaagagttactttgatagagtaaataataggagcttaaacccccttatttctaggactatgagaatcgaacccatccctgagaatccaaaattctccgtgccacctatcacaccccatcctaaagtaaggtcagctaaataagctatcgggcccataccccgaaaatgttggttatacccttcccgtactaattaatcccctggcccaacccgtcatctactctaccatctttgcaggcacactcatcacagcgctaagctcgcactgattttttacctgagtaggcctagaaataaacatgctagcttttattccagttctaaccaaaaaaataaaccctcgttccacagaagctgccatcaagtatttcctcacgcaagcaaccgcatccataatccttctaatagctatcctcttcaacaatatactctccggacaatgaaccataaccaatactaccaatcaatactcatcattaataatcataatggctatagcaataaaactaggaatagccccctttcacttctgagtcccagaggttacccaaggcacccctctgacatccggcctgcttcttctcacatgacaaaaactagcccccatctcaatcatataccaaatctctccctcactaaacgtaagccttctcctcactctctcaatcttatccatcatagcaggcagttgaggtggattaaaccaaacccagctacgcaaaatcttagcatactcctcaattacccacataggatgaataatagcagttctaccgtacaaccctaacataaccattcttaatttaactatttatattatcctaactactaccgcattcctactactcaacttaaactccagcaccacgaccctactactatctcgcacctgaaacaagctaacatgactaacacccttaattccatccaccctcctctccctaggaggcctgcccccgctaaccggctttttgcccaaatgggccattatcgaagaattcacaaaaaacaatagcctcatcatccccaccatcatagccaccatcaccctccttaacctctacttctacctacgcctaatctactccacctcaatcacactactccccatatctaacaacgtaaaaataaaatgacagtttgaacatacaaaacccaccccattcctccccacactcatcgcccttaccacgctactcctacctatctccccttttatactaataatcttatagaaatttaggttaaatacagaccaagagccttcaaagccctcagtaagttgcaatacttaatttctgtaacagctaaggactgcaaaaccccactctgcatcaactgaacgcaaatcagccactttaattaagctaagcccttactagaccaatgggacttaaacccacaaacacttagttaacagctaagcaccctaatcaactggcttcaatctacttctcccgccgccgggaaaaaaggcgggagaagccccggcaggtttgaagctgcttcttcgaatttgcaattcaatatgaaaatcacctcggagctggtaaaaagaggcctaacccctgtctttagatttacagtccaatgcttcactcagccattttacctcacccccactgatgttcgccaaccgttgactattctctacaaaccacaaagacattggaacactatacctattattcggcgcatgagctggagtcctaggcacagctctaagcctccttattcgagccgagctgggccagccaggcaaccttctaggtaacgaccacatctacaacgttatcgtcacagcccatgcatttgtaataatcttcttcatagtaatacccatcataatcggaggctttggcaactgactagttcccctaataatcggtgcccccgatatggcgtttccccgcataaacaacataagcttctgactcttacctccctctctcctactcctgctcgcatctgctatagtggaggccggagcaggaacaggttgaacagtctaccctcccttagcagggaactactcccaccctggagcctccgtagacctaaccatcttctccttacacctagcaggtgtctcctctatcttaggggccatcaatttcatcacaacaattatcaatataaaaccccctgccataacccaataccaaacgcccctcttcgtctgatccgtcctaatcacagcagtcctacttctcctatctctcccagtcctagctgctggcatcactatactactaacagaccgcaacctcaacaccaccttcttcgaccccgccggaggaggagaccccattctataccaacacctattctgatttttcggtcaccctgaagtttatattcttatcctaccaggcttcggaataatctcccatattgtaacttactactccggaaaaaaagaaccatttggatacataggtatggtctgagctatgatatcaattggcttcctagggtttatcgtgtgagcacaccatatatttacagtaggaatagacgtagacacacgagcatatttcacctccgctaccataatcatcgctatccccaccggcgtcaaagtatttagctgactcgccacactccacggaagcaatatgaaatgatctgctgcagtgctctgagccctaggattcatctttcttttcaccgtaggtggcctgactggcattgtattagcaaactcatcactagacatcgtactacacgacacgtactacgttgtagctcacttccactatgtcctatcaataggagctgtatttgccatcataggaggcttcattcactgatttcccctattctcaggctacaccctagaccaaacctacgccaaaatccatttcactatcatattcatcggcgtaaatctaactttcttcccacaacactttctcggcctatccggaatgccccgacgttactcggactaccccgatgcatacaccacatgaaacatcctatcatctgtaggctcattcatttctctaacagcagtaatattaataattttcatgatttgagaagccttcgcttcgaagcgaaaagtcctaatagtagaagaaccctccataaacctggagtgactatatggatgccccccaccctaccacacattcgaagaacccgtatacataaaatctagacaaaaaaggaaggaatcgaaccccccaaagctggtttcaagccaaccccatggcctccatgactttttcaaaaaggtattagaaaaaccatttcataactttgtcaaagttaaattataggctaaatcctatatatcttaatggcacatgcagcgcaagtaggtctacaagacgctacttcccctatcatagaagagcttatcacctttcatgatcacgccctcataatcattttccttatctgcttcctagtcctgtatgcccttttcctaacactcacaacaaaactaactaatactaacatctcagacgctcaggaaatagaaaccgtctgaactatcctgcccgccatcatcctagtcctcatcgccctcccatccctacgcatcctttacataacagacgaggtcaacgatccctcccttaccatcaaatcaattggccaccaatggtactgaacctacgagtacaccgactacggcggactaatcttcaactcctacatacttcccccattattcctagaaccaggcgacctgggactccttgacgttgacaatcgagtagtactcccgattgaagcccccattcgtataataattacatcacaagacgtcttgcactcatgagctgtccccacattaggcttaaaaacagatgcaattcccggacgtctaaaccaaaccactttcaccgctacacgaccgggggtatactacggtcaatgctctgaaatctgtggagcaaaccacagtttcatgcccatcgtcctagaattaattcccctaaaaatctttgaaatagggcccgtatttaccctatagcaccccctctaccccctctagagcccactgtaaagctaacttagcattaaccttttaagttaaagattaagagaaccaacacctctttacagtgaaatgccccaactaaatactaccgtatggcccaccataattacccccatactccttacactattcctcatcacccaactaaaaatattaaacacaaactaccacctacctccctcaccaaagcccataaaaataaaaaattataacaaaccctgagaaccaaaatgaacgaaaatctgttcgcttcattcattgcccccacaatcctaggcctacccgccgcagtactgatcattctatttccccctctattgatccccacctccaaatatctcatcaacaaccgactaatcaccacccaacaatgactaatcaaactaacctcaaaacaaatgataaccatacacaacactaaaggacgaacctgatctcttatactagtatccttaatcatttttattgccacaactaacctcctcggactcctgcctcactcatttacaccaaccacccaactatctataaacctagccatggccatccccttatgagcgggcgcagtgattataggctttcgctctaagattaaaaatgccctagcccacttcttaccacaaggcacacctacaccccttatccccatactagttattatcgaaaccatcagcctactcattcaaccaatagccctggccgtacgcctaaccgctaacattactgcaggccacctactcatgcacctaattggaagcaccaccctagcaatatcaaccattaaccttccctctacacttatcatcttcacaattctaattctactgactatcctagaaatcgctgtcgccttaatccaagcctacgttttcacacttctagtaagcctctacctgcacgacaacacataatgacccaccaatcacatgcctatcatatagtaaaacccagcccatgacccctaacaggggccctctcagccctcctaatgacctccggcctagccatgtgatttcacttccactccataacgctcctcatactaggcctactaaccaacacactaaccatataccaatgatggcgcgatgtaacacgagaaagcacataccaaggccaccacacaccacctgtccaaaaaggccttcgatacgggataatcctatttattacctcagaagtttttttcttcgcaggatttttctgagccttttaccactccagcctagcccctaccccccaattaggagggcactggcccccaacaggcatcaccccgctaaatcccctagaagtcccactcctaaacacatccgtattactcgcatcaggagtatcaatcacctgagctcaccatagtctaatagaaaacaaccgaaaccaaataattcaagcactgctcattacaattttactgggtctctattttaccctcctacaagcctcagagtacttcgagtctcccttcaccatttccgacggcatctacggctcaacattttttgtagccacaggcttccacggacttcacgtcattattggctcaactttcctcactatctgcttcatccgccaactaatatttcactttacatccaaacatcactttggcttcgaagccgccgcctgatactggcattttgtagatgtggtttgactatttctatatgtctccatctattgatgagggtcttactcttttagtataaatagtaccgttaacttccaattaactagttttgacaacattcaaaaaagagtaataaacttcgccttaattttaataatcaacaccctcctagccttactactaataattattacattttgactaccacaactcaacggctacatagaaaaatccaccccttacgagtgcggcttcgaccctatatcccccgcccgcgtccctttctccataaaattcttcttagtagctattaccttcttattatttgatctagaaattgccctccttttacccctaccatgggccctacaaacaactaacctgccactaatagttatgtcatccctcttattaatcatcatcctagccctaagtctggcctatgagtgactacaaaaaggattagactgagccgaattggtatatagtttaaacaaaacgaatgatttcgactcattaaattatgataatcatatttaccaaatgcccctcatttacataaatattatactagcatttaccatctcacttctaggaatactagtatatcgctcacacctcatgtcctccctactatgcctagaaggaataatactatcgctgttcattatagctactctcataaccctcaacacccactccctcttagccaatattgtgcctattgccatactagtctttgccgcctgcgaagcagcggtgggcctagccctactagtctcaatctccaacacatatggcctagactacgtacataacctaaacctactccaatgctaaaactaatcgtcccaacaattatattactaccactgacatgactttccaaaaaacacataatttgaatcaacacaaccacccacagcctaattattagcatcatccctctactattttttaaccaaatcaacaacaacctatttagctgttccccaaccttttcctccgaccccctaacaacccccctcctaatactaactacctgactcctacccctcacaatcatggcaagccaacgccacttatccagtgaaccactatcacgaaaaaaactctacctctctatactaatctccctacaaatctccttaattataacattcacagccacagaactaatcatattttatatcttcttcgaaaccacacttatccccaccttggctatcatcacccgatgaggcaaccagccagaacgcctgaacgcaggcacatacttcctattctacaccctagtaggctcccttcccctactcatcgcactaatttacactcacaacaccctaggctcactaaacattctactactcaccctcactgcccaagaactatcaaactcctgagccaacaacttaatatgactagcttacacaatagcttttatagtaaagatacctctttacggactccacttatgactccctaaagcccatgtcgaagcccccatcgctgggtcaatagtacttgccgcagtactcttgaaactaggcggctatggtataatacgcctcacactcattctcaaccccctgacaaaacacatagcctaccccttccttgtactatccctatgaggcataattataacaagctccatctgcctacgacaaacagacctaaaatcgctcattgcatactcttcaatcagccacatagccctcgtagtaacagccattctcatccaaaccccctgaagcttcaccggcgcagtcattctcataatcgcccacggacttacatcctcattactattctgcctagcaaactcaaactacgaacgcactcacagtcgcatcataatcctctctcaaggacttcaaactctactcccactaatagctttttgatgacttctagcaagcctcgctaacctcgccttaccccccactattaacctactgggagaactctctgtgctagtaaccacgttctcctggtcaaatatcactctcctacttacaggactcaacatactagtcacagccctatactccctctacatatttaccacaacacaatggggctcactcacccaccacattaacaacataaaaccctcattcacacgagaaaacaccctcatgttcatacacctatcccccattctcctcctatccctcaaccccgacatcattaccgggttttcctcttgtaaatatagtttaaccaaaacatcagattgtgaatctgacaacagaggcttacgaccccttatttaccgagaaagctcacaagaactgctaactcatgcccccatgtctaacaacatggctttctcaacttttaaaggataacagctatccattggtcttaggccccaagaattttggtgcaactccaaataaaagtaataaccatgcacactactataaccaccctaaccctaacttccctaattccccccatccttaccaccctcgttaaccctaacaaaaaaaactcatacccccattatgtaaaatccattgtcgcatccacctttattatcagtctcttccccacaacaatattcatgtgcctagaccaagaagttattatctcgaactgacactgagccacaacccaaacaacccagctctccctaagcttcaaactagactacttctccataatattcatccctgtagcattgttcgttacatggtccatcatagaattctcactgtgatatataaactcagacccaaacattaatcagttcttcaaatatctactcatcttcctaattaccatactaatcttagttaccgctaacaacctattccaactgttcatcggctgagagggcgtaggaattatatccttcttgctcatcagttgatgatacgcccgagcagatgccaacacagcagccattcaagcaatcctatacaaccgtatcggcgatatcggtttcatcctcgccttagcatgatttatcctacactccaactcatgagacccacaacaaatagcccttctaaacgctaatccaagcctcaccccactactaggcctcctcctagcagcagcaggcaaatcagcccaattaggtctccacccctgactcccctcagccatagaaggccccaccccagtctcagccctactccactcaagcactatagttgtagcaggaatcttcttactcatccgcttccaccccctagcagaaaatagcccactaatccaaactctaacactatgcttaggcgctatcaccactctgttcgcagcagtctgcgcccttacacaaaatgacatcaaaaaaatcgtagccttctccacttcaagtcaactaggactcataatagttacaatcggcatcaaccaaccacacctagcattcctgcacatctgtacccacgccttcttcaaagccatactatttatgtgctccgggtccatcatccacaaccttaacaatgaacaagatattcgaaaaataggaggactactcaaaaccatacctctcacttcaacctccctcaccattggcagcctagcattagcaggaatacctttcctcacaggtttctactccaaagaccacatcatcgaaaccgcaaacatatcatacacaaacgcctgagccctatctattactctcatcgctacctccctgacaagcgcctatagcactcgaataattcttctcaccctaacaggtcaacctcgcttccccacccttactaacattaacgaaaataaccccaccctactaaaccccattaaacgcctggcagccggaagcctattcgcaggatttctcattactaacaacatttcccccgcatcccccttccaaacaacaatccccctctacctaaaactcacagccctcgctgtcactttcctaggacttctaacagccctagacctcaactacctaaccaacaaacttaaaataaaatccccactatgcacattttatttctccaacatactcggattctaccctagcatcacacaccgcacaatcccctatctaggccttcttatgagccaaaacctgcccctactcctcctagacctaacctgactagaaaagctattacctaaaacaatttcacagcaccaaatctccacctccatcatcacctcaacccaaaaaggcataattaaactttacttcctctctttcttcttcccactcatcctaaccctactcctaatcacataacctattcccccgagcaatttcaattacaatatatacaccaacaaacaatgttcaaccagtaactactactaatcaacgcccataatcatacaaagcccccgcaccaataggatcctcccgaatcaaccctgacccctctccttcataaattattcagctccctacactattaaagtttaccacaaccaccaccccatcatactctttcacccacagcaccaatcctacctccatcgctaaccccactaaaacactcaccaagacctcaacccctgacccccatgcctcaggatactcctcaatagccatcgctgtagtatatccaaagacaaccatcattccccctaaataaattaaaaaaactattaaacccatataacctcccccaaaattcagaataataacacacccgaccacaccgctaacaatcaatactaaacccccataaataggagaaggcttagaagaaaaccccacaaaccccattactaaacccacactcaacagaaacaaagcatacatcattattctcgcacggactacaaccacgaccaatgatatgaaaaaccatcgttgtatttcaactacaagaacaccaatgaccccaatacgcaaaattaaccccctaataaaattaattaaccactcactcatcgacctccccaccccatccaacatctccgcatgatgaaacttcggctcactccttggcgcctgcctgatcctccaaatcaccacaggactattcctagccatgcactactcaccagacgcctcaaccgccttttcatcaatcgcccacatcactcgagacgtaaattatggctgaatcatccgctaccttcacgccaatggcgcctcaatattctttatctgcctcttcctacacatcgggcgaggcctatattacggatcatttctctactcagaaacctgaaacatcggcattatcctcctgcttgcaactatagcaacagccttcataggctatgtcctcccgtgaggccaaatatcattctgaggggccacagtaattacaaacttactatccgccatcccatacattgggacagacctagttcaatgaatctgaggaggctactcagtaaacagtcccaccctcacacgattctttacctttcacttcatcttgcccttcattattgcagccctagcagcactccacctcctattcttgcacgaaacgggatcaaacaaccccctaggaatcacctcccattccgataaaatcaccttccacccttactacacaatcaaagacgccctcggcttacttctcttccttctctccttaatgacattaacactattctcaccagacctcctaggcgacccagacaattataccctagccaaccccttaaacacccctccccacatcaagcccgaatgatatttcctattcgcctacacaattctccgatccgtccctaacaaactaggaggcgtccttgccctattactatccatcctcatcctagcaataatccccatcctccatatatccaaacaacaaagcataatatttcgcccactaagccaatcactttattgactcctagccgcagacctcctcattctaacctgaatcggaggacaaccagtaagctacccttttaccatcattggacaagtagcatccgtactatacttcacaacaatcctaatcctaataccaactatctccctaattgaaaacaaaatactcaaatgggcctgtccttgtagtataaactaatacaccagtcttgtaaaccggagatgaaaacctttttctaaggacaaatcagagaaaaagtctttaactccaccattagcacccaaagctaagattctaatttaaactattctctgttctttcatggggaagcagatttgggtaccacccaagtattgactcacccatcaacaaccgctatgtatttcgtacattactgccagccaccatgaatattgtacggtaccataaatacttgaccacctgtagtacataaaaacccaatccacatcaaaaccccctccccatgcttacaagcaagtacagcaatcaacccccaactatcacacatcaactgcaactccaaagccacccctcacccactaggataccaacaaacctacccacccttaacagtacatagcacataaaaccatttaccgtacatagcacattacagtcaaatcccttctcgtccccatggatgacccccctcagataggggtcccttgaccaccatcctccgtgaaatcaatatcccgcacaagagtgctactctcctcgctccgggcccatgacacttgggggtagctaaagtgaactgtatccgacatctggttcctacttcagggccataaagcctaaatagcccacacgttccccttaaataagacatcacgatg

SEQ ID NO: 240 - DNA, 16570 bp, Homo sapiens mitochondrial
  3108: "n" refers to a nucleotide at position 3107 of the Cambridge Reference Sequence (CRS, Anderson et al. 1981 Nature 290:457-465), later determined to be absent from the human mtDNA sequence according to the revised CRS (rCRS, Andrews et al. 1999 Nature Genetics 23:147); "n" therefore represents a single nucleotide deletion at a position corresponding to nucleotide 3107 of SEQ ID NO:1 as provided herein.
gatcacaggtctatcaccctattaaccactcacgggagctctccatgcatttggtattttcgtctggggggtatgcacgcgatagcattgcgagacgctggagccggagcaccctatgtcgcagtatctgtctttgattcctgcctcatcctattatttatcgcacctacgttcaatattacaggcgaacatacttactaaagtgtgttaattaattaatgcttgtaggacataataataacaattgaatgtctgcacagccgctttccacacagacatcataacaaaaaatttccaccaaaccccccctcccccgccttctggccacagcacttaaacacatctctgccaaaccccaaaaacaaagaaccctaacaccagcctaaccagatttcaaattttatcttttggcggtatgcacttttaacagtcaccccccaactaacacattattttcccctcccactcccatactactaatctcatcaatacaacccccgcccatcctacccagcacacacacaccgctgctaaccccataccccgaaccaaccaaaccccaaagacaccccccacagtttatgtagcttacctcctcaaagcaatacactgaaaatgtttagacgggctcacatcaccccataaacaaataggtttggtcctagcctttctattagctcttagtaagattacacatgcaagcatccccgttccagtgagttcaccctctaaatcaccacgatcaaaagggacaagcatcaagcacgcagcaatgcagctcaaaacgcttagcctagccacacccccacgggaaacagcagtgattaacctttagcaataaacgaaagtttaactaagctatactaaccccagggttggtcaatttcgtgccagccaccgcggtcacacgattaacccaagtcaatagaagccggcgtaaagagtgttttagatcaccccctccccaataaagctaaaactcacctgagttgtaaaaaactccagttgacacaaaatagactacgaaagtggctttaacatatctgaacacacaatagctaagacccaaactgggattagataccccactatgcttagccctaaacctcaacagttaaatcaacaaaactgctcgccagaacactacgagccacagcttaaaactcaaaggacctggcggtgcttcatatccctctagaggagcctgttctgtaatcgataaaccccgatcaacctcaccacctcttgctcagcctatataccgccatcttcagcaaaccctgatgaaggctacaaagtaagcgcaagtacccacgtaaagacgttaggtcaaggtgtagcccatgaggtggcaagaaatgggctacattttctaccccagaaaactacgatagcccttatgaaacttaagggtcgaaggtggatttagcagtaaactgagagtagagtgcttagttgaacagggccctgaagcgcgtacacaccgcccgtcaccctcctcaagtatacttcaaaggacatttaactaaaacccctacgcatttatatagaggagacaagtcgtaacatggtaagtgtactggaaagtgcacttggacgaaccagagtgtagcttaacacaaagcacccaacttacacttaggagatttcaacttaacttgaccgctctgagctaaacctagccccaaacccactccaccttactaccagacaaccttagccaaaccatttacccaaataaagtataggcgatagaaattgaaacctggcgcaatagatatagtaccgcaagggaaagatgaaaaattataaccaagcataatatagcaaggactaacccctataccttctgcataatgaattaactagaaataactttgcaaggagagccaaagctaagacccccgaaaccagacgagctacctaagaacagctaaaagagcacacccgtctatgtagcaaaatagtgggaagatttataggtagaggcgacaaacctaccgagcctggtgatagctggttgtccaagatagaatcttagttcaactttaaatttgcccacagaaccctctaaatccccttgtaaatttaactgttagtccaaagaggaacagctctttggacactaggaaaaaaccttgtagagagagtaaaaaatttaacacccatagtaggcctaaaagcagccaccaattaagaaagcgttcaagctcaacacccactacctaaaaaatcccaaacatataactgaactcctcacacccaattggaccaatctatcaccctatagaagaactaatgttagtataagtaacatgaaaacattctcctccgcataagcctgcgtcagattaaaacactgaactgacaattaacagcccaatatctacaatcaaccaacaagtcattattaccctcactgtcaacccaacacaggcatgctcataaggaaaggttaaaaaaagtaaaaggaactcggcaaatcttaccccgcctgtttaccaaaaacatcacctctagcatcaccagtattagaggcaccgcctgcccagtgacacatgtttaacggccgcggtaccctaaccgtgcaaaggtagcataatcacttgttccttaaatagggacctgtatgaatggctccacgagggttcagctgtctcttacttttaaccagtgaaattgacctgcccgtgaagaggcgggcataacacagcaagacgagaagaccctatggagctttaatttattaatgcaaacagtacctaacaaacccacaggtcctaaactaccaaacctgcattaaaaatttcggttggggcgacctcggagcagaacccaacctccgagcagtacatgctaagacttcaccagtcaaagcgaactactatactcaattgatccaataacttgaccaacggaacaagttaccctagggataacagcgcaatcctattctagagtccatatcaacaatagggtttacgacctcgatgttggatcaggacatcccgatggtgcagccgctattaaaggttcgtttgttcaacgattaaagtcctacgtgatctgagttcagaccggagtaatccaggtcggtttctatctacnttcaaattcctccctgtacgaaaggacaagagaaataaggcctacttcacaaagcgccttcccccgtaaatgatatcatctcaacttagtattatacccacacccacccaagaacagggtttgttaagatggcagagcccggtaatcgcataaaacttaaaactttacagtcagaggttcaattcctcttcttaacaacatacccatggccaacctcctactcctcattgtacccattctaatcgcaatggcattcctaatgcttaccgaacgaaaaattctaggctatatacaactacgcaaaggccccaacgttgtaggcccctacgggctactacaacccttcgctgacgccataaaactcttcaccaaagagcccctaaaacccgccacatctaccatcaccctctacatcaccgccccgaccttagctctcaccatcgctcttctactatgaacccccctccccatacccaaccccctggtcaacctcaacctaggcctcctatttattctagccacctctagcctagccgtttactcaatcctctgatcagggtgagcatcaaactcaaactacgccctgatcggcgcactgcgagcagtagcccaaacaatctcatatgaagtcaccctagccatcattctactatcaacattactaataagtggctcctttaacctctccacccttatcacaacacaagaacacctctgattactcctgccatcatgacccttggccataatatgatttatctccacactagcagagaccaaccgaacccccttcgaccttgccgaaggggagtccgaactagtctcaggcttcaacatcgaatacgccgcaggccccttcgccctattcttcatagccgaatacacaaacattattataataaacaccctcaccactacaatcttcctaggaacaacatatgacgcactctcccctgaactctacacaacatattttgtcaccaagaccctacttctaacctccctgttcttatgaattcgaacagcatacccccgattccgctacgaccaactcatacacctcctatgaaaaaacttcctaccactcaccctagcattacttatatgatatgtctccatacccattacaatctccagcattccccctcaaacctaagaaatatgtctgataaaagagttactttgatagagtaaataataggagcttaaacccccttatttctaggactatgagaatcgaacccatccctgagaatccaaaattctccgtgccacctatcacaccccatcctaaagtaaggtcagctaaataagctatcgggcccataccccgaaaatgttggttatacccttcccgtactaattaatcccctggcccaacccgtcatctactctaccatctttgcaggcacactcatcacagcgctaagctcgcactgattttttacctgagtaggcctagaaataaacatgctagcttttattccagttctaaccaaaaaaataaaccctcgttccacagaagctgccatcaagtatttcctcacgcaagcaaccgcatccataatccttctaatagctatcctcttcaacaatatactctccggacaatgaaccataaccaatactaccaatcaatactcatcattaataatcataatggctatagcaataaaactaggaatagccccctttcacttctgagtcccagaggttacccaaggcacccctctgacatccggcctgcttcttctcacatgacaaaaactagcccccatctcaatcatataccaaatctctccctcactaaacgtaagccttctcctcactctctcaatcttatccatcatagcaggcagttgaggtggattaaaccaaacccagctacgcaaaatcttagcatactcctcaattacccacataggatgaataatagcagttctaccgtacaaccctaacataaccattcttaatttaactatttatattatcctaactactaccgcattcctactactcaacttaaactccagcaccacgaccctactactatctcgcacctgaaacaagctaacatgactaacacccttaattccatccaccctcctctccctaggaggcctgcccccgctaaccggctttttgcccaaatgggccattatcgaagaattcacaaaaaacaatagcctcatcatccccaccatcatagccaccatcaccctccttaacctctacttctacctacgcctaatctactccacctcaatcacactactccccatatctaacaacgtaaaaataaaatgacagtttgaacatacaaaacccaccccattcctccccacactcatcgcccttaccacgctactcctacctatctccccttttatactaataatcttatagaaatttaggttaaatacagaccaagagccttcaaagccctcagtaagttgcaatacttaatttctgtaacagctaaggactgcaaaaccccactctgcatcaactgaacgcaaatcagccactttaattaagctaagcccttactagaccaatgggacttaaacccacaaacacttagttaacagctaagcaccctaatcaactggcttcaatctacttctcccgccgccgggaaaaaaggcgggagaagccccggcaggtttgaagctgcttcttcgaatttgcaattcaatatgaaaatcacctcggagctggtaaaaagaggcctaacccctgtctttagatttacagtccaatgcttcactcagccattttacctcacccccactgatgttcgccgaccgttgactattctctacaaaccacaaagacattggaacactatacctattattcggcgcatgagctggagtcctaggcacagctctaagcctccttattcgagccgagctgggccagccaggcaaccttctaggtaacgaccacatctacaacgttatcgtcacagcccatgcatttgtaataatcttcttcatagtaatacccatcataatcggaggctttggcaactgactagttcccctaataatcggtgcccccgatatggcgtttccccgcataaacaacataagcttctgactcttacctccctctctcctactcctgctcgcatctgctatagtggaggccggagcaggaacaggttgaacagtctaccctcccttagcagggaactactcccaccctggagcctccgtagacctaaccatcttctccttacacctagcaggtgtctcctctatcttaggggccatcaatttcatcacaacaattatcaatataaaaccccctgccataacccaataccaaacgcccctcttcgtctgatccgtcctaatcacagcagtcctacttctcctatctctcccagtcctagctgctggcatcactatactactaacagaccgcaacctcaacaccaccttcttcgaccccgccggaggaggagaccccattctataccaacacctattctgatttttcggtcaccctgaagtttatattcttatcctaccaggcttcggaataatctcccatattgtaacttactactccggaaaaaaagaaccatttggatacataggtatggtctgagctatgatatcaattggcttcctagggtttatcgtgtgagcacaccacatatttacagtaggaatagacgtagacacacgagcatatttcacctccgctaccataatcatcgctatccccaccggcgtcaaagtatttagctgactcgccacactccacggaagcaatatgaaatgatctgctgcagtgctctgagccctaggattcatctttcttttcaccgtaggtggcctgactggcattgtattagcaaactcatcactagacatcgtactacacgacacgtactacgttgtagcccacttccactatgtcctatcaataggagctgtatttgccatcataggaggcttcattcactgatttcccctattctcaggctacaccctagaccaaacctacgccaaaatccatttcactatcatattcatcggcgtaaatctaactttcttcccacaacactttctcggcctatccggaatgccccgacgttactcggactaccccgatgcatacaccacatgaaacatcctatcatctgtaggctcattcatttctctaacagcagtaatattaataattttcatgatttgagaagccttcgcttcgaagcgaaaagtcctaatagtagaagaaccctccataaacctggagtgactatatggatgccccccaccctaccacacattcgaagagcccgtatacataaaatctagacaaaaaaggaaggaatcgaaccccccaaagctggtttcaagccaaccccatggcctccatgactttttcaaaaaggtattagaaaaaccatttcataactttgtcaaagttaaattataggctaaatcctatatatcttaatggcacatgcagcgcaagtaggtctacaagacgctacttcccctatcatagaagagcttatcacctttcatgatcacgccctcataatcattttccttatctgcttcctagtcctgtatgcccttttcctaacactcacaacaaaactaactaatactaacatctcagacgctcaggaaatagaaaccgtctgaactatcctgcccgccatcatcctagtcctcatcgccctcccatccctacgcatcctttacataacagacgaggtcaacgatccctcccttaccatcaaatcaattggccaccaatggtactgaacctacgagtacaccgactacggcggactaatcttcaactcctacatacttcccccattattcctagaaccaggcgacctgcgactccttgacgttgacaatcgagtagtactcccgattgaagcccccattcgtataataattacatcacaagacgtcttgcactcatgagctgtccccacattaggcttaaaaacagatgcaattcccggacgtctaaaccaaaccactttcaccgctacacgaccgggggtatactacggtcaatgctctgaaatctgtggagcaaaccacagtttcatgcccatcgtcctagaattaattcccctaaaaatctttgaaatagggcccgtatttaccctatagcaccccctctaccccctctagagcccactgtaaagctaacttagcattaaccttttaagttaaagattaagagaaccaacacctctttacagtgaaatgccccaactaaatactaccgtatggcccaccataattacccccatactccttacactattcctcatcacccaactaaaaatattaaacacaaactaccacctacctccctcaccaaagcccataaaaataaaaaattataacaaaccctgagaaccaaaatgaacgaaaatctgttcgcttcattcattgcccccacaatcctaggcctacccgccgcagtactgatcattctatttccccctctattgatccccacctccaaatatctcatcaacaaccgactaatcaccacccaacaatgactaatcaaactaacctcaaaacaaatgataaccatacacaacactaaaggacgaacctgatctcttatactagtatccttaatcatttttattgccacaactaacctcctcggactcctgcctcactcatttacaccaaccacccaactatctataaacctagccatggccatccccttatgagcgggcgcagtgattataggctttcgctctaagattaaaaatgccctagcccacttcttaccacaaggcacacctacaccccttatccccatactagttattatcgaaaccatcagcctactcattcaaccaatagccctggccgtacgcctaaccgctaacattactgcaggccacctactcatgcacctaattggaagcgccaccctagcaatatcaaccattaaccttccctctacacttatcatcttcacaattctaattctactgactatcctagaaatcgctgtcgccttaatccaagcctacgttttcacacttctagtaagcctctacctgcacgacaacacataatgacccaccaatcacatgcctatcatatagtaaaacccagcccatgacccctaacaggggccctctcagccctcctaatgacctccggcctagccatgtgatttcacttccactccataacgctcctcatactaggcctactaaccaacacactaaccatataccaatgatggcgcgatgtaacacgagaaagcacataccaaggccaccacacaccacctgtccaaaaaggccttcgatacgggataatcctatttattacctcagaagtttttttcttcgcaggatttttctgagccttttaccactccagcctagcccctaccccccaattaggagggcactggcccccaacaggcatcaccccgctaaatcccctagaagtcccactcctaaacacatccgtattactcgcatcaggagtatcaatcacctgagctcaccatagtctaatagaaaacaaccgaaaccaaataattcaagcactgcttattacaattttactgggtctctattttaccctcctacaagcctcagagtacttcgagtctccctttaccatttccgacggcatctacggctcaacattttttgtagccacaggcttccacggacttcacgtcattattggctcaactttcctcactatctgcttcatccgccaactaatatttcactttacatccaaacatcactttggcttcgaagccgccgcctgatactggcattttgtagatgtggtttgactatttctgtatgtctccatctattgatgagggtcttactcttttagtataaatagtaccgttaacttccaattaactagttttgacaacattcaaaaaagagtaataaacttcgccttaattttaataatcaacaccctcctagccttactactaataattattacattttgactaccacaactcaacggctacatagaaaaatccaccccttacgagtgcggcttcgaccctatatcccccgcccgcgtccctttctccataaaattcttcttagtagctattaccttcttattatttgatctagaaattgccctccttttacccctaccatgagccctacaaacaactaacctgccactaatagttatgtcatccctcttattaatcatcatcctagccctaagtctggcctatgagtgactacaaaaaggattagactgaaccgaattggtatatagtttaaacaaaacgaatgatttcgactcattaaattatgataatcatatttaccaaatgcccctcatttacataaatattatactagcatttaccatctcacttctaggaatactagtatatcgctcacacctcatatcctccctactatgcctagaaggaataatactatcgctgttcattatagctactctcataaccctcaacacccactccctcttagccaatattgtgcctattgccatactagtctttgccgcctgcgaagcagcggtgggcctagccctactagtctcaatctccaacacatatggcctagactacgtacataacctaaacctactccaatgctaaaactaatcgtcccaacaattatattactaccactgacatgactttccaaaaaacacataatttgaatcaacacaaccacccacagcctaattattagcatcatccctctactattttttaaccaaatcaacaacaacctatttagctgttccccaaccttttcctccgaccccctaacaacccccctcctaatactaactacctgactcctacccctcacaatcatggcaagccaacgccacttatccagtgaaccactatcacgaaaaaaactctacctctctatactaatctccctacaaatctccttaattataacattcacagccacagaactaatcatattttatatcttcttcgaaaccacacttatccccaccttggctatcatcacccgatgaggcaaccagccagaacgcctgaacgcaggcacatacttcctattctacaccctagtaggctcccttcccctactcatcgcactaatttacactcacaacaccctaggctcactaaacattctactactcactctcactgcccaagaactatcaaactcctgagccaacaacttaatatgactagcttacacaatagcttttatagtaaagatacctctttacggactccacttatgactccctaaagcccatgtcgaagcccccatcgctgggtcaatagtacttgccgcagtactcttaaaactaggcggctatggtataatacgcctcacactcattctcaaccccctgacaaaacacatagcctaccccttccttgtactatccctatgaggcataattataacaagctccatctgcctacgacaaacagacctaaaatcgctcattgcatactcttcaatcagccacatagccctcgtagtaacagccattctcatccaaaccccctgaagcttcaccggcgcagtcattctcataatcgcccacgggcttacatcctcattactattctgcctagcaaactcaaactacgaacgcactcacagtcgcatcataatcctctctcaaggacttcaaactctactcccactaatagctttttgatgacttctagcaagcctcgctaacctcgccttaccccccactattaacctactgggagaactctctgtgctagtaaccacgttctcctgatcaaatatcactctcctacttacaggactcaacatactagtcacagccctatactccctctacatatttaccacaacacaatggggctcactcacccaccacattaacaacataaaaccctcattcacacgagaaaacaccctcatgttcatacacctatcccccattctcctcctatccctcaaccccgacatcattaccgggttttcctcttgtaaatatagtttaaccaaaacatcagattgtgaatctgacaacagaggcttacgaccccttatttaccgagaaagctcacaagaactgctaactcatgcccccatgtctaacaacatggctttctcaacttttaaaggataacagctatccattggtcttaggccccaaaaattttggtgcaactccaaataaaagtaataaccatgcacactactataaccaccctaaccctgacttccctaattccccccatccttaccaccctcgttaaccctaacaaaaaaaactcatacccccattatgtaaaatccattgtcgcatccacctttattatcagtctcttccccacaacaatattcatgtgcctagaccaagaagttattatctcgaactgacactgagccacaacccaaacaacccagctctccctaagcttcaaactagactacttctccataatattcatccctgtagcattgttcgttacatggtccatcatagaattctcactgtgatatataaactcagacccaaacattaatcagttcttcaaatatctactcatcttcctaattaccatactaatcttagttaccgctaacaacctattccaactgttcatcggctgagagggcgtaggaattatatccttcttgctcatcagttgatgatacgcccgagcagatgccaacacagcagccattcaagcaatcctatacaaccgtatcggcgatatcggtttcatcctcgccttagcatgatttatcctacactccaactcatgagacccacaacaaatagcccttctaaacgctaatccaagcctcaccccactactaggcctcctcctagcagcagcaggcaaatcagcccaattaggtctccacccctgactcccctcagccatagaaggccccaccccagtctcagccctactccactcaagcactatagttgtagcaggaatcttcttactcatccgcttccaccccctagcagaaaatagcccactaatccaaactctaacactatgcttaggcgctatcaccactctgttcgcagcagtctgcgcccttacacaaaatgacatcaaaaaaatcgtagccttctccacttcaagtcaactaggactcataatagttacaatcggcatcaaccaaccacacctagcattcctgcacatctgtacccacgccttcttcaaagccatactatttatgtgctccgggtccatcatccacaaccttaacaatgaacaagatattcgaaaaataggaggactactcaaaaccatacctctcacttcaacctccctcaccattggcagcctagcattagcaggaatacctttcctcacaggtttctactccaaagaccacatcatcgaaaccgcaaacatatcatacacaaacgcctgagccctatctattactctcatcgctacctccctgacaagcgcctatagcactcgaataattcttctcaccctaacaggtcaacctcgcttccccacccttactaacattaacgaaaataaccccaccctactaaaccccattaaacgcctggcagccggaagcctattcgcaggatttctcattactaacaacatttcccccgcatcccccttccaaacaacaatccccctctacctaaaactcacagccctcgctgtcactttcctaggacttctaacagccctagacctcaactacctaaccaacaaacttaaaataaaatccccactatgcacattttatttctccaacatactcggattctaccctagcatcacacaccgcacaatcccctatctaggccttcttacgagccaaaacctgcccctactcctcctagacctaacctgactagaaaagctattacctaaaacaatttcacagcaccaaatctccacctccatcatcacctcaacccaaaaaggcataattaaactttacttcctctctttcttcttcccactcatcctaaccctactcctaatcacataacctattcccccgagcaatctcaattacaatatatacaccaacaaacaatgttcaaccagtaactactactaatcaacgcccataatcatacaaagcccccgcaccaataggatcctcccgaatcaaccctgacccctctccttcataaattattcagcttcctacactattaaagtttaccacaaccaccaccccatcatactctttcacccacagcaccaatcctacctccatcgctaaccccactaaaacactcaccaagacctcaacccctgacccccatgcctcaggatactcctcaatagccatcgctgtagtatatccaaagacaaccatcattccccctaaataaattaaaaaaactattaaacccatataacctcccccaaaattcagaataataacacacccgaccacaccgctaacaatcaatactaaacccccataaataggagaaggcttagaagaaaaccccacaaaccccattactaaacccacactcaacagaaacaaagcatacatcattattctcgcacggactacaaccacgaccaatgatatgaaaaaccatcgttgtatttcaactacaagaacaccaatgaccccaatacgcaaaactaaccccctaataaaattaattaaccactcattcatcgacctccccaccccatccaacatctccgcatgatgaaacttcggctcactccttggcgcctgcctgatcctccaaatcaccacaggactattcctagccatgcactactcaccagacgcctcaaccgccttttcatcaatcgcccacatcactcgagacgtaaattatggctgaatcatccgctaccttcacgccaatggcgcctcaatattctttatctgcctcttcctacacatcgggcgaggcctatattacggatcatttctctactcagaaacctgaaacatcggcattatcctcctgcttgcaactatagcaacagccttcataggctatgtcctcccgtgaggccaaatatcattctgaggggccacagtaattacaaacttactatccgccatcccatacattgggacagacctagttcaatgaatctgaggaggctactcagtagacagtcccaccctcacacgattctttacctttcacttcatcttgcccttcattattgcagccctagcagcactccacctcctattcttgcacgaaacgggatcaaacaaccccctaggaatcacctcccattccgataaaatcaccttccacccttactacacaatcaaagacgccctcggcttacttctcttccttctctccttaatgacattaacactattctcaccagacctcctaggcgacccagacaattataccctagccaaccccttaaacacccctccccacatcaagcccgaatgatatttcctattcgcctacacaattctccgatccgtccctaacaaactaggaggcgtccttgccctattactatccatcctcatcctagcaataatccccatcctccatatatccaaacaacaaagcataatatttcgcccactaagccaatcactttattgactcctagccgcagacctcctcattctaacctgaatcggaggacaaccagtaagctacccttttaccatcattggacaagtagcatccgtactatacttcacaacaatcctaatcctaataccaactatctccctaattgaaaacaaaatactcaaatgggcctgtccttgtagtataaactaatacaccagtcttgtaaaccggagatgaaaacctttttccaaggacaaatcagagaaaaagtctttaactccaccattagcacccaaagctaagattctaatttaaactattctctgttctttcatggggaagcagatttgggtaccacccaagtattgactcacccatcaacaaccgctatgtatttcgtacattactgccagccaccatgaatattgtacagtaccataaatacttgaccacctgtagtacataaaaacccaatccacatcaaaaccccctccccatgcttacaagcaagtacagcaatcaaccctcaactatcacacatcaactgcaactccaaagccaccccttacccactaggataccaacaaacctacccacccttaacagtacatagcacataaagccatttaccgtacatagcacattacagtcaaatcccttctcgtccccatggatgacccccctcagataggggtcccttgaccaccatcctccgtgaaatcaatatcccgcacaagagtgctactctcctcgctccgggcccataacacttgggggtagctaaagtgaactgtatccgacatctggttcctacttcagggtcataaagcctaaatagcccacacgttccccttaaataagacatcacgatg

SEQ ID NO: 241 - DNA, 16571 bp, Homo sapiens mitochondrial
  3109: "n" refers to a nucleotide at position 3107 of the Cambridge Reference Sequence (CRS, Anderson et al. 1981 Nature 290:457-465), later determined to be absent from the human mtDNA sequence according to the revised CRS (rCRS, Andrews et al. 1999 Nature Genetics 23:147); "n" therefore represents a single nucleotide deletion at a position corresponding to nucleotide 3107 of SEQ ID NO:1 as provided herein.
gatcacaggtctatcaccctattaaccactcacgggagctctccatgcatttggtattttcgtctggggggtgtgcacgcgatagcattgcgagacgctggagccggagcaccttatgtcgcagtatctgtctttgattcctgcctcatcctattatttatcgcacctacgttcaatattacaggcgaacatacttactaaagtgtgttaattaattaatgcttgtaggacataataataacaattgaatgtctgcacagccgctttccacacagacatcataacaaaaaatttccaccaaaccccccctcccccccgcttctggccacagcacttaaacacatctctgccaaaccccaaaaacaaagaaccctaacaccagcctaaccagatttcaaattttatcttttggcggtatgcacttttaacagtcaccccccaactaacacattattttcccctcccactcccatactactaatctcatcaatacaaccctcgcccatcctacccagcacacacacaccgctgctaaccccataccccgaaccaaccaaaccccaaagacaccccccacagtttatgtagcttacctcctcaaagcaatacactgaaaatgtttagacgggctcacatcaccccataaacaaataggtttggtcctagcctttctattagctcttagtaagattacacatgcaagcatccccgttccagtgagttcaccctctaaatcaccacgatcaaaagggacaagcatcaagcacgcagcaatgcagctcaaaacgcttagcctagccacacccccacgggaaacagcagtgattaacctttagcaataaacgaaagtttaactaagctatactaaccccagggttggtcaatttcgtgccagccaccgcggtcacacgattaacccaagtcaatagaagccggcgtaaagagtgttttagatcaccccctccccaataaagctaaaactcacctgagttgtaaaaaactccagttgacacaaaatagactacgaaagtggctttaacatatctgaacacacaatagctaagacccaaactgggattagataccccactatgcttagccctaaacctcaacagttaaatcaacaaaactgctcgccagaacactacgagccacagcttaaaactcaaaggacctggcggtgcttcatacccctctagaggagcctgttctgtaatcgataaaccccgatcaacctcaccacctcttgctcagcctatataccgccatcttcagcaaaccctgatgaaggctacaaagtaagcgcaagtacccacgtaaagacgttaggtcaaggtgtagcccatgaggtggcaagaaatgggctacattttctaccccagaaaactacgatagcccttatgaaacttaagggtcgaaggtggatttagcagtaaactgagagtagagtgcttagttgaacagggccctgaagcgcgtacacaccgcccgtcaccctcctcaagtatacttcaaaggacatttaactaaaacccctacgcatttatatagaggagacaagtcgtaacatggtaagtgtactggaaagtgcacttggacgaaccagagtgtagcttaacacaaagcacccaacttacacttaggagatttcaacttaacttgaccgctctgagctaaacctagccccaaacccactccaccttactaccagacaaccttagccaaaccatttacccaaataaagtataggcgatagaaattgaaacctggcgcaatagatatagtaccgcaagggaaagatgaaaaattatagccaagcataatatagcaaggactaacccctataccttctgcataatgaattaactagaaataactttgcaaggagagccaaagctaagacccccgaaaccagacgagctacctaagaacagctaaaagagcacacccgtctatgtagcaaaatagtgggaagatttataggtagaggcgacaaacctaccgagcctggtgatagctggttgtccaagatagaatcttagttcaactttaaatttgcccacagaaccctctaaatccccttgtaaatttaactgttagtccaaagaggaacagctctttggacactaggaaaaaaccttgtagagagagtaaaaaatttaacacccatagtaggcctaaaagcagccaccaattaagaaagcgttcaagctcaacacccactacctaaaaaatcccaaacatataactgaactcctcacacccaattggaccaatctatcaccctatagaagaactaatgttagtataagtaacatgaaaacattctcctccgcataagcctgcgtcagattaaaacactgaactgacaattaacagcccaatatctacaatcaaccaacaagtcattattaccctcactgtcaacccaacacaggcatgctcataaggaaaggttaaaaaaagtaaaaggaactcggcaaatcttaccccgcctgtttaccaaaaacatcacctctagcatcaccagtattagaggcaccgcctgcccagtgacacatgtttaacggccgcggtaccctaaccgtgcaaaggtagcataatcacttgttccttaaatagggacctgtatgaatggctccacgagggttcagctgtctcttacttttaaccagtgaaattgacctgcccgtgaagaggcgggcatgacacagcaagacgagaagaccctatggagctttaatttattaatgcaaacagtacctaacaaacccacaggtcctaaactaccaaacctgcattaaaaatttcggttggggcgacctcggagcagaacccaacctccgagcagtacatgctaagacttcaccagtcaaagcgaactactatactcaattgatccaataacttgaccaacggaacaagttaccctagggataacagcgcaatcctattctagagtccatatcaacaatagggtttacgacctcgatgttggatcaggacatcccgatggtgcagccgctattaaaggttcgtttgttcaacgattaaagtcctacgtgatctgagttcagaccggagtaatccaggtcggtttctatctacnttcaaattcctccctgtacgaaaggacaagagaaataaggcctacttcacaaagcgccttcccccgtaaatgatatcatctcaacttagtattatacccacacccacccaagaacagggtttgttaagatggcagagcccggtaatcgcataaaacttaaaactttacagtcagaggttcaattcctcttcttaacaacatacccatggccaacctcctactcctcattgtacccattctaatcgcaatggcattcctaatgcttaccgaacgaaaaattctaggctatatacaactacgcaaaggccccaacgttgtaggcccctacgggctactacaacccttcgctgacgccataaaactcttcaccaaggagcccctaaaacccgccacatctaccatcaccctctacatcaccgccccgaccttagctctcaccatcgctcttctactatgaacccccctccccatacccaaccccctggtcaacctcaacctaggcctcctatttattctagccacctctagcctagccgtttactcaatcctctgatcagggtgagcatcaaactcaaactacgccctgatcggcgcactgcgagcagtagcccaaacaatctcatatgaagtcaccctagccatcattctactatcaacattactaataagtggctcctttaacctctccacccttatcacaacacaagaacacctctgattactcctgccatcatgacccttggccataatatgatttatctccacactagcagagaccaaccgaacccccttcgaccttgccgaaggggagtccgaactagtctcaggcttcaacatcgaatacgccgcaggccccttcgccctattcttcatagccgaatacacaaacattattataataaacaccctcaccactacaatcttcctaggaacaacatatgacgcactctcccctgaactctacacaacatattttgtcaccaagaccctacttctaacctccctgttcttatgaattcgaacagcatacccccgattccgctacgaccaactcatacacctcctatgaaaaaacttcctaccactcaccctagcattacttatatgatatgtctccatacccattacaatctccagcattccccctcaaacctaagaaatatgtctgataaaagagttactttgatagagtaaataataggagcttaaacccccttatttctaggactatgagaatcgaacccatccctgagaatccaaaattctccgtgccacctatcacaccccatcctaaagtaaggtcagctaaataagctatcgggcccataccccgaaaatgttggttatacccttcccgtactaattaatcccctggcccaacccgtcatctactctaccatctttgcaggcacactcatcacagcgctaagctcgcactgattttttacctgagtaggcctagaaataaacatgctagcttttattccagttctaaccaaaaaaataaaccctcgttccacagaagctgccatcaagtatttcctcacgcaagcaaccgcatccataatccttctaatagctatcctcttcaacaatatactctccggacaatgaaccataaccaatactaccaatcaatactcatcattaataatcataatggctatagcaataaaactaggaatagccccctttcacttctgagtcccagaggttacccaaggcacccctctgacatccggcctgcttcttctcacatgacaaaaactagcccccatctcaatcatataccaaatctctccctcactaaacgtaagccttctcctcactctctcaatcttatccatcatagcaggcagttgaggtggattaaaccaaacccagctacgcaaaatcttagcatactcctcaattacccacataggatgaataatagcagttctaccgtacaaccctaacataaccattcttaatttaactatttatattatcctaactactaccgcattcctactactcaacttaaactccagcaccacgaccctactactatctcgcacctgaaacaagctaacatgactaacacccttaattccatccaccctcctctccctaggaggcctgcccccgctaaccggctttttgcccaaatgggccattatcgaagaattcacaaaaaacaatagcctcatcatccccaccatcatagccaccatcaccctccttaacctctacttctacctacgcctaatctactccacctcaatcacactactccccatatctaacaacgtaaaaataaaatgacagtttgaacatacaaaacccaccccattcctccccacactcatcgcccttaccacgctactcctacctatctccccttttatactaataatcttatagaaatttaggttaaatacagaccaagagccttcaaagccctcagtaagttgcaatacttaatttctgtaacagctaaggactgcaaaaccccactctgcatcaactgaacgcaaatcagccactttaattaagctaagcccttactagaccaatgggacttaaacccacaaacacttagttaacagctaagcaccctaatcaactggcttcaatctacttctcccgccgccgggaaaaaaggcgggagaagccccggcaggtttgaagctgcttcttcgaatttgcaattcaatatgaaaatcacctcggagctggtaaaaagaggcctaacccctgtctttagatttacagtccaatgcttcactcagccattttacctcacccccactgatgttcgccgaccgttgactattctctacaaaccacaaagacattggaacactatacctattattcggcgcatgagctggagtcctaggcacagctctaagcctccttattcgagccgagctgggccagccaggcaaccttctaggtaacgaccacatctacaacgttatcgtcacagcccatgcatttgtaataatcttcttcatagtaatacccatcataatcggaggctttggcaactgactagttcccctaataatcggtgcccccgatatggcgtttccccgcataaacaacataagcttctgactcttacctccctctctcctactcctgctcgcatctgctatagtggaggccggagcaggaacaggttgaacagtctaccctcccttagcagggaactactcccaccctggagcctccgtagacctaaccatcttctccttacacctagcaggtgtctcctctatcttaggggccatcaatttcatcacaacaattatcaatataaaaccccctgccataacccaataccaaacgcccctcttcgtctgatccgtcctaatcacagcagtcctacttctcctatctctcccagtcctagctgctggcatcactatactactaacagaccgcaacctcaacaccaccttcttcgaccccgccggaggaggagaccccattctataccaacacctattctgatttttcggtcaccctgaagtttatattcttatcctaccaggcttcggaataatctcccatattgtaacttactactccggaaaaaaagaaccatttggatacataggtatggtctgagctatgatatcaattggcttcctagggtttatcgtgtgagcacaccatatatttacagtaggaatagacgtagacacacgagcatatttcacctccgctaccataatcatcgctatccccaccggcgtcaaagtatttagctgactcgccacactccacggaagcaatatgaaatgatctgctgcagtgctctgagccctaggattcatctttcttttcaccgtaggtggcctgactggcattgtattagcaaactcatcactagacatcgtactacacgacacgtactacgttgtagctcacttccactatgtcctatcaataggagctgtatttgccatcataggaggcttcattcactgatttcccctattctcaggctacaccctagaccaaacctacgccaaaatccatttcactatcatattcatcggcgtaaatctaactttcttcccacaacactttctcggcctatccggaatgccccgacgttactcggactaccccgatgcatacaccacatgaaacatcctatcatctgtaggctcattcatttctctaacagcagtaatattaataattttcatgatttgagaagccttcgcttcgaagcgaaaagtcctaatagtagaagaaccctccataaacctggagtgactatatggatgccccccaccctaccacacattcgaagaacccgtatacataaaatctagacaaaaaaggaaggaatcgaaccccccaaagctggtttcaagccaaccccatggcctccatgactttttcaaaaaggtattagaaaaaccatttcataactttgtcaaagttaaattataggctaaatcctatatatcttaatggcacatgcagcgcaagtaggtctacaagacgctacttcccctatcatagaagagcttatcacctttcatgatcacgccctcataatcattttccttatctgcttcctagtcctgtatgcccttttcctaacactcacaacaaaactaactaatactaacatctcagacgctcaggaaatagaaaccgtctgaactatcctgcccgccatcatcctagtcctcatcgccctcccatccctacgcatcctttacataacagacgaggtcaacgatccctcccttaccatcaaatcaattggccaccaatggtactgaacctacgagtacaccgactacggcggactaatcttcaactcctacatacttcccccattattcctagaaccaggcgacctgcgactccttgacgttgacaatcgagtagtactcccgattgaagcccccattcgtataataattacatcacaagacgtcttgcactcatgagctgtccccacattaggcttaaaaacagatgcaattcccggacgtctaaaccaaaccactttcaccgctacacgaccgggggtatactacggtcaatgctctgaaatctgtggagcaaaccacagtttcatgcccatcgtcctagaattaattcccctaaaaatctttgaaatagggcccgtatttaccctatagcaccccctctaccccctctagagcccactgtaaagctaacttagcattaaccttttaagttaaagattaagagaaccaacacctctttacagtgaaatgccccaactaaatactaccgtatggcccaccataattacccccatactccttacactattcctcatcacccaactaaaaatattaaacacaaactaccacctacctccctcaccaaagcccataaaaataaaaaattataacaaaccctgagaaccaaaatgaacgaaaatctgttcgcttcattcattgcccccacaatcctaggcctacccgccgcagtactgatcattctatttccccctctattgatccccacctccaaatatctcatcaacaaccgactaatcaccacccaacaatgactaatcaaactaacctcaaaacaaatgataaccatacacaacactaaaggacgaacctgatctcttatactagtatccttaatcatttttattgccacaactaacctcctcggactcctgcctcactcatttacaccaaccacccaactatctataaacctagccatggccatccccttatgagcgggcgcagtgattataggctttcgctctaagattaaaaatgccctagcccacttcttaccacaaggcacacctacaccccttatccccatactagttattatcgaaaccatcagcctactcattcaaccaatagccctggccgtacgcctaaccgctaacattactgcaggccacctactcatgcacctaattggaagcaccaccctagcaatatcaaccattaaccttccctctacacttatcatcttcacaattctaattctactgactatcctagaaatcgctgtcgccttaatccaagcctacgttttcacacttctagtaagcctctacctgcacgacaacacataatgacccaccaatcacatgcctatcatatagtaaaacccagcccatgacccctaacaggggccctctcagccctcctaatgacctccggcctagccatgtgatttcacttccactccataacgctcctcatactaggcctactaaccaacacactaaccatataccaatgatggcgcgatgtaacacgagaaagcacataccaaggccaccacacaccacctgtccaaaaaggccttcgatacgggataatcctatttattacctcagaagtttttttcttcgcaggatttttctgagccttttaccactccagcctagcccctaccccccaattaggagggcactggcccccaacaggcatcaccccgctaaatcccctagaagtcccactcctaaacacatccgtattactcgcatcaggagtatcaatcacctgagctcaccatagtctaatagaaaacaaccgaaaccaaataattcaagcactgctcattacaattttactgggtctctattttaccctcctacaagcctcagagtacttcgagtctcccttcaccatttccgacggcatctacggctcaacattttttgtagccacaggcttccacggacttcacgtcattattggctcaactttcctcactatctgcttcatccgccaactaatatttcactttacatccaaacatcactttggcttcgaagccgccgcctgatactggcattttgtagatgtggtttgactatttctgtatgtctccatctattgatgagggtcttactcttttagtataaatagtaccgttaacttccaattaactagttttgacaacattcaaaaaagagtaataaacttcgccttaattttaataatcaacaccctcctagccttactactaataattattacattttgactaccacaactcaacggctacatagaaaaatccaccccttacgagtgcggcttcgaccctatatcccccgcccgcgtccctttctccataaaattcttcttagtagctattaccttcttattatttgatctagaaattgccctccttttacccctaccatgagccctacaaacaactaacctgccactaatagttatgtcatccctcttattaatcatcatcctagccctaagtctggcctatgagtgactacaaaaaggattagactgagccgaattggtatatagtttaaacaaaacgaatgatttcgactcattaaattatgataatcatatttaccaaatgcccctcatttacataaatattatactagcatttaccatctcacttctaggaatactagtatatcgctcacacctcatgtcctccctactatgcctagaaggaataatactatcgctgttcattatagctactctcataaccctcaacacccactccctcttagccaatattgtgcctattgccatactagtctttgccgcctgcgaagcagcggtgggcctagccctactagtctcaatctccaacacatatggcctagactacgtacataacctaaacctactccaatgctaaaactaatcgtcccaacaattatattactaccactgacatgactttccaaaaaacacataatttgaatcaacacaaccacccacagcctaattattagcatcatccctctactattttttaaccaaatcaacaacaacctatttagctgttccccaaccttttcctccgaccccctaacaacccccctcctaatactaactacctgactcctgcccctcacaatcatggcaagccaacgccacttatccagtgaaccactatcacgaaaaaaactctacctctctatactaatctccctacaaatctccttaattataacattcacagccacagaactaatcatattttatatcttcttcgaaaccacacttatccccaccttggctatcatcacccgatgaggcaaccagccagaacgcctgaacgcaggcacatacttcctattctacaccctagtaggctcccttcccctactcatcgcactaatttacactcacaacaccctaggctcactaaacattctactactcaccctcactgcccaagaactatcaaactcctgagccaacaacttaatatgactagcttacacaatagcttttatagtaaagatacctctttacggactccacttatgactccctaaagcccatgtcgaagcccccatcgctgggtcaatagtacttgccgcagtactcttgaagctaggcggctatggtataatacgcctcacactcattctcaaccccctgacaaaacacatagcctaccccttccttgtactatccctatgaggcataattataacaagctccatctgcctacgacaaacagacctaaaatcgctcattgcatactcttcaatcagccacatagccctcgtagtaacagccattctcatccaaaccccctgaagcttcaccggcgcagtcattctcataatcgcccacggacttacatcctcattactattctgcctagcaaactcaaactacgaacgcactcacagtcgcatcataatcctctctcaaggacttcaaactctactcccactaatagctttttgatgacttctagcaagcctcgctaacctcgccttaccccccactattaacctactgggagaactctctgtgctagtaaccacattctcctgatcaaatatcactctcctacttacaggactcaacatactagtcacagccctatactccctctacatatttaccacaacacaatggggctcactcacccaccacattaacaacataaaaccctcattcacacgagaaaacaccctcatgttcatacacctatcccccattctcctcctatccctcaaccccgacatcattaccgggttttcctcttgtaaatatagtttaaccaaaacatcagattgtgaatctgacaacagaggcttacgaccccttatttaccgagaaagctcacaagaactgctaactcatgcccccatgtctaacaacatggctttctcaacttttaaaggataacagctatccattggtcttaggccccaagaattttggtgcaactccaaataaaagtaataaccatgcacactactataaccaccctaaccctaacttccctaattccccccatccttaccaccctcgttaaccctaacaaaaaaaactcatacccccattatgtaaaatccattgtcgcatccacctttattatcagtctcttccccacaacaatattcatgtgcctagaccaagaagttattatctcgaactgacactgagccacaacccaaacaacccagctctccctaagcttcaaactagactacttctccataatattcatccctgtagcattgttcgttacatggtccatcatagaattctcactgtgatatataaactcagacccaaacattaatcagttcttcaaatatctactcatcttcctaattaccatactaatcttagttaccgctaacaacctattccaactgttcatcggctgagagggcgtaggaattatatccttcttgctcatcagttgatgatacgcccgagcagatgccaacacagcagccattcaagcaatcctatacaaccgtatcggcgatatcggtttcatcctcgccttagcatgatttatcctacactccaactcatgagacccacaacaaatagcccttctaaacgccaatccaagcctcaccccactactaggcctcctcctagcagcagcaggcaaatcagcccaattaggtctccacccctgactcccctcagccatagaaggccccaccccagtctcagccctactccactcaagcactatagttgtagcaggaatcttcttactcatccgcttccaccccctagcagaaaatagcccactaatccaaactctaacactatgcttaggcgctatcaccactctgttcgcagcagtctgcgcccttacacaaaatgacatcaaaaaaatcgtagccttctccacttcaagtcaactaggactcataatagttacaatcggcatcaaccaaccacacctagcattcctgcacatctgtacccacgccttcttcaaagccatactatttatgtgctccgggtccatcatccacaaccttaacaatgaacaagatattcgaaaaataggaggactactcaaaaccatacctctcacttcaacctccctcaccattggcagcctagcattagcaggaatacctttcctcacaggtttctactccaaagaccacatcatcgaaaccgcaaacatatcatacacaaacgcctgagccctatctattactctcatcgctacctccctgacaagcgcctatagcactcgaataattcttctcaccctaacaggtcaacctcgcttccccacccttactaacattaacgaaaataaccccaccctactaaaccccattaaacgcctggcagccggaagcctattcgcaggatttctcattactaacaacatttcccccgcatcccccttccaaacaacaatccccctctacctaaaactcacagccctcgctgtcactttcctaggacttctaacagccctagacctcaactacctaaccaacaaacttaaaataaaatccccactatgcacattttatttctccaacatactcggattctaccctagcatcacacaccgcacaatcccctatctaggccttcttacgagccaaaacctgcccctactcctcctagacctaacctgactagaaaagctattacctaaaacaatttcacagcaccaaatctccacctccatcatcacctcaacccaaaaaggcataattaaactttacttcctctctttcttcttcccactcatcctaaccctactcctaatcacataacctattcccccgagcaatttcaattacaatatatacaccaacaaacaatgttcaaccagtaactactactaatcaacgcccataatcatacaaagcccccgcaccaataggatcctcccgaatcaaccctgacccctctccttcataaattattcagcttcctacactattaaagtttaccacaaccaccaccccatcatactctttcacccacagcaccaatcctacctccatcgctaaccccactaaaacactcaccaagacctcaacccctgacccccatgcctcaggatactcctcaatagccatcgctgtagtatatccaaagacaaccatcattccccctaaataaattaaaaaaactattaaacccatataacctcccccaaaattcagaataataacacacccgaccacaccgctaacaatcaatactaaacccccataaataggagaaggcttagaagaaaaccccacaaaccccattactaaacccacactcaacagaaacaaagcatacatcattattctcgcacggactacaaccacgaccaatgatatgaaaaaccatcgttgtatttcaactacaagaacaccaatgaccccaatacgcaaaattaaccccctaataaaattaattaaccactcactcatcgacctccccaccccatccaacatctccgcatgatgaaacttcggctcactccttggcgcctgcctgatcctccaaatcaccacaggactattcctagccatgcactactcaccagacgcctcaaccgccttttcatcaatcgcccacatcactcgagacgtaaattatggctgaatcatccgctaccttcacgccaatggcgcctcaatattctttatctgcctcttcctacacatcgggcgaggcctatattacggatcatttctctactcagaaacctgaaacatcggcattatcctcctgcttgcaactatagcaacagccttcataggctatgtcctcccgtgaggccaaatatcattctgaggggccacagtaattacaaacttactatccgccatcccatacattgggacagacctagttcaatgaatctgaggaggctactcagtagacagtcccaccctcacacgattctttacctttcacttcatcttgcccttcattattgcagccctagcagcactccacctcctattcttgcacgaaacgggatcaaacaaccccctaggaatcacctcccattccgataaaatcaccttccacccttactacacaatcaaagacgccctcggcttacttctcttccttctctccttaatgacattaacactattctcaccagacctcctaggcgacccagacaattataccctagccaaccccttaaacacccctccccacatcaagcccgaatgatatttcctattcgcctacacaattctccgatccgtccctaacaaactaggaggcgtccttgccctattactatccatcctcatcctagcaataatccccatcctccatatatccaaacaacaaagcataatatttcgcccactaagccaatcactttattgactcctagccgcagacctcctcattctaacctgaatcggaggacaaccagtaagctacccttttaccatcattggacaagtagcatccgtactatacttcacaacaatcctaatcctaataccaactatctccctaattgaaaacaaaatactcaaatgggcctgtccttgtagtataaactaatacaccagtcttgtaagccggagatgaaaacctttttccaaggacaaatcagagaaaaagtctttaactccaccattagcacccaaagctaagattctaatttaaactattctctgttctttcatggggaagcagatttgggtaccacccaagtattgactcacccatcaacaaccgctatgtatttcgtacattactgccagccaccatgaatattgtacggtaccataaatacttgaccacctgtagtacataaaaacccaatccacatcaaaaccccctccccatgcttacaagcaagtacagcaatcaacccccaactatcatacatcaactgcaactccaaagccacccctcacccactaggataccaacaaacctacccacccttaacagtacatagcacataaagccatttaccgtacatagcacattacagtcaaatcccttctcgtccccatggatgacccccctcagataggggtcccttgaccaccatcctccgtgaaatcaatatcccgcacaagagtgctactctcctcgctccgggcccataacacttgggggtagctaaagtgaactgtatccgacatctggttcctacttcagggccataaagcctaaatagcccacacgttccccttaaataagacatcacgatg

SEQ ID NO: 242 - DNA, 16568 bp, Homo sapiens mitochondrial
  3106: "n" refers to a nucleotide at position 3107 of the Cambridge Reference Sequence (CRS, Anderson et al. 1981 Nature 290:457-465), later determined to be absent from the human mtDNA sequence according to the revised CRS (rCRS, Andrews et al. 1999 Nature Genetics 23:147); "n" therefore represents a single nucleotide deletion at a position corresponding to nucleotide 3107 of SEQ ID NO:1 as provided herein.
gatcacaggtctatcaccctattaaccactcacgggagctctccatgcatttggtattttcgtctggggggtgtgcacgcgatagcattgcgaaacgctggagccggagcaccctatgtcgcagtatctgtctttgattcctgccccatcctgttatttatcgcacctacgttcaatattacaggcgaacatacttactaaagtgtgttaattaattaatgcttgtaggacatagtaataacaattgaatgtctgcacagccgctttccacacagacatcataacaaaaaatttccaccaaaccccccctcccccgccttctggccacagcacttaaacacatctctgccaaaccccaaaaacaaagaaccctaacaccagcctaaccagatttcaaattttatcttttggcggtatgcacttttaacagtcaccccccaactaacacattattttcccctcccactcccatactactaatctcatcaatacaacccccgcccatcctacccagcacacacaccgctgctaaccccataccccgaaccaaccaaaccccaaagacaccccccacagtttatgtagcttacctcctcaaagcaatacactgaaaatgtttagacgggctcacatcaccccataaacaaataggtttggtcctggcctttctattagctcttagtaagattacacatgcaagcatccccgttccagtgagttcaccctctaaatcaccacgatcaaaagggacaagcatcaagcacgcagcaatgcagctcaaaacgcttagcctagccacacccccacgggaaacagcagtgattaacctttagcaataaacgaaagtttaactaagctatactaaccccagggttggtcaatttcgtgccagccaccgcggtcacacgattaacccaagtcaatagaagccggcgtaaagagtgttttagatcaccccctccccaataaagctaaaactcacctgagttgtaaaaaactccagttgacacaaaatagactacgaaagtggctttaacatatctgaacacacaatagctaagacccaaactgggattagataccccactatgcttagccctaaacctcaacagttaaatcaacaaaactgctcgccagaacactacgagccacagcttaaaactcaaaggacctggcggtgcttcatatccctctagaggagcctgttctgtaatcgataaaccccgatcaacctcaccacctcttgctcagcctatataccgccatcttcagcaaaccctgatgaaggctacaaagtaagcgcaagtacccacgtaaagacgttaggtcaaggtgtagcccatgaggtggcaagaaatgggctacattttctaccccagaaaactacgatagcccttatgaaacttaagggtcgaaggtggatttagcagtaaactgagagtagagtgcttagttgaacagggccctgaagcgcgtacacaccgcccgtcaccctcctcaagtatacttcaaaggacatttaactaaaacccctacgcatttatatagaggagacaagtcgtaacatggtaagtgtactggaaagtgcacttggacgaaccagagtgtagcttaacacaaagcacccaacttacacttaggagatttcaacttaacttgaccgctctgagctaaacctagccccaaacccactccaccttactaccagacaaccttagccaaaccatttacccagataaagtataggcgatagaaattgaaacctggcgcaatagatatagtaccgcaagggaaagatgaaaaattataaccaagcataatatagcaaggactaacccctataccttctgcataatgaattaactagaaataactttgcaaggagagccaaagctaagacccccgaaaccagacgagctacctaagaacagctaaaagagcacacccgtctatgtagcaaaatagtgggaagatttataggtagaggcgacaaacctaccgagcctggtgatagctggttgtccaagatagaatcttagttcaactttaaatttgcccacagaaccctctaaatccccttgtaaatttaactgttagtccaaagaggaacagctctttggacactaggaaaaaaccttgtagagagagtaaaaaatttaacacccatagtaggcctaaaagcagccaccaattaagaaagcgttcaagctcaacacccactacctaaaaaatcccaaacatataactgaactcctcacacccaattggaccaatctatcaccctatagaagaactaatgttagtataagtaacatgaaaacattctcctccgcataagcctgcgtcagattaaaacactgaactgacaattaacagcccaatatctacaatcaaccaacaagtcattattaccctcactgtcaacccaacacaggcatgctcataaggaaaggttaaaaaaagtaaaaggaactcggcaaatcttaccccgcctgtttaccaaaaacatcacctctagcatcaccagtattagaggcaccgcctgcccagtgacacatgtttaacggccgcggtaccctaaccgtgcaaaggtagcataatcacttgttccttaaatagggacctgtatgaatggctccacgagggttcagctgtctcttacttttaaccagtgaaattgacctgcccgtgaagaggcgggcatgacacagcaagacgagaagaccctatggagctttaatttattaatgcaaacagtacctaacaaacccacaggtcctaaactaccaaacctgcattaaaaatttcggttggggcgacctcggagcagaacccaacctccgagcagtacatgctaagacttcaccagtcaaagcgaactactatactcaattgatccaataacttgaccaacggaacaagttaccctagggataacagcgcaatcctattctagagtccatatcaacaatagggtttacgacctcgatgttggatcaggacatcccgatggtgcagccgctattaaaggttcgtttgttcaacgattaaagtcctacgtgatctgagttcagaccggagtaatccaggtcggtttctatctacnttcaaattcctccctgtacgaaaggacaagagaaataaggcctacttcacaaagcgccttcccccgtaaatgatatcatctcaacttagtattatacccacacccacccaagaacagggtttgttaagatggcagagcccggtaatcgcataaaacttaaaactttacagtcagaggttcaattcctcttcttaacaacatacccatggccaacctcctactcctcattgtacccattctaatcgcaatggcattcctaatgcttaccgaacgaaaaattctaggctatatacaactacgcaaaggccccaacgttgtaggcccctacgggctactacaacccttcgctgacgccataaaactcttcaccaaagagcccctaaaacccgccacatctaccatcaccctctacatcaccgccccgaccttagctctcaccatcgctcttctactatgaacccccctccccatacccaaccccctggtcaacctcaacctaggcctcctatttattctagccacctctagcctagccgtttactcaatcctctgatcagggtgagcatcaaactcaaactacgccctgatcggcgcactgcgagcagtagcccaaacaatctcatatgaagtcaccctagccatcattctactatcaacattactaataagtggctcctttaacctctccacccttatcacaacacaagaacacctctgattactcctgccatcatgacccttggccataatatgatttatctccacactagcagagaccaaccgaacccccttcgaccttgccgaaggggagtccgaactagtctcaggcttcaacatcgaatacgccgcaggccccttcgccctattcttcatagccgaatacacaaacattattataataaacaccctcaccactacaatcttcctaggaacaacatatgacgcactctcccctgaactctacacaacatattttgtcaccaagaccctacttctaacctccctgttcttatgaattcgaacagcatacccccgattccgctacgaccaactcatacacctcctatgaaaaaacttcctaccactcaccctagcattacttatatgatatgtctccatacccattacaatctccagcatcccccctcaaacctaagaaatatgtctgataaaagagttactttgatagagtaaataataggagcttaaacccccttatttctaggactatgagaatcgaacccatccctgagaatccaaaattctccgtgccacctatcacaccccatcctaaagtaaggtcagctaaataagctatcgggcccataccccgaaaatgttggttatacccttcccgtactaattaatcccctggcccaacccgtcatctactctaccatctttgcaggcacactcatcacagcgctaagctcgcactgattttttacctgagtaggcctagaaataaacatgctagcttttattccagttctaaccaaaaaaataaaccctcgttccacagaagctgccatcaagtatttcctcacgcaagcaaccgcatccataatccttctaatagctatcctcttcaacaatatactctccggacaatgaaccataaccaatactaccaatcaatactcatcattaataatcataatggctatagcaataaaactaggaatagccccctttcacttctgagtcccagaggttgcccaaggcacccctctgacatccggcctgcttcttctcacatgacaaaaactagcccccatctcaatcatataccaaatctctccctcactaaacgtaagccttctcctcactctctcaatcttatccatcatagcaggcagttgaggtggattaaaccaaacccagctacgcaaaatcttagcatactcctcaattacccacataggatgaataatagcagttctaccgtacaaccctaacataaccattcttaatttaactatttatattatcctaactactaccgcattcctactactcaacttaaactccagcaccacgaccctactactatctcgcacctgaaacaagctaacatgactaacacccttaattccatccaccctcctctccctaggaggcctgcccccgctaaccggctttttgcccaaatgggccattatcgaagaattcacaaaaaacaatagcctcatcatccccaccatcatagccaccatcaccctccttaacctctacttctacctacgcctaatctactccacctcaatcacactactccccatatctaacaacgtaaaaataaaatgacagtttgaacatacaaaacccaccccattcctccccacactcatcgcccttaccacgctactcctacctatctccccttttatactaataatcttatagaaatttaggttaaatacagaccaagagccttcaaagccctcagtaagttgcaatacttaatttctgtaacagctaaggactgcaaaaccccactctgcatcaactgaacgcaaatcagccactttaattaagctaagcccttactagaccaatgggacttaaacccacaaacacttagttaacagctaagcaccctaatcaactggcttcaatctacttctcccgccgccgggaaaaaaggcgggagaagccccggcaggtttgaagctgcttcttcgaatttgcaattcaatatgaaaatcacctcggagctggtaaaaagaggcctaacccctgtctttagatttacagtccaatgcttcactcagccattttacctcacccccactgatgttcgccgaccgttgactattctctacaaaccacaaagacattggaacactatacctattattcggcgcatgagctggagtcctaggcacagctctaagcctccttattcgagccgagctgggccagccaggcaaccttctaggtaacgaccacatctacaacgttatcgtcacagcccatgcatttgtaataatcttcttcatagtaatacccatcataatcggaggctttggcaactgactagttcccctaataatcggtgcccccgatatggcgtttccccgcataaacaacataagcttctgactcttacctccctctctcctactcctgctcgcatctgctatagtggaggccggagcaggaacaggttgaacagtctaccctcccttagcagggaactactcccaccctggagcctccgtagacctaaccatcttctccttacacctagcaggtgtctcctctatcttaggggccatcaatttcatcacaacaattatcaatataaaaccccctgccataacccaataccaaacgcccctcttcgtctgatccgtcctaatcacagcagtcctacttctcctatctctcccagtcctagctgctggcatcactatactactaacagaccgcaacctcaacaccaccttcttcgaccccgccggaggaggagaccccattctataccaacacctattctgatttttcggtcaccctgaagtttatattcttatcctaccaggcttcggaataatctcccatattgtaacttactactccggaaaaaaagaaccatttggatacataggtatggtctgagctatgatatcaattggcttcctagggtttatcgtgtgagcacaccatatatttacagtaggaatagacgtagacacacgagcatatttcacctccgctaccataatcatcgctatccccaccggcgtcaaagtatttagctgactcgccacactccacggaagcaatatgaaatgatctgctgcagtgctctgagccctaggattcatctttcttttcaccgtaggtggcctgactggcattgtattagcaaactcatcactagacatcgtactacacgacacgtactacgttgtagctcacttccactatgtcctatcaataggagctgtatttgccatcataggaggcttcattcactgatttcccctattctcaggctacaccctagaccaaacctacgccaaaatccatttcactatcatattcatcggcgtaaatctaactttcttcccacaacactttctcggcctatccggaatgccccgacgttactcggactaccccgatgcatacaccacatgaaacatcctatcatctgtaggctcattcatttctctaacagcagtaatattaataattttcatgatttgagaagccttcgcttcgaagcgaaaagtcctaatagtagaagaaccctccataaacctggagtgactatatggatgccccccaccctaccacacattcgaagaacccgtatacataaaatctagacaaaaaaggaaggaatcgaaccccccaaagctggtttcaagccaaccccatggcctccatgactttttcaaaaaggtattagaaaaaccatttcataactttgtcaaagttaaattataggctaaatcctatatatcttaatggcacatgcagcgcaagtaggtctacaagacgctacttcccctatcatagaagagcttatcacctttcatgatcacgccctcataatcattttccttatctgcttcctagtcctgtatgcccttttcctaacactcacaacaaaactaactaatactaacatctcagacgctcaggaaatagaaaccgtctgaactatcctgcccgccatcatcctagtcctcatcgccctcccatccctacgcatcctttacataacagacgaggtcaacgatccctcccttaccatcaaatcaattggccaccaatggtactgaacctacgagtacaccgactacggcggactaatcttcaactcctacatacttcccccattattcctagaaccaggcgacctgcgactccttgacgttgacaatcgagtagtactcccgattgaaacccccattcgtataataattacatcacaagacgtcttgcactcatgagctgtccccacattaggcttaaaaacagatgcaattcccggacgtctaaaccaaaccactttcaccgctacacgaccgggggtatactacggtcaatgctctgaaatctgtggagcaaaccacagtttcatgcccatcgtcctagaattaattcccctaaaaatctttgaaatagggcccgtatttaccctatagcaccccctctaccccctctagagcccactgtaaagctaacttagcattaaccttttaagttaaagattaagagaaccaacacctctttacagtgaaatgccccaactaaatactaccgtatggcccaccataattacccccatactccttacactattcctcatcacccaactaaaaatattaaacacaaactaccacctacctccctcaccaaagcccataaaaataaaaaattataacaaaccctgagaaccaaaatgaacgaaaatctgttcgcttcattcattgcccccacaatcctaggcctacccgccgcagtactgatcattctatttccccctctattgatccccacctccaaatatctcatcaacaaccgactaatcaccacccaacaatgactaatcaaactaacctcaaaacaaatgataaccatacacaacactaaaggacgaacctgatctcttatactagtatccttaatcatttttattgccacaactaacctcctcggactcctgccttactcatttacaccaaccacccaactatctataaacctagccatggccatccccttatgagcgggcgcagtgattataggctttcgctctaagattaaaaatgccctagcccacttcttaccacaaggcacacctacaccccttatccccatactagttattatcgaaaccatcagcctactcattcaaccaatagccctggccgtacgcctaaccgctaacattactgcaggccacctactcatgcacctaattggaagcgccaccctagcaatatcaaccattaaccttccctctacacttatcatcttcacaattctaattctactgactatcctagaaatcgctgtcgccttaatccaagcctacgttttcacacttctagtaagcctctacctgcacgacaacacataatgacccaccaatcacatgcctatcatatagtaaaacccagcccatgacccctaacaggggccctctcagccctcctaatgacctccggcctagccatgtgatttcacttccactccataacgctcctcatactaggcctactaaccaacacactaaccatataccaatgatggcgcgatgtaacacgagaaagcacataccaaggccaccacacaccacctgtccaaaaaggccttcgatacgggataatcctatttattacctcagaagtttttttcttcgcaggatttttctgagccttttaccactccagcctagcccctaccccccaattaggagggcactggcccccaacaggcatcaccccgctaaatcccctagaagtcccactcctaaacacatccgtattactcgcatcaggagtatcaatcacctgagctcaccatagtctaatagaaaacaaccgaaaccaaataattcaagcactgcttattacaattttactgggtctctattttaccctcctacaagcctcagagtacttcgagtctcccttcaccatttccgacggcatctacggctcaacattttttgtagccacaggcttccacggacttcacgtcattattggctcaactttcctcactatctgcttcatccgccaactaatatttcactttacatccaaacatcactttggcttcgaagccgccgcctgatactggcattttgtagatgtggtttgactatttctgtatgtctccatctattgatgagggtcttactcttttagtataaatagtaccgttaacttccaattaactagttttgacaacattcaaaaaagagtaataaacttcgccttaattttaataatcaacaccctcctagccttactactaataattattacattttgactaccacaactcaacggctacatagaaaaatccaccccttacgagtgcggcttcgaccctatatcccccgcccgcgtccctttctccataaaattcttcttagtagctattaccttcttattatttgatctagaaattgccctccttttacccctaccatgagccctacaaacaactaacctgccactaatagttatgtcatccctcttattaatcatcatcctagccctaagtctggcctatgagtgactacaaaaaggattagactgaaccgaattggtatatagtttaaacaaaacgaatgatttcgactcattaaattatgataatcatatttaccaaatgcccctcatttacataaatattatactagcatttaccatctcacttctaggaatactagtatatcgctcacacctcatatcctccctactatgcctagaaggaataatactatcgctgttcattatagctactctcataaccctcaacacccactccctcttagccaatattgtgcctattgccatactagtctttgccgcctgcgaagcagcggtgggcctagccctactagtctcaatctccaacacatatggcctagactacgtacataacctaaacctactccaatgctaaaactaatcgtcccaacaattatattactaccactgacatgactttccaaaaaacacataatttgaatcaacacaaccacccacagcctaattattagcatcatccctctactattttttaaccaaatcaacaacaacctatttagctgttccccaaccttttcctccgaccccctaacaacccccctcctaatactaactacctgactcctacccctcacaatcatggcaagccaacgccacttatccagtgaaccactatcacgaaaaaaactctacctctctatactaatctccctacaaatctccttaattataacattcacagccacagaactaatcatattttatatcttcttcgaaaccacacttatccccaccttggctatcatcacccgatgaggcaaccagccagaacgcctgaacgcaggcacatacttcctattctacaccctagtaggctcccttcccctactcatcgcactaatttacactcacaacaccctaggctcactaaacattctactactcactctcactgcccaagaactatcaaactcctgagccaacaacttaatatgactagcttacacaatagcttttatagtaaagatacctctttacggactccacttatgactccctaaagcccatgtcgaagcccccatcgctgggtcaatagtacttgccgcagtactcttaaaactaggcggctatggtataatacgcctcacactcattctcaaccccctgacaaaacacatagcctaccccttccttgtactatccctatgaggcataattataacaagctccatctgcctacgacaaacagacctaaaatcgctcattgcatactcttcaatcagccacatagccctcgtagtaacagccattctcatccaaaccccctgaagcttcaccggcgcagtcattctcataatcgcccacggacttacatcctcattactattctgcctagcaaactcaaactacgaacgcactcacagtcgcatcataatcctctctcaaggacttcaaactctactcccactaatagctttttgatgacttctagcaagcctcgctaacctcgccttaccccccactattaacctactgggagaactctctgtgctagtaaccacgttctcctgatcaaatatcactctcctacttacaggactcaacatactagtcacagccctatactccctctacatatttaccacaacacaatgaggctcactcacccaccacattaacaacataaaaccctcattcacacgagaaaacaccctcatgttcatacacctatcccccattctcctcctatccctcaaccccgacatcattaccgggttttcctcttgtaaatatagtttaaccaaaacatcagattgtgaatctgacaacagaggcttacgaccccttatttaccgagaaagctcacaagaactgctaactcatgcccccatgtctaacaacatggctttctcaacttttaaaggataacagctatccattggtcttaggccccaaaaattttggtgcaactccaaataaaagtaataaccatgcacactactataaccaccctaaccctgacttccctaattccccccatccttaccaccctcgttaaccctaacaaaaaaaactcatacccccattatgtaaaatccattgtcgcatccaccttcattatcagtctcttccccacaacaatattcatgtgcctagaccaagaagttattatctcgaactgacactgagccacaacccaaacaacccagctctccctaagcttcaaactagactacttctccataatattcatccctgtagcattgttcgttacatggtccatcatagaattctcactgtgatatataaactcagacccaaacattaatcagttcttcaaatatctactcattttcctaattaccatactaatcttagttaccgctaacaacctattccaactgttcatcggctgagagggcgtaggaattatatccttcttgctcatcagttgatgatacgcccgagcagatgccaacacagcagccattcaagcaatcctatacaaccgtatcggcgatatcggtttcatcctcgccttagcatgatttatcctacactccaactcatgagacccacaacaaatagcccttctaaacgctaatccaagcctcaccccactactaggcctcctcctagcagcagcaggcaaatcagcccaattaggtctccacccctgactcccctcagccatagaaggccccaccccagtctcagccctactccactcaagcactatagttgtagcaggaatcttcttactcatccgcttccaccccctagcagaaaatagcccactaatccaaactctaacactatgcttaggcgctatcaccactctgttcgcagcagtctgcgcccttacacaaaatgacatcaaaaaaatcgtagccttctccacttcaagtcaactaggactcataatagttacaatcggcatcaaccaaccacacctagcattcctgcacatctgtacccacgccttcttcaaagccatactatttatgtgctccgggtccatcatccacaaccttaacaatgaacaagatattcgaaaaataggaggactactcaaaaccatacctctcacttcaacctccctcaccattggcagcctagcattagcaggaatacctttcctcacaggtttctactccaaagaccacatcatcgaaaccgcaaacatatcatacacaaacgcctgagccctatctattactctcatcgctacctccctgacaagcgcctatagcactcgaataattcttctcaccctaacaggtcaacctcgcttccccacccttactaacattaacgaaaataaccccaccctactaaaccccattaaacgcctggcagccggaagcctattcgcaggatttctcattactaacaacatttcccccgcatcccccttccaaacaacaatccccctctacctaaaactcacagccctcgctgtcactttcctaggacttctaacagccctagacctcaactacctaaccaacaaacttaaaataaaatccccactatgcacattttatttctccaacatactcggattctaccctagcatcacacaccgcacaatcccctatctaggccttcttacgagccaaaacctgcccctactcctcctagacctaacctgactagaaaagctattacctaaaacaatttcacagcaccaaatctccacctccatcatcacctcaacccaaaaaggcataattaaactttacttcctctctttcttcttcccactcatcctaaccctactcctaatcacataacctattcccccgagcaatctcaattacaatatatacaccaacaaacaatgttcaaccagtaactactactaatcaacgcccataatcatacaaagcccccgcaccaataggatcctcccgaatcaaccctgacccctctccttcataaattattcagcttcctacactattaaagtttaccacaaccaccaccccatcatactctttcacccacaacaccaatcctacctccatcgctaaccccactaaaacactcaccaagacctcaacccctgacccccatgcctcaggatactcctcaatagccatcgctgtagtatatccaaagacaaccatcattccccctaaataaattaaaaaaactattaaacccatataacctcccccaaaattcagaataataacacacccgaccacaccgctaacaatcaatactaaacccccataaataggagaaggcttagaagaaaaccccacaaaccccattactaaacccacactcaacagaaacaaagcatacatcattattctcgcacggactacaaccacgaccaatgatatgaaaaaccatcgttgtatttcaactacaagaacaccaatgaccccaatacgcaaaattaaccccctaataaaattaattaaccactcattcatcgacctccccaccccatccaacatctccgcatgatgaaacttcggctcactccttggcgcctgcctgatcctccaaatcaccacaggactattcctagccatgcactactcaccagacgcctcaaccgccttttcatcaatcgcccacatcactcgagacgtaaattatggctgaatcatccgctaccttcacgccaatggcgcctcaatattctttatctgcctcttcctacacatcgggcgaggcctatattacggatcatttctctactcagaaacctgaaacatcggcattatcctcctgcttgcaactatagcaacagccttcataggctatgtcctcccgtgaggccaaatatcattctgaggggccacagtaattacaaacttactatccgccatcccatacattgggacagacctagttcaatgaatctgaggaggctactcagtagacagtcccaccctcacacgattctttacctttcacttcatcttgcccttcattattgcagccctagcagcactccacctcctattcttgcacgaaacgggatcaaacaaccccctaggaatcacctcccattccgataaaatcaccttccacccttactacacaatcaaagacgccctcggcttacttctcttccttctctccttaatgacattaacactattctcaccagacctcctaggcgacccagacaattataccctagccaaccccttaaacacccctccccacatcaagcccgaatgatatttcctattcgcctacacaattctccgatccgtccctaacaaactaggaggcgtccttgccctattactatccatcctcatcctagcaataatccccatcctccatatatccaaacaacaaagcataatatttcgcccactaagccaatcactttattgactcctagccgcagacctcctcattctaacctgaatcggaggacaaccagtaagctacccttttaccatcattggacaagtagcatccgtactatacttcacaacaatcctaatcctaataccaactatctccctaattgaaaacaaaatactcaaatgggcctgtccttgtagtataaactaatacaccagtcttgtaaaccggagatgaaaacctttttccaaggacaaatcagagaaaaagtctttaactccaccattagcacccaaagctaagattctaatttaaactattctctgttctttcatggggaagcagatttgggtaccacccaagtattgactcacccatcaacaaccgctatgtacttcgtacattactgccagtcaccatgaatattgtacggtaccataaatacttgaccacctgtagtacataaaaacccaatccacatcaaaaccccctccccatgcttacaagcaagtacagcaatcaaccttcaactatcacacatcaactgcaactccaaagccacccctcacccactaggataccaacaaacctatccacccttaacagtacatagtacataaaaccatttaccgtacatagcacattacagtcaaatcccttctcgcccccatggatgacccccctcagataggggtcccttgaccaccatcctccgtgaaatcaatatcccgcacaagagtgctactctcctcgctccgggcccataacacttgggggtagctaaagtgaactgtatccgacatctggttcctacttcagggtcataaagcctaaatagcccacacgttccccttaaataagacatcacgatg

SEQ ID NO: 243 - DNA, 16571 bp, Homo sapiens mitochondrial
  3109: "n" refers to a nucleotide at position 3107 of the Cambridge Reference Sequence (CRS, Anderson et al. 1981 Nature 290:457-465), later determined to be absent from the human mtDNA sequence according to the revised CRS (rCRS, Andrews et al. 1999 Nature Genetics 23:147); "n" therefore represents a single nucleotide deletion at a position corresponding to nucleotide 3107 of SEQ ID NO:1 as provided herein.
gatcacaggtctatcaccctattaaccactcacgggagctctccatgcatttggtattttcgtctggggggtgtgcacgcgatagcattgcgagacgctggagccggagcaccctatgtcgcagtatctgtctttgattcctgcctcattctattatttatcgcacctacgttcaatattacaggcgaacatacctactaaagtgtgttaattaattaatgcttgtaggacataataataacaattgaatgtctgcacagccgctttccacacagacatcataacaaaaaatttccaccaaaccccccctcccccccgcttctggccacagcacttaaacacatctctgccaaaccccaaaaacaaagaaccctaacaccagcctaaccagatttcaaattttatcttttggcggtatgcacttttaacagtcaccccccaactaacacattattttcccctcccactcccatactactaatctcatcaatacaacccccgcccatcctacccagcacacacaccgctgctaaccccataccccgaaccaaccaaaccccaaagacaccccccacccagtttatgtagcttacctcctcaaagcaatacactgaaaatgtttagacgggctcacatcaccccataaacaaataggtttggtcctagcctttctattagctcttagtaagattacacatgcaagcatccccgttccagtgagttcaccctctaaatcaccacgatcaaaaggaacaagcatcaagcacgcagcaatgcagctcaaaacgcttagcctagccacacccccacgggaaacagcagtgattaacctttagcaataaacgaaagtttaactaagctatactaaccccagggttggtcaatttcgtgccagccaccgcggtcacacgattaacccaagtcaatagaagccggcgtaaagagtgttttagatcaccccctccccaataaagctaaaactcacctgagttgtaaaaaactccagttgacacaaaatagactacgaaagtggctttaacatatctgaacacacaatagctaagacccaaactgggattagataccccactatgcttagccctaaacctcaacagttaaatcaacaaaactgctcgccagaacactacgagccacagcttaaaactcaaaggacctggcggtgcttcatatccctctagaggagcctgttctgtaatcgataaaccccgatcaacctcaccacctcttgctcagcctatataccgccatcttcagcaaaccctgatgaaggctacaaagtaagcgcaagtacccacgtaaagacgttaggtcaaggtgtagcccatgaggtggcaagaaatgggctacattttctaccccagaaaactacgatagcccttatgaaacttaagggtcgaaggtggatttagcagtaaactgagagtagagtgcttagttgaacagggccctgaagcgcgtacacaccgcccgtcaccctcctcaagtatacttcaaaggacatttaactaaaacccctacgcatttatatagaggagacaagtcgtaacatggtaagtgtactggaaagtgcacttggacgaaccagagtgtagcttaacacaaagcacccaacttacacttaggagatttcaacttaacttgaccgctctgagctaaacctagccccaaacccactccaccttactaccagacaaccttagccaaaccatttacccaaataaagtataggcgatagaaattgaaacctggcgcaatagatatagtaccgcaagggaaagatgaaaaattataaccaagcataatatagcaaggactaacccctataccttctgcataatgaattaactagaaataactttgcaaggagagccaaagctaagacccccgaaaccagacgagctacctaagaacagctaaaagagcacacccgtctatgtagcaaaatagtgggaagatttataggtagaggcgacaaacctatcgagcctggtgatagctggttgtccaagatagaatcttagttcaactttaaatttgcccacagaaccctctaaatccccttgtaaatttaactgttagtccaaagaggaacagctctttggacactaggaaaaaaccttgtagagagagtaaaaaatttaacacccatagtaggcctaaaagcagccaccaattaagaaagcgttcaagctcaacacccactacctaaaaaatcccaaacatataactgaactcctcacacccaattggaccaatctatcaccctatagaagaactaatgttagtataagtaacatgaaaacattctcctccgcataagcctgcgtcagatcaaaacactgaactgacaattaacagcccaatatctacaatcaaccaacaagtcattattaccctcactgtcaacccaacacaggcatgctcataaggaaaggttaaaaaaagtaaaaggaactcggcaaatcttaccccgcctgtttaccaaaaacatcacctctagcatcaccagtattagaggcaccgcctgcccagtgacacatgtttaacggccgcggtaccctaaccgtgcaaaggtagcataatcacttgttccttaaatagggacctgtatgaatggctccacgagggttcagctgtctcttacttttaaccagtgaaattgacctgcccgtgaagaggcgggcatgacacagcaagacgagaagaccctatggagctttaatttattaatgcaaacagtacctaacaaacccacaggtcctaaactaccaaacctgcattaaaaatttcggttggggcgacctcggagcagaacccaacctccgagcagtacatgctaagacttcaccagtcaaagcgaactactatactcaattgatccaataacttgaccaacggaacaagttaccctagggataacagcgcaatcctattctagagtccatatcaacaatagggtttacgacctcgatgttggatcaggacatcccgatggtgcagccgctattaaaggttcgtttgttcaacgattaaagtcctacgtgatctgagttcagaccggagtaatccaggtcggtttctatctacnttcaaattcctccctgtacgaaaggacaagagaaataaggcctacttcacaaagcgccttcccccgtaaatgatatcatctcaacttagtattatacccacacccacccaagaacagggtttgttaagatggcagagcccggtaatcgcataaaacttaaaactttacagtcagaggttcaattcctcttcttaacaacatacccatggccaacctcctactcctcattgtacccattctaatcgcaatggcattcctaatgcttaccgaacgaaaaattctaggctatatacaactacgcaaaggccccaacgttgtaggcccctacgggctactacaacccttcgctgacgccataaaactcttcaccaaagagcccctaaaacccgccacatctaccatcaccctctacatcaccgccccgaccttagctctcaccatcgctcttctactatgaacccccctccccatacccaaccccctggtcaacctcaacctaggcctcctatttattctagccacctctagcctagccgtttactcaatcctctgatcagggtgagcatcaaactcaaactacgccctgatcggcgcactgcgagcagtagcccaaacaatctcatatgaagtcaccctagccatcattctactatcaacattactaataagtggctcctttaacctctccacccttatcacaacacaagaacacctctgattactcctgccatcatgacccttggccataatatgatttatctccacactagcagagaccaaccgaacccccttcgaccttgccgaaggggagtccgaactagtctcaggcttcaacatcgaatacgccgcaggccccttcgccctattcttcatagccgaatacacaaacattattataataaacaccctcaccactacaatcttcctaggaacaacatatgacgcactctcccctgaactctacacaacatattttgtcaccaagaccctacttctaacctccctgttcttatgaattcgaacagcatacccccgattccgctacgaccaactcatacacctcctatgaaaaaacttcctaccactcaccctagcattacttatatgatatgtctccatacccattacaatctccagcattccccctcaaacctaagaaatatgtctgataaaagagttactttgatagagtaaataataggagcttaaacccccttatttctaggactatgagaatcgaacccatccctgagaatccaaaattctccgtgccacctatcacaccccatcctaaagtaaggtcagctaaataagctatcgggcccataccccgaaaatgttggttatacccttcccgtactaattaatcccctggcccaacccgtcatctactctaccatctttgcaggcacactcatcacagcgctaagctcgcactgattttttacctgagtaggcctagaaataaacatgctagcttttattccagttctaaccaaaaaaataaaccctcgttccacagaagctgccatcaagtatttcctcacacaagcaaccgcatccataatccttctaatagctatcctcttcaacaatatactctccggacaatgaaccataaccaatactaccaatcaatactcatcattaataatcataatggctatagcaataaaactaggaatagccccctttcacttctgagtcccagaggttacccaaggcacccctctgacatccggcctgcttcttctcacatgacaaaaactagcccccatctcaatcatataccaaatctctccctcactaaacgtaagccttctcctcactctctcaatcttatccatcatagcaggcagttgaggtggattaaaccaaacccagctacgcaaaatcttagcatactcctcaattacccacataggatgaataatagcagttctaccgtacaaccctaacataaccattcttaatttaactatttatattatcctaactactaccgcattcctactactcaacttaaactccagcaccacgaccctactactatctcgcacctgaaacaagctaacatgactaacacccttaattccatccaccctcctctccctaggaggcctgcccccgctaaccggctttttgcccaaatgggccattatcgaagaattcacaaaaaacaatagcctcatcatccccaccatcatagccaccatcaccctccttaacctctacttctacctacgcctaatctactccacctcaatcacactactccccatatctaacaacgtaaaaataaaatgacagtttgaacatacaaaacccaccccattcctccccacactcatcgcccttaccacgctactcctacctatctccccttttatactaataatcttatagaaatttaggttaaatacagaccaagagccttcaaagccctcagtaagttgcaatacttaatttctgtaacagctaaggactgcaaaaccccactctgcatcaactgaacgcaaatcagccactttaattaagctaagcccttactagaccaatgggacttaaacccacaaacacttagttaacagctaagcaccctaatcaactggcttcaatctacttctcccgccgccgggaaaaaaggcgggagaagccccggcaggtttgaagctgcttcttcgaatttgcaattcaatatgaaaatcacctcggagctggtaaaaagaggcctaacccctgtctttagatttacagtccaatgcttcactcagccattttacctcacccccactgatgttcgccgaccgttgactattctctacaaaccacaaagacattggaacactatacctattattcggcgcatgagctggagtcctaggcacagctctaagcctccttattcgagccgagctgggccagccaggcaaccttctaggtaacgaccacatctacaacgttatcgtcacagcccatgcatttgtaataatcttcttcatagtaatacccatcataatcggaggctttggcaactgactagttcccctaataatcggtgcccccgatatggcgtttccccgcataaacaacataagcttctgactcttacctccctctctcctactcctgctcgcatctgctatagtggagaccggagcaggaacaggttgaacagtctaccctcccttagcagggaactactcccaccctggagcctccgtagacctaaccatcttctccttacacctagcaggtgtctcctctatcttaggggccatcaatttcatcacaacaattatcaatataaaaccccctgccataacccaataccaaacgcccctcttcgtctgatccgtcctaatcacagcagtcctacttctcctatctctcccagtcctagctgctggcatcaccatactactaacagaccgcaacctcaacaccaccttcttcgaccccgccggaggaggagaccccattctataccaacacctattctgatttttcggtcaccctgaagtttatattcttatcctaccaggcttcggaataatctcccatattgtaacttactactccggaaaaaaagaaccatttggatacataggtatggtctgagctatgatatcaattggcttcctagggtttatcgtgtgagcacaccatatatttacagtaggaatagacgtagacacacgagcatatttcacctccgctaccataatcatcgctatccccaccggcgtcaaagtatttagctgactcgccacactccacggaagcaatatgaaatgatctgctgcagtgctctgagccctaggattcatctttcttttcaccgtaggtggcctgactggcattgtattagcaaactcatcactagacatcgtactacacgacacgtactacgttgtagctcacttccactatgtcctatcaataggagctgtatttgccatcataggaggcttcattcactgatttcccctattctcaggctacaccctagaccaaacctacgccaaaatccatttcactatcatattcatcggcgtaaatctaactttcttcccacaacactttctcggcctatccggaatgccccgacgttactcggactaccccgatgcatacaccacatgaaacatcctatcatctgtaggctcattcatttctctaacagcagtaatattaataattttcatgatttgagaagccttcgcttcgaagcgaaaagtcctaatagtagaagaaccctccataaacctggagtgactatatggatgccccccaccctaccacacattcgaagaacccgtatacataaaatctagacaaaaaaggaaggaatcgaaccccccaaagctggtttcaagccaaccccatggcctccatgactttttcaaaaaggtattagaaaaaccatttcataactttgtcaaagttaaattataggctaaatcctatatatcttaatggcacatgcagcgcaagtaggtctacaagacgctacttcccctatcatagaagagcttatcacctttcatgatcacgccctcataatcattttccttatctgcttcctagtcctgtatgcccttttcctaacactcacaacaaaactaactaatactaacatctcagacgctcaggaaatagaaaccgtctgaactatcctgcccgccatcatcctagtcctcatcgccctcccatccctacgcatcctttacataacagacgaggtcaacgatccctcccttaccatcaaatcaattggccaccaatggtactgaacctacgagtacaccgactacggcggactaatcttcaactcctacatacttcccccattattcctagaaccaggcgacctgcgactccttgacgttgacaatcgagtagtactcccgattgaagcccccattcgtataataattacatcacaagacgtcttgcactcatgagctgtccccacattaggcttaaaaacagatgcaattcccggacgtctaaaccaaaccactttcaccgctacacgaccgggggtatactacggtcaatgctctgaaatctgtggagcaaaccacagtttcatgcccatcgtcctagaattaattcccctaaaaatctttgaaatagggcccgtatttaccctatagcaccccctctaccccctctagagcccactgtaaagctaacttagcattaaccttttaagttaaagattaagagaaccaacacctctttacagtgaaatgccccaactaaatactaccgtatggcccaccataattacccccatactccttacactattcctcatcacccaactaaaaatattaaacacaaactaccacctacctccctcaccaaagcccataaaaataaaaaattataacaaaccctgagaaccaaaatgaacgaaaatctgttcgcttcattcattgcccccacaatcctaggcctacccgccgcagtactgatcattctatttccccctctattgatccccacctccaaatatctcatcaacaaccgactaatcaccacccaacaatgactaatcaaactaacctcaaaacaaatgatagccatacacaacactaaaggacgaacctgatctcttatactagtatccttaatcatttttattgccacaactaacctcctcggactcctgcctcactcatttacaccaaccacccaactatctataaacctagccatggccatccccttatgagcgggcgcagtgattataggctttcgctctaagattaaaaatgccctagcccacttcttaccacaaggcacacctacaccccttatccccatactagttattatcgaaaccatcagcctactcattcaaccaatagccctggccgtacgcctaaccgctaacattactgcaggccacctactcatgcacctaattggaagcgccaccctagcaatatcaaccattaaccttccctctacacttatcatcttcacaattctaattctactgactatcctagaaatcgctgtcgccttaatccaagcctacgttttcacacttctagtaagcctctacctgcacgacaacacataatgacccaccaatcacatgcctatcatatagtaaaacccagcccatgacccctaacaggggccctctcagccctcctaatgacctccggcctagccatgtgatttcacttccactccataacgctcctcatactaggcctactaaccaacacactaaccatataccaatgatggcgcgatgtaacacgagaaagcacataccaaggccaccacacaccacctgtccaaaaaggccttcgatacgggataatcctatttattacctcagaagtttttttcttcgcaggatttttctgagccttttaccactccagcctagcccctaccccccaactaggagggcactgacccccaacaggcatcaccccgctaaatcccctagaagtcccactcctaaacacatccgtattactcgcatcaggagtatcaatcacctgagctcaccatagtctaatagaaaacaaccgaaaccaaataattcaagcactgcttattacaattttactgggtctctattttaccctcctacaagcctcagagtacttcgagtctcccttcaccatttccgacggcatctacggctcaacattttttgtagccacaggcttccacggacttcacgtcattattggctcaactttcctcactatctgcttcatccgccaactaatatttcactttacatccaaacatcactttggcttcgaagccgccgcctgatactggcattttgtagatgtggtttgactatttctgtatgtctccatctattgatgagggtcttactcttttagtataaatagtaccgttaacttccaattaactagttttgacaacattcaaaaaagagtaataaacttcgccttaattttaataatcaacaccctcctagccttactactaataattattacattttgactaccacaactcaacggctacatagaaaaatccaccccttacgagtgcggcttcgaccctatatcccccgcccgcgtccctttctccataaaattcttcttagtagctattaccttcttattatttgatctagaaattgccctccttttacccctaccatgagccctacaaacaactaacctgccactaatagttatgtcatccctcttattaatcatcatcctagccctaagtctggcctatgagtgactacaaaaaggattagactgagccgaattggtatatagtttaaacaaaacgaatgatttcgactcattaaattatgataatcatatttaccaaatgcccctcatttacataaatattatactagcatttaccatctcacttctaggaatactagtatatcgctcacacctcatatcctccctactatgcctagaaggaataatactatcgctgttcattatagctactctcataaccctcaacacccactccctcttagccaatattgtgcctattgccatactagtcttcgccgcctgcgaagcagcggtgggcctagccctactagtctcaatctccaacacatatggcctagactacgtacataacctaaacctactccaatgctaaaactaatcgtcccaacaattatattactaccactgacatgactttccaaaaagcacataatttgaatcaacacaaccacccacagcctaattattagcatcatccccctactattttttaaccaaatcaacaacaacctatttagctgttccccaaccttttcctccgaccccctaacaacccccctcctaatactaactacctgactcctacccctcacaatcatggcaagccaacgccacttatccagtgaaccactatcacgaaaaaaactctacctctctatactaatctccctacaaatctccttaattataacattcacagccacagaactaatcatattttatatcttcttcgaaaccacacttatccccaccttggctatcatcacccgatgaggcaaccagccagaacgcctgaacgcaggcacatacttcctattctacaccctagtaggctcccttcccctactcatcgcactaatttacactcacaacaccctaggctcactaaacattctactactcactctcactgcccaagaactatcaaactcctgagccaacaacttaatatgactagcttacacaatagcttttatagtaaagatacctctttacggactccacttatgactccctaaagcccatgtcgaagcccccatcgctgggtcaatagtacttgccgcagtactcttaaaactaggcggctatggtataatacgcctcacactcattctcaaccccctgacaaaacacatagcctaccccttccttgtactatccctatgaggcataattataacaagctccatctgcctacgacaaacagacctaaaatcgctcattgcatactcttcaatcagccacatagccctcgtagtaacagccattctcatccaaaccccctgaagcttcaccggcgcagtcattctcataatcgcccacggacttacatcctcattactattctgcctagcaaactcaaactacgaacgcactcacagtcgcatcataatcctctctcaaggacttcaaactctactcccactaatagctttttgatgacttctagcaagcctcgctaacctcgccttaccccccactattaacctactgggagaactctctgtgctagtaaccacgttctcctgatcaaatatcactctcctacttacaggactcaacatactagtcacagccctatactccctctacatatttaccacaacacaatggggctcactcacccaccacattaacaacataaaaccctcattcacacgagaaaacaccctcatgttcatacacctatcccccattctcctcctatccctcaaccccgacatcattaccgggttttcctcttgtaaatatagtttaaccaaaacatcagattgtgaatctgacaacagaggcttacgaccccttatttaccgagaaagctcacaagaactgctaactcatgcccccatgtctaacaacatggctttctcaacttttaaaggataacagctatccattggtcttaggccccaaaaattttggtgcaactccaaataaaagtaataaccatgcacactactataaccaccctaaccctgacttccctaattccccccatccttaccaccctcgttaaccctaacaaaaaaaactcatacccccattatgtaaaatccattgtcgcatccacctttattatcagtctcttccccacaacaatattcatgtgcctagaccaagaagttattatctcgaactgacactgagccacaacccaaacaacccagctctccctaagcttcaaactagactacttctccataatattcatccctgtagcattgttcgttacatggtccatcatagaattctcactgtgatatataaactcagacccaaacattaatcagttcttcaaatatctactcattttcctaattaccatactaatcttagttaccgctaacaacctattccaactgttcatcggctgagagggcgtaggaattatatccttcttgctcatcagttgatgatacgcccgagcagatgccaacacagcagccattcaagcaatcctatacaaccgtatcggcgatatcggtttcatcctcgccttagcatgatttatcctacactccaactcatgagacccacaacaaatagcccttctaaacgctaatccaagcctcaccccactactaggcctcctcctagcagcagcaggcaaatcagcccaattaggtctccacccctgactcccctcagccatagaaggccccaccccagtctcagccctactccactcaagcactatagttgtagccggaatcttcttactcatccgcttccaccccctagcagaaaatagcccactaatccaaactctaacactatgcttaggcgctatcaccactctgtttgcagcagtctgcgcccttacacaaaatgacatcaaaaaaatcgtagccttctccacttcaagtcaactaggactcataatagttacaatcggcatcaaccaaccacacctagcattcctgcacatctgtacccacgccttcttcaaagccatactatttatgtgctccgggtccatcatccacaaccttaacaatgaacaagatattcgaaaaataggaggactactcaaaaccatacctctcacttcaacctccctcaccattggcagcctagcattagcaggaatacctttcctcacaggtttctactccaaagaccacatcatcgaaaccgcaaacatatcatacacaaacgcctgagccctatctattactctcatcgctacctccctgacaagcgcctatagcactcgaataattcttctcaccctaacaggtcaacctcgcttccccgcccttactaacattaacgaaaataaccccaccctactaaaccccattaaacgcctggcagccggaagcctattcgcaggatttctcattactaacaacatttcccccgcatcccccttccaaacaacaatccccctctacctaaaactcacagccctcgctgtcactttcctaggacttctaacagccctagacctcaactacctaaccaacaaacttaaaataaaatccccactatgcacattttatttctccaacatactcggattctaccctagcatcacacaccgcacaatcccctatctaggccttcttacgagccaaaacctgcccctactcctcctagacctaacctgactagaaaagctattacctaaaacaatttcacagcaccaaatctccacctccatcatcacctcaacccaaaaaggcataattaaactttacttcctctctttcttcttcccactcatcctaaccctactcctaatcacataacctattcccccgagcaatctcaattacaatatatacaccaacaaacaatgttcaaccagtaaccactactaatcaacgcccataatcatacaaagcccccgcaccaataggatcctcccgaatcaaccctgacccctctccttcataaattattcagcttcctacactattaaagtttaccacaaccaccaccccatcatactctttcacccacagcaccaatcctacctccatcgctaaccccactaaaacactcaccaagacctcaacccctgacccccatgcctcaggatactcctcaatagccatcgctgtagtatatccaaagacaaccatcattccccctaaataaattaaaaaaactattaaacccatataacctcccccaaaattcagaataataacacacccgaccacaccgctaacaatcaatactaaacccccataaataggagaaggcttagaagaaaaccccacaaaccccattactaaacccacactcaacagaaacaaagcatacatcattattctcgcacggactacaaccacgaccaatgatatgaaaaaccatcgttgtatttcaactacaagaacaccaatgaccccaatacgcaaaattaaccccctaataaaattaattaaccactcattcatcgacctccccaccccatccaacatctccgcatgatgaaacttcggctcactccttggcgcctgcctgatcctccaaatcaccacaggactattcctagccatgcactactcaccagacgcctcaaccgccttttcatcaatcgcccacatcactcgagacgtaaattatggctgaatcatccgctaccttcacgccaatggcgcctcaatattctttatctgcctcttcctacacatcgggcgaggcctatattacggatcatttctctactcagaaacctgaaacatcggcattatcctcctgcttgcaactatagcaacagccttcataggctatgtcctcccgtgaggccaaatatcattctgaggggccacagtaattacaaacttactatccgccatcccatacattgggacagacctagttcaatgaatctgaggaggctactcagtagacagtcccaccctcacacgattctttacctttcacttcatcttacccttcattattgcagccctagcagcactccacctcctattcttgcacgaaacgggatcaaacaaccccctaggaatcacctcccattccgataaaatcaccttccacccttactacacaatcaaagacgccctcggcttacttctcttccttctctccttaatgacattaacactattctcaccagacctcctaggcgacccagacaattataccctagccaaccccttaaacacccctccccacatcaagcccgaatgatatttcctattcgcctacacaattctccgatccgtccctaacaaactaggaggcgtccttgccctattactatccatcctcatcctagcaataatccccatcctccatatatccaaacaacaaagcataatatttcgcccactaagccaatcactttattgactcctagccgcagacctcctcattctaacctgaatcggaggacaaccagtaagctacccttttaccatcattggacaagtagcatccatactatacttcacaacaatcctaatcctaataccaactatctccctaattgaaaacaaaatactcaaatgggcctgtccttgtagtataaactaatacaccagtcttgtaaaccggagatgaaaacctttttccaaggacaaatcagagaaaaagtctttaactccaccattagcacccaaagctaagattctaatttaaactattctctgttctttcatggggaagcagatttgggtaccacccaagtattgactcacccatcaacaaccgctatgtatttcgtacattactgccagccaccatgaatattgtacggtaccataaatacttgaccacctgtagtacataaaaacccaatccacatcaaaaccccctccccatgcttacaagcaagtacagcaatcaaccttcaactatcacacatcaactgcaactccaaagccacccctctcccactaggataccaacaaacctacccacccttaacagtacatagtacataaagccatttaccgtacatagcacattacagtcaaatcccttctcgtccccatggatgacccccctcagataggggtcccttgaccaccatcctccgtgaaatcaatatcccgcacaagagtgctactctcctcgctccgggcccataacacttgggggtagctaaagtgaactgtatccgacatctggttcctacttcagggccataaagcctaaatagcccacacgttccccttaaataagacatcacgatg

SEQ ID NO: 244 - DNA, 16571 bp, Homo sapiens mitochondrial
  3109: "n" refers to a nucleotide at position 3107 of the Cambridge Reference Sequence (CRS, Anderson et al. 1981 Nature 290:457-465), later determined to be absent from the human mtDNA sequence according to the revised CRS (rCRS, Andrews et al. 1999 Nature Genetics 23:147); "n" therefore represents a single nucleotide deletion at a position corresponding to nucleotide 3107 of SEQ ID NO:1 as provided herein.
gatcacaggtctatcaccctattaaccactcacgggagctctccatgcatttggtattttcgtctggggggtgtgcacgcgatagcattgcgagacgctggagccggagcaccctatgtcgcagtatctgtctttgattcctgcctcattctattatttatcgcacctacgttcaatattacaggcgaacatacctactaaagtgtgttaattaattaatgcttgtaggacataataataacaattgaatgtctgcacagccgctttccacacagacatcataacaaaaaattttcaccaaaccccccctcccccccgcttctggccacagcacttaaacacatctctgccaaaccccaaaaacaaagaaccctaacaccagcctaaccagatttcaaattttatcttttggcggtatgcacttttaacagtcaccccccaactaacacattattttcccctcccactcccatactactaatctcatcaacacaacccccgcccatcctacccagcacacacacaccgctgctaaccccataccccgaaccaaccaaaccccaaagacaccccccacagtttatgtagcttacctcctcaaagcaatacactgaaaatgtttagacgggctcacatcaccccataaacaaataggtttggtcctagcctttctattagctcttagtaagattacacatgcaagcatccccgttccagtgagttcaccctctaaatcaccacgatcaaaagggacaagcatcaagcacgcagcaatgcagctcaaaacgcttagcctagccacacccccacgggaaacagcagtgattaacctttagcaataaacgaaagtttaactaagctatactaaccccagggttggtcaatttcgtgccagccaccgcggtcacacgattaacccaagtcaatagaagccggcgtaaagagtgttttagatcaccccctccccaataaagctaaaactcacctgagttgtaaaaaactccagttgacacaaaatagactacgaaagtggctttaacatatctgaacacacaatagctaagacccaaactgggattagataccccactatgcttagccctaaacctcaacagttaaatcaacaaaactgctcgccagaacactacgagccacagcttaaaactcaaaggacctggcggtgcttcatatccctctagaggagcctgttctgtaatcgataaaccccgatcaacctcaccacctcttgctcagcctatataccgccatcttcagcaaaccctgatgaaggctacaaagtaagcgcaagtacccacgtaaagacgttaggtcaaggtgtagcccatgaggtggcaagaaatgggctacattttctaccccagaaaactacgatagcccttatgaaacttaagggtcgaaggtggatttagcagtaaactgagagtagagtgcttagttgaacagggccctgaagcgcgtacacaccgcccgtcaccctcctcaagtatacttcaaaggacatttaactaaaacccctacgcatttatatagaggagacaagtcgtaacatggtaagtgtactggaaagtgcacttggacgaaccagagtgtagcttaacacaaagcacccaacttacacttaggagatttcaacttaacttgaccgctctgagctaaacctagccccaaacccactccaccttactaccagacaaccttagccaaaccatttacccaaataaagtataggcgatagaaattgaaacctggcgcaatagatatagtaccgcaagggaaagatgaaaaattataaccaagcataatatagcaaggactaacccctataccttctgcataatgaattaactagaaataactttgcaaggagagccaaagctaagacccccgaaaccagacgagctacctaagaacagctaaaagagcacacccgtctatgtagcaaaatagtgggaagatttataggtagaggcgacaaacctaccgagcctggtgatagctggttgtccaagatagaatcttagttcaactttaaatttgcccacagaaccctctaaatccccttgtaaatttaactgttagtccaaagaggaacagctctttggacactaggaaaaaaccttgtagagagagtaaaaaatttaacacccatagtaggcctaaaagcagccaccaattaagaaagcgttcaagctcaacacccactacctaaaaaatcccaaacatataactgaactcctcacacccaattggaccaatctatcaccctatagaagaactaatgttagtataagtaacatgaaaacattctcctccgcataagcctgcgtcagattaaaacactgaactgacaattaacagcccaatatctacaatcaaccaacaagtcattattaccctcactgtcaacccaacacaggcatgctcataaggaaaggttaaaaaaagtaaaaggaactcggcaaatcttaccccgcctgtttaccaaaaacatcacctctagcatcaccagtattagaggcaccgcctgcccagtgacacatgtttaacggccgcggtaccctaaccgtgcaaaggtagcataatcacttgttccttaaatagggacctgtatgaatggctccacgagggttcagctgtctcttacttttaaccagtgaaattgacctgcccgtgaagaggcgggcatgacacagcaagacgagaagaccctatggagctttaatttattaatgcaaacagtacctaacaaacccacaggtcctaaactaccaaacctgcattaaaaatttcggttggggcgacctcggagcagaacccaacctccgagcagtacatgctaagacttcaccagtcaaagcgaactactatactcaattgatccaataacttgaccaacggaacaagttaccctagggataacagcgcaatcctattctagagtccatatcaacaatagggtttacgacctcgatgttggatcaggacatcccgatggtgcagccgctattaaaggttcgtttgttcaacgattaaagtcctacgtgatctgagttcagaccggagtaatccaggtcggtttctatctacnttcaaattcctccctgtacgaaaggacaagagaaataaggcctacttcacaaagcgccttcccccgtaaatgatatcatctcaacttagtattatacccacacccacccaagaacagggtttgttaagatggcagagcccggtaatcgcataaaacttaaaactttacagtcagaggttcaattcctcttcttaacaacatacccatggccaacctcctactcctcattatacccattctaatcgcaatggcattcctaatgcttaccgaacgaaaaattctaggctatatacaactacgcaaaggccccaacgttgtaggcccctacgggctactacaacccttcgctgacgccataaaactcttcaccaaagagcccctaaaacccgccacatctaccatcaccctctacatcaccgccccgaccttagctctcaccatcgctcttctactatgaacccccctccccatacccaaccccctggtcaacctcaacctaggcctcctatttattctagccacctctagcctagccgtttactcaatcctctgatcagggtgagcatcaaactcaaactacgccctgatcggcgcactgcgagcagtagcccaaacaatctcatatgaagtcaccctagccatcattctactatcaacattactaataagtggctcctttaacctctccacccttatcacaacacaagaacacctctgattactcctgccatcatgacccttggccataatatgatttatctccacactagcagagaccaaccgaacccccttcgaccttgccgaaggggagtccgaactagtctcaggcttcaacatcgaatacgccgcaggccccttcgccctattcttcatagccgaatacacaaacattattataataaacaccctcaccactacaatcttcctaggaacaacatatgacgcactctcccctgaactctacacaacatattttgtcaccaagaccctacttctaacctccctgttcttatgaattcgaacagcatacccccgattccgctacgaccaactcatacacctcctatgaaaaaacttcctaccactcaccctagcattacttatatgacatgtctccatacccattacaatctccagcattccccctcaaacctaagaaatatgtctgataaaagagttactttgatagagtaaataataggagcttaaacccccttatttctaggactatgagaatcgaacccatccctgagaatccaaaattctccgtgccacctatcacaccccatcctaaagtaaggtcagctaaataagctatcgggcccatgccccgaaaatgttggttatacccttcccgtactaattaatcccctggcccaacccgtcatctactctaccatctttgcaggcacactcatcacagcgctaagctcgcactgattttttacctgagtaggcctagaaataaacatgctagcttttattccagttctaaccaaaaaaataaaccctcgttccacagaagctgccatcaagtatttcctcacgcaagcaaccgcatccataatccttctaatagctatcctcttcaacaatatactctccggacaatgaaccataaccaatactaccaatcaatactcatcattaataatcataatggctatagcaataaaactaggaatagccccctttcacttctgagtcccagaggttacccaaggcacccctctgacatccggcctgcttcttctcacatgacaaaaactagcccccatctcaatcatataccaaatctctccctcactaaacgtaagccttctcctcactctctcaatcttatccatcatagcaggcagttgaggtggattaaaccaaacccagctacgcaaaatcttagcatactcctcaattacccacataggatgaataatagcagttctaccgtacaaccctaacataaccattcttaatttaactatttatattatcctaactactaccgcattcctactactcaacttaaactccagcaccacgaccctactactatctcgcacctgaaacaagctaacatgactaacacccttaattccatccaccctcctctccctaggaggcctgcccccgctaaccggctttttgcccaaatgggccattatcgaagaattcacaaaaaacaatagcctcatcatccccaccatcatagccaccatcaccctccttaacctctacttctacctacgcctaatctactccacctcaatcacactactccccatatctaacaacgtaaaaataaaatgacagtttgaacatacaaaacccaccccattcctccccacactcatcgcccttaccacgctactcctacctatctccccttttatactaataatcttatagaaatttaggttaaatacagaccaagagccttcaaagccctcagtaagttgcaatacttaatttctgtaacagctaaggactgcaaaaccccactctgcatcaactgaacgcaaatcagccactttaattaagctaagcccttactagaccaatgggacttaaacccacaaacacttagttaacagctaagcaccctaatcaactggcttcaatctacttctcccgccgccgggaaaaaaggcgggagaagccccggcaggtttgaagctgcttcttcgaatttgcaattcaatatgaaaatcacctcggagctggtaaaaagaggcctaacccctgtctttagatttacagtccaatgcttcactcagccattttacctcacccccactgatgttcgccgaccgttgactattctctacaaaccacaaagacattggaacactatacctattattcggcgcatgagctggagtcctaggcacagctctaagcctccttattcgagccgagctgggccagccaggcaaccttctaggtaacgaccacatctacaacgttatcgtcacagcccatgcatttgtaataatcttcttcatagtaatacccatcataatcggaggctttggcaactgactagttcccctaataatcggtgcccccgatatggcgtttccccgcataaacaacataagcttctgactcttacctccctctctcctactcctgctcgcatctgctatagtggaggccggagcaggaacaggttgaacagtctaccctcccttagcagggaactactcccaccctggagcctccgtagacctaaccatcttctccttacacctagcaggtgtctcctctatcttaggggccatcaatttcatcacaacaattatcaatataaaaccccctgccataacccaataccaaacgcccctcttcgtctgatccgtcctaatcacagcagtcctacttctcctatctctcccagtcctagctgctggcatcactatactactaacagaccgcaacctcaacaccaccttcttcgaccccgccggaggaggagaccccattctataccaacacctattctgatttttcggtcaccctgaagtttatattcttatcctaccaggcttcggaataatctcccacattgtaacttactactccggaaaaaaagaaccatttggatacataggtatggtctgagctatgatatcaattggcttcctagggtttatcgtgtgagcacaccatatatttacagtaggaatagacgtagacacacgagcatatttcacctccgctaccataatcatcgctatccccaccggcgtcaaagtatttagctgactcgccacactccacggaagcaatatgaaatgatctgctgcagtgctctgagccctaggattcatctttcttttcaccgtaggtggcctgactggcattgtattagcaaactcatcactagacatcgtactacacgacacgtactacgttgtagctcacttccactatgtcctatcaataggagctgtatttgccatcataggaggcttcattcactgatttcccctattctcaggctacaccctagaccaaacctacgccaaaatccatttcactatcatattcatcggcgtaaatctaactttcttcccacaacactttctcggcctatccggaatgccccgacgttactcggactaccccgatgcatacaccacatgaaacatcctatcatctgtaggctcattcatttctctaacagcagtaatattaataattttcatgatttgagaagccttcgcttcgaagcgaaaagtcctaatagtagaagaaccctccataaacctggagtgactatatggatgccccccaccctaccacacattcgaagaacccgtatacataaaatctagacaaaaaaggaaggaatcgaaccccccaaagttggtttcaagccaaccccatggcctccatgactttttcaaaaaggtattagaaaaaccatttcataactttgtcaaagttaaattataggctaaatcctatatatcttaatggcacatgcagcgcaagtaggtctacaagacgctacttcccctatcatagaagagcttatcacctttcatgatcacgccctcataatcattttccttatctgcttcctagtcctgtatgcccttttcctaacactcacaacaaaactaactaatactaacatctcagacgctcaggaaatagaaaccgtctgaactatcctgcccgccatcatcctagtcctcatcgccctcccatccctacgcatcctttacataacagacgaggtcaacgatccctcccttaccatcaaatcaattggccaccaatggtactgaacctacgagtacaccgactacggcggactaatcttcaactcctacatacttcccccattattcctagaaccaggcgacctgcgactccttgacgttgacaatcgagtagtactcccgattgaagcccccattcgtataataattacatcacaagacgtcttgcactcatgagctgtccccacattaggcttaaaaacagatgcaattcccggacgtctaaaccaaaccactttcaccgctacacgaccgggggtatactacggtcaatgctctgaaatctgtggagcaaaccacagtttcatgcccatcgtcctagaattaattcccctaaaaatctttgaaatagggcccgtatttaccctatagcaccccctctaccccctctagagcccactgtaaagctaacttagcattaaccttttaagttaaagattaagagaaccaacacctctttacagtgaaatgccccaactaaatactaccgtatggcccaccataattacccccatactccttacactattcctcatcacccaactaaaaatattaaacacaaactaccacctacctccctcaccaaagcccataaaaataaaaaattataacaaaccctgagaaccaaaatgaacgaaaatctgttcgcttcattcattgcccccacaatcctaggcctacccgccgcagtactgatcattctatttccccctctattgatccccacctccaaatatctcatcaacaaccgactaatcaccacccaacaatgactaatcaaactaacctcaaaacaaatgataaccatacacaacactaaaggacgaacctgatctcttatactagtatccttaatcatttttattgccacaactaacctcctcggactcctgcctcactcatttacaccaaccacccaactatctataaacctagccatggccatccccttatgagcgggcgcagtgattataggctttcgctctaagattaaaaatgccctagcccacttcttaccacaaggcacacctacaccccttatccccatactagttattatcgaaaccatcagcctactcattcaaccaatagccctggccgtacgcctaaccgctaacattactgcaggccacctactcatgcacctaattggaagcgccaccctagcaatatcaaccattaaccttccctctacacttatcatcttcacaattctaattctactgactatcctagaaatcgctgtcgccttaatccaagcctacgttttcacacttctagtaagcctctacctgcacgacaacacataatgacccaccaatcacatgcctatcatatagtaaaacccagcccatgacccctaacaggggccctctcagccctcctaatgacctccggcctagccatgtgatttcacttccactccataacgctcctcatactaggcctactaaccaacacactaaccatataccaatgatggcgcgatgtaacacgagaaagcacataccaaggccaccacacaccacctgtccaaaaaggccttcgatacgggataatcctatttattacctcagaagtttttttcttcgcaggatttttctgagccttttaccactccagcctagcccctaccccccaattaggagggcactggcccccaacaggcatcaccccgctaaatcccctagaagtcccactcctaaacacatccgtattactcgcatcaggagtatcaatcacctgagctcaccatagtctaatagaaaacaaccgaaaccaaataattcaagcactgcttattacaattttactgggtctctattttaccctcctacaagcctcagagtacttcgagtctcccttcaccatttccgacggcatctacggctcaacattttttgtagccacaggcttccacggacttcacgtcattattggctcaactttcctcactatctgcttcatccgccaactaatatttcactttacatccaaacatcactttggcttcgaagccgccgcctgatactggcattttgtagatgtggtttgactatttctgtatgtctccatctattgatgagggtcttactcttttagtataaatagtaccgttaacttccaattaactagttttgacaacattcaaaaaagagtaataaacttcgccttaattttaataatcaacaccctcctagccttactactaataattattacattttgactaccacaactcaacggctacatagaaaaatccaccccttacgagtgcggcttcgaccctatatcccccgcccgcgtccctttctccataaaattcttcttagtagctattaccttcttattatttgatctagaaattgccctccttttacccctaccatgagccctacaaacaactaacctgccactaatagttatgtcatccctcttattaatcatcatcctagccctaagtctggcctatgagtgactacaaaaaggattagactgagccgaattggtatatagtttaaacaaaacgaatgatttcgactcattaaattatgataatcatatttaccaaatgcccctcatttacataaatattatactggcatttaccatctcacttctaggaatactagtatatcgctcacacctcatatcctccctactatgcctagaaggaataatactatcgctgttcattatagctactctcataaccctcaacacccactccctcttagccaatattgtgcctattgccatactagtctttgccgcctgcgaagcagcggtgggcctagccctactagtctcaatctccaacacatatggcctagactacgtacataacctaaacctactccaatgctaaaactaatcgtcccaacaattatattactaccactgacatgactttccaaaaaacacataatttgaatcaacacaaccacccacagcctaattattagcatcatccctctactattttttaaccaaatcaacaacaacctatttagctgttccccaaccttttcctccgaccccctaacaacccccctcctaatactaactacctgactcctacccctcacaatcatggcaagccagcgccacttatccagtgaaccactatcacgaaaaaaactctacctctctatactaatctccctacaaatctccttaattataacattcacagccacagaactaatcatattttatatcttcttcgaaaccacacttatccccaccttggctatcatcacccgatgaggcaaccagccagaacgcctgaacgcaggcacatacttcctattctacaccctagtaggctcccttcccctactcatcgcactgatttacactcacaacaccctaggctcactaaacattctactactcactctcactgcccaagaactatcaaactcctgagccaacaacttaatatgactagcttacacaatagcttttatagtaaaaatacctctttacggactccacttatgactccctaaagcccatgtcgaagcccccatcgctgggtcaatagtacttgccgcagtactcttaaaactaggcggctatggtataatacgcctcacactcattctcaaccccctgacaaaacacatagcctaccccttccttgtactatccctatgaggcataattataacaagctccatctgcctacgacaaacagacctaaaatcgctcattgcatactcttcaatcagccacatagccctcgtagtaacagccattctcatccaaaccccctgaagcttcaccggcgcagtcattctcataatcgcccacggacttacatcctcattactattctgcctagcaaactcaaactacgaacgcactcacagtcgcatcataatcctctctcaaggacttcaaactctactcccactaatagctttttgatgacttctagcaagcctcgctaacctcgccttaccccccactattaacctactgggagaactctctgtgctagtaaccacgttctcctgatcaaatatcactctcctacttacaggactcaacatactagtcacagccctatactccctctacatatttaccacaacacaatggggctcactcacccaccacattaacaacataaaaccctcattcacacgagaaaacaccctcatgttcatacacctatcccccattctcctcctatccctcaaccccgacatcattaccgggttttcctcttgtaaatatagtttaaccaaaacatcagattgtgaatctgacaacagaggcttacgaccccttatttaccgagaaagctcacaagaactgctaactcatgcccccatgtctaacaacatggctttctcaacttttaaaggataacagctatccattggtcttaggccccaaaaattttggtgcaactccaaataaaagtaataaccatgcacactactataaccaccctaaccctgacttccctaattccccccatccttaccaccctcgttaaccctaacaaaaaaaactcatacccccattatgtaaaatccattgtcgcatccacctttattatcagtctcttccccacaacaatattcatgtgcctagaccaagaagttattatctcgaactgacactgagccacaacccaaacaacccagctctccctgagcttcaaactagactacttctccataatattcatccctgtggcattgttcgttacatggtccatcatagaattctcactgtgatatataaactcagacccaaacattaatcagttcttcaaatatctactcatcttcctaattaccatactaatcttagttaccgctaacaacctattccaactgttcatcggctgagagggcgtaggaattatatccttcttgctcatcagttgatgatacgcccgagcagatgccaacacagcagccattcaagcaatcctatacaaccgtatcggcgatatcggtttcatcctcgccttagcatgatttatcctacactccaactcatgagacccacaacaaatagcccttctaaacgctaatccaagcctcaccccactactaggcctcctcctagcagcagcaggcaaatcagcccaattaggtctccacccctgactcccctcagccatagaaggccccaccccagtctcagccctactccactcaagcactatagttgtagcaggaatcttcttactcatccgcttccaccccctagcagaaaatagcccactaatccaaactctaacactatgcttaggcgctatcaccactctgttcgcagcagtctgcgcccttacacaaaatgacatcaaaaaaatcgtagccttctccacttcaagtcaactaggactcataatagttacaatcggcatcaaccaaccacacctagcattcctgcacatctgtacccacgccttcttcaaagccatactatttatgtgctccgggtccatcatccacaaccttaacaatgaacaagatattcgaaaaataggaggactactcaaaaccatacctctcacttcaacctccctcaccattggcagcctagcattagcaggaatacctttcctcacaggtttctactccaaagaccacatcatcgaaaccgcaaacatatcatacacaaacgcctgagccctatctattactctcatcgctacctccctgacaagcgcctatagcactcgaataattcttctcaccctaacaggtcaacctcgcttccccacccttactaacattaacgaaaataaccccaccctactaaaccccattaaacgcctgacagccggaagcctattcgcaggatttctcattactaacaacatttcccccgcatcccccttccaaacaacaatccccctctacctaaaactcacagccctcgctgtcactttcctaggacttctaacagccctagacctcaactacctaaccaacaaacttaaaataaaatccccactatgcacattttatttctccaacatactcggattctaccctagcatcacacaccgcacaatcccctatctaggccttcttacgagccaaaacctgcccctactcctcctagacctaacctgactagaaaagctattacctaaaacaatttcacagcaccaaatctccacctccatcatcacctcaacccaaaaaggcataattaaactttacttcctctctttcttcttcccactcatcctaaccctactcctaatcacataacctattcccccgagcaatctcaattacaatatatacaccaacaaacaatgttcaaccagtaactactactaatcaacgcccataatcatacaaagcccccgcaccaataggatcctcccgaatcaaccctgacccctctccttcataaattattcagcttcctacactattaaagtttaccacaaccaccaccccatcatactctttcacccacagcaccaatcctacctccatcgctaaccccactaaaacactcaccaagacctcaacccctgacccccatgcctcaggatactcctcaatagccatcgctgtagtatatccaaagacaaccatcattccccctaaataaattaaaaaaactattaaacccatataacctcccccaaaattcagaataataacacacccgaccacaccgctaacaatcaatactaaacccccataaataggagaaggcttagaagaaaaccccacaaaccccattactaaacccacactcaacagaaacaaagcatacatcattattctcgcacggactacaaccacgaccaatgatatgaaaaaccatcgttgtatttcaactacaagaacaccaatgaccccaatacgcaaaattaaccccctaataaaattaattaaccactcattcatcgacctccccaccccatccaacatctccgcatgatgaaacttcggctcactccttggcgcctgcctgatcctccaaatcaccacaggactattcctagccatgcactactcaccagacgcctcaaccgccttttcatcaatcgcccacatcactcgagacgtaaattatggctgaatcatccgctaccttcacgccaatggcgcctcaatattctttatctgcctcttcctacacatcgggcgaggcctatattacggatcatttctctactcagaaacctgaaacatcggcattatcctcctgcttgcaactatagcaacagccttcataggctatgtcctcccgtgaggccaaatatcattctgaggggccacagtaattacaaacttactatccgccatcccatacattgggacagacctagttcaatgaatctgaggaggctactcagtaaacagtcccaccctcacacgattctttacctttcacttcatcttgcccttcattattgcagccctagcagcactccacctcctattcttgcacgaaacgggatcaaacaaccccctaggaatcacctcccattccgataaaatcaccttccacccttactacacaatcaaagacgccctcggcttacttctcttcattctctccttaatgacattaacactattctcaccagacctcctaggcgacccagacaattataccctagccaaccccttaaacacccctccccacatcaagcccgaatgatatttcctattcgcctacacaattctccgatccgtccctaacaaactaggaggcgtccttgccctattactatccatcctcatcctagcaataatccccatcctccatatatccaagcaacaaagcataatatttcgcccactaagccaatcactttattgactcctagccgcagacctcctcattctaacctgaatcggaggacaaccagtaagctacccttttaccatcattggacaagtagcatccgtactatacttcacaacaatcctaatcctaataccaactatctccctaattgaaaacaaaatactcaaatgggcctgtccttgtagtataaactaatacaccagtcttgtaaaccggagatgaaaacctttttccaaggacaaatcagagaaaaagtctttaactccaccattagcacccaaagctaagattctaatttaaactattctctgttctttcatggggaagcagatttgggtaccacccaagtattgacttacccatcaacaaccgctatgtatttcgtacattactgccagccaccatgaatattgcacggtaccataaatacttgaccacctgtagtacataaaaacccaatccacatcaaaaccccctccccatgcttacaagcaagtacagcaatcaaccctcaactatcacacatcagctgcaactccaaagccacccctcacccactaggataccaacaaacctacccacccttaacagtacatagtacataaagccatttaccgtacatagcacattacagtcaaatcccttctcgtccccatggatgacccccctcagataggggtcccttgaccaccatcctccgtgaaatcaatatcccgcacaagagtgctactctcctcgctccgggcccataacacttgggggtagctaaagtgaactgtatccgacatctggttcctacttcagggccataaagcctaaatagcccacacgttccccttaaataagacatcacgatg

SEQ ID NO: 245 - DNA, 16569 bp, Homo sapiens mitochondrial
  3107: "n" refers to a nucleotide at position 3107 of the Cambridge Reference Sequence (CRS, Anderson et al. 1981 Nature 290:457-465), later determined to be absent from the human mtDNA sequence according to the revised CRS (rCRS, Andrews et al. 1999 Nature Genetics 23:147); "n" therefore represents a single nucleotide deletion at a position corresponding to nucleotide 3107 of SEQ ID NO:1 as provided herein.
gatcacaggtctatcaccctattaaccactcacgggagctctccatgcatttggtattttcgtttggggggtgtgcacgcgatagcattgcgagacgctggagccggagcaccctatgtcgcagtatctgtctttgattcctgccccatcctgttatttatcgcacctacgttcaatattacaggcgaacatacttactaaagtgtgttaattaattaatgcttgtaggacatagtaataacaattgaatgtctgcacagccgctttccacacagacatcataacaaaaaatttccaccaaaccccccctcccccccgcttctggccacagcacttaaacacatctctgccaaaccccaaaaacaaagaaccctaacaccagcctaaccagatttcaaattttatcttttggcggtatgcacttttaacagtcaccccccaactaacacattattttcccctcccactcccatactactaatctcatcaatacaacccccgcccatcctacccagcacacacaccgctgctaaccccataccccgaaccaaccaaaccccaaagacaccccccacagtttatgtagcttacctcctcaaagcaatacactgaaaatgtttagacgggctcacatcaccccataaacaaataggtttggtcctggcctttctattagctcttagtaagattacacatgcaagcatccccgttccagtgagttcaccctctaaatcaccacgatcaaaagggacaagcatcaagcacgcagcaatgcagctcaaaacgcttagcctagccacacccccacgggaaacagcagtgattaacctttagcaataaacgaaagtttaactaagctatactaaccccagggttggtcaatttcgtgccagccaccgcggtcacacgattaacccaagtcaatagaagccggcgtaaagagtgttttagatcaccccctccccaataaagctaaaactcacctgagttgtaaaaaactccagttgacacaaaatagactacgaaagtggctttaacatatctgaacacacaatagctaagacccaaactgggattagataccccactatgcttagccctaaacctcaacagttaaatcaacaaaactgctcgccagaacactacgagccacagcttaaaactcaaaggacctggcggtgcttcatatccctctagaggagcctgttctgtaatcgataaaccccgatcaacctcaccacctcttgctcagcctatataccgccatcttcagcaaaccctgatgaaggctacaaagtaagcgcaagtacccacgtaaagacgttaggtcaaggtgtagcccatgaggtggcaagaaatgggctacattttctaccccagaaaactacgatagcccttatgaaacttaagggtcgaaggtggatttagcagtaaactgagagtagagtgcttagttgaacagggccctgaagcgcgtacacaccgcccgtcaccctcctcaagtatacttcaaaggacatttaactaaaacccctacgcatttatatagaggagacaagtcgtaacatggtaagtgtactggaaagtgcacttggacgaaccagagtgtagcttaacacaaagcacccaacttacacttaggagatttcaacttaacttgaccgctctgagctaaacctagccccaaacccactccaccttactaccagacaaccttagccaaaccatttacccagataaagtataggcgatagaaattgaaacctggcgcaatagatatagtaccgcaagggaaagatgaaaaattataaccaagcataatatagcaaggactaacccctataccttctgcataatgaattaactagaaataactttgcaaggagagccaaagctaagacccccgaaaccagacgagctacctaagaacagctaaaagagcacacccgtctatgtagcaaaatagtgggaagatttataggtagaggcgacaaacctaccgagcctggtgatagctggttgtccaagatagaatcttagttcaactttaaatttgcccacagaaccctctaaatccccttgtaaatttaactgttagtccaaagaggaacagctctttggacactaggaaaaaaccttgtagagagagtaaaaaatttaacacccatagtaggcctaaaagcagccaccaattaagaaagcgttcaagctcaacacccactacctaaaaaatcccaaacatataactgaactcctcacacccaattggaccaatctatcaccctatagaagaactaatgttagtataagtaacatgaaaacattctcctccgcataagcctgcgtcagattaaaacactgaactgacaattaacagcccaatatctacaatcaaccaacaagtcattattaccctcactgtcaacccaacacaggcatgctcataaggaaaggttaaaaaaagtaaaaggaactcggcaaatcttaccccgcctgtttaccaaaaacatcacctctagcatcaccagtattagaggcaccgcctgcccagtgacacatgtttaacggccgcggtaccctaaccgtgcaaaggtagcataatcacttgttccttaaatagggacctgtatgaatggctccacgagggttcagctgtctcttacttttaaccagtgaaattgacctgcccgtgaagaggcgggcatgacacagcaagacgagaagaccctatggagctttaatttattaatgcaaacagtacctaacaaacccacaggtcctaaactaccaaacctgcattaaaaatttcggttggggcgacctcggagcagaacccaacctccgagcagtacatgctaagacttcaccagtcaaagcgaactactatactcaattgatccaataacttgaccaacggaacaagttaccctagggataacagcgcaatcctattctagagtccatatcaacaatagggtttacgacctcgatgttggatcaggacatcccgatggtgcagccgctattaaaggttcgtttgttcaacgattaaagtcctacgtgatctgagttcagaccggagtaatccaggtcggtttctatctacnttcaaattcctccctgtacgaaaggacaagagaaataaggcctacttcacaaagcgccttcccccgtaaatgatatcatctcaacttagtattatacccacacccacccaagaacagggtttgttaagatggcagagcccggtaatcgcataaaacttaaaactttacagtcagaggttcaattcctcttcttaacaacatacccatggccaacctcctactcctcattgtacccattctaatcgcaatggcattcctaatgcttaccgaacgaaaaattctaggctatatacaactacgcaaaggccccaacgttgtaggcccctacgggctactacaacccttcgctgacgccataaaactcttcaccaaagagcccctaaaacccgccacatctaccatcaccctctacatcaccgccccgaccttagctctcaccatcgctcttctactatgaacccccctccccatacccaaccccctggtcaacctcaacctaggcctcctatttattctagccacctctagcctagccgtttactcaatcctctgatcagggtgagcatcaaactcaaactacgccctgatcggcgcactgcgagcagtagcccaaacaatctcatatgaagtcaccctagccatcattctactatcaacattactaataagtggctcctttaacctctccacccttatcacaacacaagaacacctctgattactcctgccatcatgacccttggccataatatgatttatctccacactagcagagaccaaccgaacccccttcgaccttgccgaaggggagtccgaactagtctcaggcttcaacatcgaatacgccgcaggccccttcgccctattcttcatagccgaatacacaaacattattataataaacaccctcaccactacaatcttcctaggaacaacatatgacgcactctcccctgaactctacacaacatattttgtcaccaagaccctacttctaacctccctgttcttatgaattcgaacagcatacccccgattccgctacgaccaactcatacacctcctatgaaaaaacttcctaccactcaccctagcattacttatatgatatgtctccatacccattacaatctccagcatcccccctcaaacctaagaaatatgtctgataaaagagttactttgatagagtaaataataggagcttaaacccccttatttctaggactatgagaatcgaacccatccctgagaatccaaaattctccgtgccacctatcacaccccatcctaaagtaaggtcagctaaataagctatcgggcccataccccgaaaatgttggttatacccttcccgtactaattaatcccctggcccaacccgtcatctactctaccatctttgcaggcacactcatcacagcgctaagctcgcactgattttttacctgagtaggcctagaaataaacatgctagcttttattccagttctaaccaaaaaaataaaccctcgttccacagaagctgccatcaagtatttcctcacgcaagcaaccgcatccataatccttctaatagctatcctcttcaacaatatactctccggacaatgaaccataaccaatactaccaatcaatactcatcattaataatcataatggctatagcaataaaactaggaatagccccctttcacttctgagtcccagaggttgcccaaggcacccctctgacatccggcctgcttcttctcacatgacaaaaactagcccccatctcaatcatataccaaatctctccctcactaaacgtaagccttctcctcactctctcaatcttatccatcatagcaggcagttgaggtggattaaaccaaacccagctacgcaaaatcttagcatactcctcaattacccacataggatgaataatagcagttctaccgtacaaccctaacataaccattcttaacttaactatttatattatcctaactactaccgcattcctactactcaacttaaactccagcaccacgaccctactactatctcgcacctgaaacaagctaacatgactaacacccttaattccatccaccctcctctccctaggaggcctgcccccgctaaccggctttttgcccaaatgggccattatcgaagaattcacaaaaaacaatagcctcatcatccccaccatcatagccaccatcaccctccttaacctctacttctacctacgcctaatctactccacctcaatcacactactccccatatctaacaacgtaaaaataaaatgacagtttgaacatacaaaacccaccccattcctccccacactcatcgcccttaccacgctactcctacctatctccccttttatactaataatcttatagaaatttaggttaaatacagaccaagagccttcaaagccctcagtaagttgcaatacttaatttctgtaacagctaaggactgcaaaaccccactctgcatcaactgaacgcaaatcagccactttaattaagctaagcccttactagaccaatgggacttaaacccacaaacacttagttaacagctaagcaccctaatcaactggcttcaatctacttctcccgccgccgggaaaaaaggcgggagaagccccggcaggtttgaagctgcttcttcgaatttgcaattcaatatgaaaatcacctcggagctggtaaaaagaggcctaacccctgtctttagatttacagtccaatgcttcactcagccattttacctcacccccactgatgttcgccgaccgttgactattctctacaaaccacaaagacattggaacactatacctattattcggcgcatgagctggagtcctaggcacagctctaagcctccttattcgagccgagctgggccagccaggcaaccttctaggtaacgaccacatctacaacgttatcgtcacagcccatgcatttgtaataatcttcttcatagtaatacccatcataatcggaggctttggcaactgactagttcccctaataatcggtgcccccgatatggcgtttccccgcataaacaacataagcttctgactcttacctccctctctcctactcctgctcgcatctgctatagtggaggccggagcaggaacaggttgaacagtctaccctcccttagcagggaattactcccaccctggagcctccgtagacctaaccatcttctccttacacctagcaggtgtctcctctatcttaggggccatcaatttcatcacaacaattatcaatataaaaccccctgccataacccaataccaaacgcccctcttcgtctgatccgtcctaatcacagcagtcctacttctcctatctctcccagtcctagctgctggcatcactatactactaacagaccgcaacctcaacaccaccttcttcgaccccgccggaggaggagaccccattctataccaacacctattctgatttttcggtcaccctgaagtttatattcttatcctaccaggcttcggaataatctcccatattgtaacttactactccggaaaaaaagaaccatttggatacataggtatggtctgagctatgatatcaattggcttcctagggtttatcgtgtgagcacaccatatatttacagtaggaatagacgtagacacacgagcatatttcacctccgctaccataatcatcgctatccccaccggcgtcaaagtatttagctgactcgccacactccacggaagcaatatgaaatgatctgctgcagtgctctgagccctaggattcatctttcttttcaccgtaggtggcctgactggcattgtattagcaaactcatcactagacatcgtactacacgacacgtactacgttgtagctcacttccactatgtcctatcaataggagctgtatttgccatcataggaggcttcattcactgatttcccctattctcaggctacaccctagaccaaacctacgccaaaatccatttcactatcatattcatcggcgtaaatctaactttcttcccacaacactttctcggcctatccggaatgccccgacgttactcggactaccccgatgcatacaccacatgaaacatcctatcatctgtaggctcattcatttctctaacagcagtaatattaataattttcatgatttgagaagccttcgcttcgaagcgaaaagtcctaatagtagaagaaccctccataaacctggagtgactatatggatgccccccaccctaccacacattcgaagaacccgtatacataaaatctagacaaaaaaggaaggaatcgaaccccccaaagctggtttcaagccaaccccatggcctccatgactttttcaaaaaggtattagaaaaaccatttcataactttgtcaaagttaaattataggctaaatcctatatatcttaatggcacatgcagcgcaagtaggtctacaagacgctacttcccctatcatagaagagcttatcacctttcatgatcacgccctcataatcattttccttatctgcttcctagtcctgtatgcccttttcctaacactcacaacaaaactaactaatactaacatctcagacgctcaggaaatagaaaccgtctgaactatcctgcccgccatcatcctagtcctcatcgccctcccatccctacgcatcctttacataacagacgaggtcaacgatccctcccttaccatcaaatcaattggccaccaatggtactgaacctacgagtacaccgactacggcggactaatcttcaactcctacatacttcccccattattcctagaaccaggcgacctgcgactccttgacgttgacaatcgagtagtactcccgattgaaacccccattcgtataataattacatcacaagacgtcttgcactcatgagctgtccccacattaggcttaaaaacagatgcaattcccggacgtctaaaccaaaccactttcaccgctacacgaccgggggtatactacggtcaatgctctgaaatctgtggagcaaaccacagtttcatgcccatcgtcctagaattaattcccctaaaaatctttgaaatagggcccgtatttaccctatagcaccccctctaccccctctagagcccactgtaaagctaacttagcattaaccttttaagttaaagattaagagaaccaacacctctttacagtgaaatgtcccaactaaatactaccgtatggcccaccataattacccccatactccttacactattcctcatcacccaactaaaaatattaaacacaaactaccacctacctccctcaccaaagcccataaaaataaaaaattataacaaaccctgagaaccaaaatgaacgaaaatctgttcgcttcattcattgcccccacaatcctaggcctacccgccgcagtactgatcattctatttccccctctattgatccccacctccaaatatctcatcaacaaccgactaatcaccacccaacaatgactaatcaaactaacctcaaaacaaatgataaccatacacaacactaaaggacgaacctgatctcttatactagtatccttaatcatttttattgccacaactaacctcctcggactcctgccttactcatttacaccaaccacccaactatctataaacctagccatggccatccccttatgagcgggcgcagtgattataggctttcgctctaagattaaaaatgccctagcccacttcttaccacaaggcacacctacaccccttatccccatactagttattatcgaaaccatcagcctactcattcaaccaatagccctggccgtacgcctaaccgctaacattactgcaggccacctactcatgcacctaattggaagcgccaccctagcaatatcaaccattaaccttccctctacacttatcatcttcacaattctaattctactgactatcctagaaatcgctgtcgccttaatccaagcctacgttttcacacttctagtaagcctctacctgcacgacaacacataatgacccaccaatcacatgcctatcatatagtaaaacccagcccatgacccctaacaggggccctctcagccctcctaatgacctccggcctagccatgtgatttcacttccactccataacgctcctcatactaggcctactaaccaacacactaaccatataccaatgatggcgcgatgtaacacgagaaagcacataccaaggccaccacacaccacctgtccaaaaaggccttcgatacgggataatcctatttattacctcagaagtttttttcttcgcaggatttttctgagccttttaccactccagcctagcccctaccccccaattaggagggcactggcccccaacaggcatcaccccgctaaatcccctagaagtcccactcctaaacacatccgtattactcgcatcaggagtatcaatcacctgagctcaccatagtctaatagaaaacaaccgaaaccaaataattcaagcactgcttattacaattttactgggtctctattttaccctcctacaagcctcagagtacttcgagtctcccttcaccatttccgacggcatctacggctcaacattttttgtagccacaggcttccacggacttcacgtcattattggctcaactttcctcactatctgcttcatccgccaactaatatttcactttacatccaaacatcactttggcttcgaagccgccgcctgatactggcattttgtagatgtggtttgactatttctgtatgtctccatctattgatgagggtcttactcttttagtataaatagtaccgttaacttccaattaactagttttgacaacattcaaaaaagagtaataaacttcgccttaattttaataatcaacaccctcctagccttactactaataattattacattttgactaccacaactcaacggctacatagaaaaatccaccccttacgagtgcggcttcgaccctatatcccccgcccgcgtccctttctccataaaattcttcttagtagctattaccttcttattatttgatctagaaattgccctccttttacccctaccatgagccctacaaacaactaacctgccactaatagttatgtcatccctcttattaatcatcatcctagccctaagtctggcctatgagtgactacaaaaaggattagactgaaccgaattggtatatagtttaaacaaaacgaatgatttcgactcattaaattatgataatcatatttaccaaatgcccctcatttacataaatattatactagcatttaccatctcacttctaggaatactagtatatcgctcacacctcatatcctccctactatgcctagaaggaataatactatcgctgttcattatagctactctcataaccctcaacacccactccctcttagccaatattgtgcctattgccatactagtctttgccgcctgcgaagcagcggtgggcctagccctactagtctcaatctccaacacatatggcctagactacgtacataacctaaacctactccaatgctaaaactaatcgtcccaacaattatattactaccactgacatgactttccaaaaaacacataatttgaatcaacacaaccacccacagcctaattattagcatcatccctctactattttttaaccaaatcaacaacaacctatttagctgttccccaaccttttcctccgaccccctaacaacccccctcctaatactaactacctgactcctacccctcacaatcatggcaagccaacgccacttatccagtgaaccactatcacgaaaaaaactctacctctctatactaatctccctacaaatctccttaattataacattcacagccacagaactaatcatattttatatcttcttcgaaaccacacttatccccaccttggctatcatcacccgatgaggcaaccagccagaacgcctgaacgcaggcacatacttcctattctacaccctagtaggctcccttcccctactcatcgcactaatttacactcacaacaccctaggctcactaaacattctactactcactctcactgcccaagaactatcaaactcctgagccaacaacttaatatgactagcttacacaatagcttttatagtaaagatacctctttacggactccacttatgactccctaaagcccatgtcgaagcccccatcgctgggtcaatagtacttgccgcagtactcttaaaactaggcggctatggtataatacgcctcacactcattctcaaccccctgacaaaacacatagcctaccccttccttgtactatccctatgaggcataattataacaagctccatctgcctacgacaaacagacctaaaatcgctcattgcatactcttcaatcagccacatagccctcgtagtaacagccattctcatccaaaccccctgaagcttcaccggcgcagtcattctcataatcgcccacggacttacatcctcattactattctgcctagcaaactcaaactacgaacgcactcacagtcgcatcataatcctctctcaaggacttcaaactctactcccactaatagctttttgatgacttctagcaagcctcgctaacctcgccttaccccccactattaacctactgggagaactctctgtgctagtaaccacgttctcctgatcaaatatcactctcctacttacaggactcaacatactagtcacagccctatactccctctacatatttaccacaacacaatgaggctcactcacccaccacattaacaacataaaaccctcattcacacgagaaaacaccctcatgttcatacacctatcccccattctcctcctatccctcaaccccgacatcattaccgggttttcctcttgtaaatatagtttaaccaaaacatcagattgtgaatctgacaacagaggcttacgaccccttatttaccgagaaagctcacaagaactgctaactcatgcccccatgtctaacaacatggctttctcaacttttaaaggataacagctatccattggtcttaggccccaaaaattttggtgcaactccaaataaaagtaataaccatgcacactactataaccaccctaaccctgacttccctaattccccccatccttaccaccctcgttaaccctaacaaaaaaaactcatacccccattatgtaaaatccattgtcgcatccacctttattatcagtctcttccccacaacaatattcatgtgcctagaccaagaagttattatctcgaactgacactgagccacaacccaaacaacccagctctccctaagcttcaaactagactacttctccataatattcatccctgtagcattgttcgttacatggtccatcatagaattctcactgtgatatataaactcagacccaaacattaatcagttcttcaaatatctactcattttcctaattaccatactaatcttagttaccgctaacaacctattccaactgttcatcggctgagagggcgtaggaattatatccttcttgctcatcagttgatgatacgcccgagcagatgccaacacagcagccattcaagcaatcctatacaaccgtatcggcgatatcggtttcatcctcgccttagcatgatttatcctacactccaactcatgagacccacaacaaatagcccttctaaacgctaatccaagcctcaccccactactaggcctcctcctagcagcagcaggcaaatcagcccaattaggtctccacccctgactcccctcagccatagaaggccccaccccagtctcagccctactccactcaagcactatagttgtagcaggaatcttcttactcatccgcttccaccccctagcagaaaatagcccactaatccaaactctaacactatgcttaggcgctatcaccactctgttcgcagcagtctgcgcccttacacaaaatgacatcaaaaaaatcgtagccttctccacttcaagtcaactaggactcataatagttacaatcggcatcaaccaaccacacctagcattcctgcacatctgtacccacgccttcttcaaagccatactatttatgtgctccgggtccatcatccacaaccttaacaatgaacaagatattcgaaaaataggaggactactcaaaaccatacctctcacttcaacctccctcaccattggcagcctagcattagcaggaatacctttcctcacaggtttctactccaaagaccacatcatcgaaaccgcaaacatatcatacacaaacgcctgagccctatctattactctcatcgctacctccctgacaagcgcctatagcactcgaataattcttctcaccctaacaggtcaacctcgcttccccacccttactaacattaacgaaaataaccccaccctactaaaccccattaaacgcctggcagccggaagcctattcgcaggatttctcattactaacaacatttcccccgcatcccccttccaaacaacaatccccctctacctaaaactcacagccctcgctgtcactttcctagggcttctaacagccctagacctcaactacctaaccaacaaacttaaaataaaatccccactatgcacattttatttctccaacatactcggattctaccctagcatcacacaccgcacaatcccctatctaggccttcttacgagccaaaacctgcccctactcctcctagacctaacctgactagaaaagctattacctaaaacaatttcacagcaccaaatctccacctccatcatcacctcaacccaaaaaggcataattaaactttacttcctctctttcttcttcccactcatcctaaccctactcctaatcacataacctattcccccgagcaatctcaattacaatatatacaccaacaaacaatgttcaaccagtaactactactaatcaacgcccataatcatacaaagcccccgcaccaataggatcctcccgaatcaaccctgacccctctccttcataaattattcagcttcctacactattaaagtttaccacaaccaccaccccatcatactctttcacccacagcaccaatcctacctccatcgctaaccccactaaaacactcaccaagacctcaacccctgacccccatgcctcaggatactcctcaatagccatcgctgtagtatatccaaagacaaccatcattccccctaaataaattaaaaaaactattaaacccatataacctcccccaaaattcagaataataacacacccgaccacaccgctaacaatcaatactaaacccccataaataggagaaggcttagaagaaaaccccacaaaccccattactaaacccacactcaacagaaacaaagcatacatcattattctcgcacggactacaaccacgaccaatgatatgaaaaaccatcgttgtatttcaactacaagaacaccaatgaccccaatacgcaaaattaaccccctaataaaattaattaaccactcattcatcgacctccccaccccatccaacatctccgcatgatgaaacttcggctcactccttggcgcctgcctgatcctccaaatcaccacaggactattcctagccatgcactactcaccagacgcctcaaccgccttttcatcaatcgcccacatcactcgagacgtaaattatggctgaatcatccgctaccttcacgccaatggcgcctcaatattctttatctgcctcttcctacacatcgggcgaggcctatattacggatcatttctctactcagaaacctgaaacatcggcattatcctcctgcttgcaactatagcaacagccttcataggctatgtcctcccgtgaggccaaatatcattctgaggggccacagtaattacaaacttactatccgccatcccatacattgggacagacctagttcaatgaatctgaggaggctactcagtagacagtcccaccctcacacgattctttacctttcacttcatcttgcccttcattattgcagccctagcagcactccacctcctattcttgcacgaaacgggatcaaacaaccccctaggaatcacctcccattccgataaaatcaccttccacccttactacacaatcaaagacgccctcggcttacttctcttccttctctccttaatgacattaacactattctcaccagacctcctaggcgacccagacaattataccctagccaaccccttaaacacccctccccacatcaagcccgaatgatatttcctattcgcctacacaattctccgatccgtccctaacaaactaggaggcgtccttgccctattactatccatcctcatcctagcaataatccccatcctccatatatccaaacaacaaagcataatatttcgcccactaagccaatcactttattgactcctagccgcagacctcctcattctaacctgaatcggaggacaaccagtaagctacccttttaccatcattggacaagtagcatccgtactatacttcacaacaatcctaatcctaataccaactatctccctaattgaaaacaaaatactcaaatgggcctgtccttgtagtataaactaatacaccagtcttgtaaaccggagatgaaaacctttttccaaggacaaatcagagaaaaagtctttaactccaccattagcacccaaagctaagattctaatttaaactattctctgttctttcatggggaagcagatttgggtaccacccaagtattgactcacccatcaacaaccgctatgtatttcgtacattactgccagccaccatgaatattgtacggtaccataaatacttgaccacctgtagtacataaaaacccaatccacatcaaaaccccctccccatgcttacaagcaagtacagcaatcaaccttcaactatcacacatcaactgcaactccaaagccacccctcacccactaggataccaacaaacctatccacccttaacagtacatagtacataaaaccatttaccgtacatagcacattacagtcaaatcccttctcgcccccatggatgacccccctcagataggggtcccttgaccaccatcctccgtgaaatcaatatcccgcacaagagtgctactctcctcgctccgggcccataacacttgggggtagctaaagtgaactgtatccgacatctggttcctacttcagggtcataaagcctaaatagcccacacgttccccttaaataagacatcacgatg

SEQ ID NO: 246 - DNA, 16570 bp, Homo sapiens mitochondrial
  3108: "n" refers to a nucleotide at position 3107 of the Cambridge Reference Sequence (CRS, Anderson et al. 1981 Nature 290:457-465), later determined to be absent from the human mtDNA sequence according to the revised CRS (rCRS, Andrews et al. 1999 Nature Genetics 23:147); "n" therefore represents a single nucleotide deletion at a position corresponding to nucleotide 3107 of SEQ ID NO:1 as provided herein.
gatcacaggtctatcaccctattaaccactcacgggagctctccatgcatttggtattttcgtctggggggtatgcacgcgatagcattgcgagacgctggagccggagcaccctatgtcgcagtatctgtctttgattcctgcctcatcctattatttatcgcacctacgttcaatattacaggcgaacatacttactaaagtgtgttaattaattaatgcttgtaggacataataataacaattgaatgtctgcacagccgctttccacacagacatcataacaaaaaatttccaccaaaccccccctcccccgccttctggccacagcacttaaacacatctctgccaaaccccaaaaacaaagaaccctaacaccagcctaaccagatttcaaattttatcttttggcggtatgcacttttaacagtcaccccccaactaacacattattttcccctcccactcccatactaccaatctcatcaatacaacccccgcccatcctacccagcacacacacaccgctgctaaccccataccccgaaccaaccaaaccccaaagacaccccccacagtttatgtagcttacctcctcaaagcaatacactgaaaatgtttagacgggctcacatcaccccataaacaaataggtttggtcctagcctttctattagctcttagtaagattacacatgcaagcatccccgttccagtgagttcaccctctaaatcaccacgatcaaaagggacaagcatcaagcacgcagcaatgcagctcaaaacgcttagcctagccacacccccacgggaaacagcagtgattaacctttagcaataaacgaaagtttaactaagctatactaaccccagggttggtcaatttcgtgccagccaccgcggtcacacgattaacccaagtcaatagaagccggcgtaaagagtgttttagatcaccccctccccaataaagctaaaactcacctgagttgtaaaaaactccagttgacacaaaatagactacgaaagtggctttaacatatctgaacacacaatagctaagacccaaactgggattagataccccactatgcttagccctaaacctcaacagttaaatcaacaaaactgctcgccagaacactacgagccacagcttaaaactcaaaggacctggcggtgcttcatatccctctagaggagcctgttctgtaatcgataaaccccgatcaacctcaccacctcttgctcagcctatataccgccatcttcagcaaaccctgatgaaggctacaaagtaagcgcaagtacccacgtaaagacgttaggtcaaggtgtagcccatgaggtggcaagaaatgggctacattttctaccccagaaaactacgatagcccttatgaaacttaagggtcgaaggtggatttagcagtaaactgagagtagagtgcttagttgaacagggccctgaagcgcgtacacaccgcccgtcaccctcctcaagtatacttcaaaggacatttaactaaaacccctacgcatttatatagaggagacaagtcgtaacatggtaagtgtactggaaagtgcacttggacgaaccagagtgtagcttaacacaaagcacccaacttacacttaggagatttcaacttaacttgaccgctctgagctaaacctagccccaaacccactccaccttactaccagacaaccttagccaaaccatttacccaaataaagtataggcgatagaaattgaaacctggcgcaatagatatagtaccgcaagggaaagatgaaaaattataaccaagcataatatagcaaggactaacccctataccttctgcataatgaattaactagaaataactttgcaaggagagccaaagctaagacccccgaaaccagacgagctacctaagaacagctaaaagagcacacccgtctatgtagcaaaatagtgggaagatttataggtagaggcgacaaacctaccgagcctggtgatagctggttgtccaagatagaatcttagttcaactttaaatttgcccacagaaccctctaaatccccttgtaaatttaactgttagtccaaagaggaacagctctttggacactaggaaaaaaccttgtagagagagtaaaaaatttaacacccatagtaggcctaaaagcagccaccaattaagaaagcgttcaagctcaacacccactacctaaaaaatcccaaacatataactgaactcctcacacccaattggaccaatctatcaccctatagaagaactaatgttagtataagtaacatgaaaacattctcctccgcataagcctgcgtcagattaaaacactgaactgacaattaacagcccaatatctacaatcaaccaacaagtcattattaccctcactgtcaacccaacacaggcatgctcataaggaaaggttaaaaaaagtaaaaggaactcggcaaatcttaccccgcctgtttaccaaaaacatcacctctagcatcaccagtattagaggcaccgcctgcccagtgacacatgtttaacggccgcggtaccctaaccgtgcaaaggtagcataatcacttgttccttaaatagggacctgtatgaatggctccacgagggttcagctgtctcttacttttaaccagtgaaattgacctgcccgtgaagaggcgggcataacacagcaagacgagaagaccctatggagctttaatttattaatgcaaacagtacctaacaaacccacaggtcctaaactaccaaacctgcattaaaaatttcggttggggcgacctcggagcagaacccaacctccgagcagtacatgctaagacttcaccagtcaaagcgaactactatactcaattgatccaataacttgaccaacggaacaagttaccctagggataacagcgcaatcctattctagagtccatatcaacaatagggtttacgacctcgatgttggatcaggacatcccaatggtgcagccgctattaaaggttcgtttgttcaacgattaaagtcctacgtgatctgagttcagaccggagtaatccaggtcggtttctatctacnttcaaattcctccctgtacgaaaggacaagagaaataaggcctacttcacaaagcgccttcccccgtaaatgatatcatctcaacttagtattatacccacacccacccaagaacagggtttgttaagatggcagagcccggtaatcgcataaaacttaaaactttacagtcagaggttcaattcctcttcttaacaacatacccatggccaacctcctactcctcattgtacccattctaatcgcaatggcattcctaatgcttaccgaacgaaaaattctaggctatatacaactacgcaaaggccccaacgttgtaggcccctacgggctactacaacccttcgctgacgccataaaactcttcaccaaagagcccctaaaacccgccacatctaccatcaccctctacatcaccgccccgaccttagctctcaccatcgctcttctactatgaacccccctccccatacccaaccccctggtcaacctcaacctaggcctcctatttattctagccacctctagcctagccgtttactcaatcctctgatcagggtgagcatcaaactcaaactacgccctgatcggcgcactgcgagcagtagcccaaacaatctcatatgaagtcaccctagccatcattctactatcaacattactaataagtggctcctttaacctctccacccttatcacaacacaagaacacctctgattactcctgccatcatgacccttggccataatatgatttatctccacactagcagagaccaaccgaacccccttcgaccttgccgaaggggagtccgaactagtctcaggcttcaacatcgaatacgccgcaggccccttcgccctattcttcatagccgaatacacaaacattattataataaacaccctcaccactacaatcttcctaggaacaacatatgacgcactctcccctgaactctacacaacatattttgtcaccaagaccctacttctaacctccctgttcttatgaattcgaacagcatacccccgattccgctacgaccaactcatacacctcctatgaaaaaacttcctaccactcaccctagcattacttatatgatatgtctccatacccattacaatctccagcattccccctcaaacctaagaaatatgtctgataaaagagttactttgatagagtaaataataggagcttaaacccccttatttctaggactatgagaatcgaacccatccctgagaatccaaaattctccgtgccacctatcacaccccatcctaaagtaaggtcagctaaataagctatcgggcccataccccgaaaatgttggttatacccttcccgtactaattaatcccctggcccaacccgtcatctactctaccatctttgcaggcacactcatcacagcgctaagctcgcactgattttttacctgagtaggcctagaaataaacatgctagcttttattccagttctaaccaaaaaaataaaccctcgttccacagaagctgccatcaagtatttcctcacgcaagcaaccgcatccataatccttctaatagctatcctcttcaacaatatactctccggacaatgaaccataaccaatactaccaatcaatactcatcattaataatcataatggctatagcaataaaactaggaatagccccctttcacttctgagtcccagaggttacccaaggcacccctctgacatccggcctgcttcttctcacatgacaaaaactagcccccatctcaatcatataccaaatctctccctcactaaacgtaagccttctcctcactctctcaatcttatccatcatagcaggcagttgaggtggattaaaccaaacccagctacgcaaaatcttagcatactcctcaattacccacataggatgaataatagcagttctaccgtacaaccctaacataaccattcttaatttaactatttatattatcctaactactaccgcattcctactactcaacttaaactccagcaccacgaccctactactatctcgcacctgaaacaagctaacatgactaacacccttaattccatccaccctcctctccctaggaggcctgcccccgctaaccggctttttgcccaaatgggccattatcgaagaattcacaaaaaacaatagcctcatcatccccaccatcatagccaccatcaccctccttaacctctacttctacctacgcctaatctactccacctcaatcacactactccccatatctaacaacgtaaaaataaaatgacagtttgaacatacaaaacccaccccattcctccccacactcatcgcccttaccacgctactcctacctatctccccttttatactaataatcttatagaaatttaggttaaatacagaccaagagccttcaaagccctcagtaagttgcaatacttaatttctgtaacagctaaggactgcaaaaccccactctgcatcaactgaacgcaaatcagccactttaattaagctaagcccttactagaccaatgggacttaaacccacaaacacttagttaacagctaagcaccctaatcaactggcttcaatctacttctcccgccgccgggaaaaaaggcgggagaagccccggcaggtttgaagctgcttcttcgaatttgcaattcaatatgaaaatcacctcggagctggtaaaaagaggcctaacccctgtctttagatttacagtccaatgcttcactcagccattttacctcacccccactgatgttcgccgaccgttgactattctctacaaaccacaaagacattggaacactatacctattattcggcgcatgagctggagtcctaggcacagctctaagcctccttattcgagccgagctgggccagccaggcaaccttctaggtaacgaccacatctacaacgttatcgtcacagcccatgcatttgtaataatcttcttcatagtaatacccatcataatcggaggctttggcaactgactagttcccctaataatcggtgcccccgatatggcgtttccccgcataaacaacataagcttctgactcttacctccctctctcctactcctgctcgcatctgctatagtggaggccggagcaggaacaggttgaacagtctaccctcccttagcagggaactactcccaccctggagcctccgtagacctaaccatcttctccttacacctagcaggtgtctcctctatcttaggggccatcaatttcatcacaacaattatcaatataaaaccccctgccataacccaataccaaacgcccctcttcgtctgatccgtcctaatcacagcagtcctacttctcctatctctcccagtcctagctgctggcatcactatactactaacagaccgcaacctcaacaccaccttcttcgaccccgccggaggaggagaccccattctataccaacacctattctgatttttcggtcaccctgaagtttatattcttatcctaccaggcttcggaataatctcccatattgtaacttactactccggaaaaaaagaaccatttggatacataggtatggtctgagctatgatatcaattggcttcctagggtttatcgtgtgagcacaccatatatttacagtaggaatagacgtagacacacgagcatatttcacctccgctaccataatcatcgctatccccaccggcgtcaaagtatttagctgactcgccacactccacggaagcaatatgaaatgatctgctgcagtgctctgagccctaggattcatctttcttttcaccgtaggtggcctgactggcattgtattagcaaactcatcactagacatcgtactacacgacacgtactacgttgtagcccacttccactatgtcctatcaataggagctgtatttgccatcataggaggcttcattcactgatttcccctattctcaggctacaccctagaccaaacctacgccaaaatccatttcactatcatattcatcggcgtaaatctaactttcttcccacaacactttctcggcctatccggaatgccccgacgttactcggactaccccgatgcatacaccacatgaaacatcctatcatctgtaggctcattcatttctctaacagcagtaatattaataattttcatgatttgagaagccttcgcttcgaagcgaaaagtcctaatagtagaagaaccctccataaacctggagtgactatatggatgccccccaccctaccacacattcgaagaacccgtatacataaaatctagacaaaaaaggaaggaatcgaaccccccaaagctggtttcaagccaaccccatggcctccatgactttttcaaaaaggtattagaaaaaccatttcataactttgtcaaagttaaattataggctaaatcctatatatcttaatggcacatgcagcgcaagtaggtctacaagacgctacttcccctatcatagaagagcttatcacctttcatgatcacgccctcataatcattttccttatctgcttcctagtcctgtatgcccttttcctaacactcacaacaaaactaactaatactaacatctcagacgctcaggaaatagaaaccgtctgaactatcctgcccgccatcatcctagtcctcatcgccctcccatccctacgcatcctttacataacagacgaggtcaacgatccctcccttaccatcaaatcaattggccaccaatggtactgaacctacgagtacaccgactacggcggactaatcttcaactcctacatacttcccccattattcctagaaccaggcgacctgcgactccttgacgttgacaatcgagtagtactcccgattgaagcccccattcgtataataattacatcacaagacgtcttgcactcatgagctgtccccacattaggcttaaaaacagatgcaattcccggacgtctaaaccaaaccactttcaccgctacacgaccgggggtatactacggtcaatgctctgaaatctgtggagcaaaccacagtttcatgcccatcgtcctagaattaattcccctaaaaatctttgaaatagggcccgtatttaccctatagcaccccctctaccccctctagagcccactgtaaagctaacttagcattaaccttttaagttaaagattaagagaaccaacacctctttacagtgaaatgccccaactaaatactaccgtatggcccaccataattacccccatactccttacactattcctcatcacccaactaaaaatattaaacacaaactaccacctacctccctcaccaaagcccataaaaataaaaaattataacaaaccctgagaaccaaaatgaacgaaaatctgttcgcttcattcattgcccccacaatcctaggcctacccgccgcagtactgatcattctatttccccctctattgatccccacctccaaatatctcatcaacaaccgactaatcaccacccaacaatgactaatcaaactaacctcaaaacaaatgataaccatacacaacactaaaggacgaacctgatctcttatactagtatccttaatcatttttattgccacaactaacctcctcggactcctgcctcactcatttacaccaaccacccaactatctataaacctagccatggccatccccttatgagcgggcgcagtgattataggctttcgctctaagattaaaaatgccctagcccacttcttaccacaaggcacacctacaccccttatccccatactagttattatcgaaaccatcagcctactcattcaaccaatagccctggccgtacgcctaaccgctaacattactgcaggccacctactcatgcacctaattggaagcgccaccctagcaatatcaaccattaaccttccctctacacttatcatcttcacaattctaattctactgactatcctagaaatcgctgtcgccttaatccaagcctacgttttcacacttctagtaagcctctacctgcacgacaacacataatgacccaccaatcacatgcctatcatatagtaaaacccagcccatgacccctaacaggggccctctcagccctcctaatgacctccggcctagccatgtgatttcacttccactccataacgctcctcatactaggcctactaaccaacacactaaccatataccaatgatggcgcgatgtaacacgagaaagcacataccaaggccaccacacaccacctgtccaaaaaggccttcgatacgggataatcctatttattacctcagaagtttttttcttcgcaggatttttctgagccttttaccactccagcctagcccctaccccccaattaggagggcactggcccccaacaggcatcaccccgctaaatcccctagaagtcccactcctaaacacatccgtattactcgcatcaggagtatcaatcacctgagctcaccatagtctaatagaaaacaaccgaaaccaaataattcaagcactgcttattacaattttactgggtctctattttaccctcctacaagcctcagagtacttcgagtctcccttcaccatttccgacggcatctacggctcaacattttttgtagccacaggcttccacggacttcacgtcattattggctcaactttcctcactatctgcttcatccgccaactaatatttcactttacatccaaacatcactttggcttcgaagccgccgcctgatactggcattttgtagatgtggtttgactatttctgtatgtctccatctattgatgagggtcttactcttttagtataaatagtaccgttaacttccaattaactagttttgacaacattcaaaaaagagtaataaacttcgccttaattttaataatcaacaccctcctagccttactactaataattattacattttgactaccacaactcaacggctacatagaaaaatccaccccttacgagtgcggcttcgaccctatatcccccgcccgcgtccctttctccataaaattcttcttagtagctattaccttcttattatttgatctagaaattgccctccttttacccctaccatgagccctacaaacaactaacctgccactaatagttatgtcatccctcttattaatcatcatcctagccctaagtctggcctatgagtgactacaaaaaggattagactgaaccgaattggtatatagtttaaacaaaacgaatgatttcgactcattaaattatgataatcatatttaccaaatgcccctcatttacataaatattatactagcatttaccatctcacttctaggaatactagtatatcgctcacacctcatatcctccctactatgcctagaaggaataatactatcgctgttcattatagctactctcataaccctcaacacccactccctcttagccaatattgtgcctattgccatactagtctttgccgcctgcgaagcagcggtgggcctagccctactagtctcaatctccaacacatatggcctagactacgtacataacctaaacctactccaatgctaaaactaatcgtcccaacaattatattactaccactgacatgactttccaaaaaacacataatttgaatcaacacaaccacccacagcctaattattagcatcatccctctactattttttaaccaaatcaacaacaacctatttagctgttccccaaccttttcctccgaccccctaacaacccccctcctaatactaactacctgactcctacccctcacaatcatggcaagccaacgccacttatccagtgaaccactatcacgaaaaaaactctacctctctatactaatctccctacaaatctccttaattataacattcacagccacagaactaatcatattttatatcttcttcgaaaccacacttatccccaccttggctatcatcacccgatgaggcaaccagccagaacgcctgaacgcaggcacatacttcctattctacaccctagtaggctcccttcccctactcatcgcactaatttacactcacaacaccctaggctcactaaacattctactactcactctcactgcccaagaactatcaaactcctgagccaacaacttaatatgactagcttacacaatagcttttatagtaaagatacctctttacggactccacttatgactccctaaagcccatgtcgaagcccccatcgctgggtcaatagtacttgccgcagtactcttaaaactaggcggctatggtataatacgcctcacactcattctcaaccccctgacaaaacacatagcctaccccttccttgtactatccctatgaggcataattataacaagctccatctgcctacgacaaacagacctaaaatcgctcattgcatactcttcaatcagccacatagccctcgtagtaacagccattctcatccaaaccccctgaagcttcaccggcgcagtcattctcataatcgcccacgggcttacatcctcattactattctgcctagcaaactcaaactacgaacgcactcacagtcgcatcataatcctctctcaaggacttcaaactctactcccactaatagctttttgatgacttctagcaagcctcgctaacctcgccttaccccccactattaacctactgggagaactctctgtgctagtaaccacgttctcctgatcaaatatcactctcctacttacaggactcaacatactagtcacagccctatactccctctacatatttaccacaacacaatggggctcactcacccaccacattaacaacataaaaccctcattcacacgagaaaacaccctcatgttcatacacctatcccccattctcctcctatccctcaaccccgacatcattaccgggttttcctcttgtaaatatagtttaaccaaaacatcagattgtgaatctgacaacagaggcttacgaccccttatttaccgagaaagctcacaagaactgctaactcatgcccccatgtctaacaacatggctttctcaacttttaaaggataacagctatccattggtcttaggccccaaaaattttggtgcaactccaaataaaagtaataaccatgcacactactataaccaccctaaccctgacttccctaattccccccatccttaccaccctcgttaaccctaacaaaaaaaactcatacccccattatgtaaaatccattgtcgcatccacctttattatcagtctcttccccacaacaatattcatgtgcctagaccaagaagttattatctcgaactgacactgagccacaacccaaacaacccagctctccctaagcttcaaactagactacttctccataatattcatccctgtagcattgttcgttacatggtccatcatagaattctcactgtgatatataaactcagacccaaacattaatcagttcttcaaatatctactcatcttcctaattaccatactaatcttagttaccgctaacaacctattccaactgttcatcggctgagagggcgtaggaattatatccttcttgctcatcagttgatgatacgcccgagcagatgccaacacagcagccattcaagcaatcctatacaaccgtatcggcgatatcggtttcatcctcgccttagcatgatttatcctacactccaactcatgagacccacaacaaatagcccttctaaacgctaatccaagcctcaccccactactaggcctcctcctagcagcagcaggcaaatcagcccaattaggtctccacccctgactcccctcagccatagaaggccccaccccagtctcagccctactccactcaagcactatagttgtagcaggaatcttcttactcatccgcttccaccccctagcagaaaatagcccactaatccaaactctaacactatgcttaggcgctatcaccactctgttcgcagcagtctgcgcccttacacaaaatgacatcaaaaaaatcgtagccttctccacttcaagtcaactaggactcataatagttacaatcggcatcaaccaaccacacctagcattcctgcacatctgtacccacgccttcttcaaagccatactatttatgtgctccgggtccatcatccacaaccttaacaatgaacaagatattcgaaaaataggaggactactcaaaaccatacctctcacttcaacctccctcaccattggcagcctagcattagcaggaatacctttcctcacaggtttctactccaaagaccacatcatcgaaaccgcaaacatatcatacacaaacgcctgagccctatctattactctcatcgctacctccctgacaagcgcctatagcactcgaataattcttctcaccctaacaggtcaacctcgcttccccacccttactaacattaacgaaaataaccccaccctactaaaccccattaaacgcctggcagccggaagcctattcgcaggatttctcattactaacaacatttcccccgcatcccccttccaaacaacaatccccctctacctaaaactcacagccctcgctgtcactttcctaggacttctaacagccctagacctcaactacctaaccaacaaacttaaaataaaatccccactatgcacattttatttctccaacatactcggattctaccctagcatcacacaccgcacaatcccctatctaggccttcttacgagccaaaacctgcccctactcctcctagacctaacctgactagaaaagctattacctaaaacaatttcacagcaccaaatctccacctccatcatcacctcaacccaaaaaggcataattaaactttacttcctctctttcttcttcccactcatcctaaccctactcctaatcacataacctattcccccgagcaatctcaattacaatatatacaccaacaaacaatgttcaaccagtaactactactaatcaacgcccataatcatacaaagcccccgcaccaataggatcctcccgaatcaaccctgacccctctccttcataaattattcagcttcctacactattaaagtttaccacaaccaccaccccatcatactctttcacccacagcaccaatcctacctccatcgctaaccccactaaaacactcaccaagacctcaacccctgacccccatgcctcaggatactcctcaatagccatcgctgtagtatatccaaagacaaccatcattccccctaaataaattaaaaaaactattaaacccatataacctcccccaaaattcagaataataacacacccgaccacaccgctaacaatcaatactaaacccccataaataggagaaggcttagaagaaaaccccacaaaccccattactaaacccacactcaacagaaacaaagcatacatcattattctcgcacggactacaaccacgaccaatgatatgaaaaaccatcgttgtatttcaactacaagaacaccaatgaccccaatacgcaaaactaaccccctaataaaattaattaaccactcattcatcgacctccccaccccatccaacatctccgcatgatgaaacttcggctcactccttggcgcctgcctgatcctccaaatcaccacaggactattcctagccatgcactactcaccagacgcctcaaccgccttttcatcaatcgcccacatcactcgagacgtaaattatggctgaatcatccgctaccttcacgccaatggcgcctcaatattctttatctgcctcttcctacacatcgggcgaggcctatattacggatcatttctctactcagaaacctgaaacatcggcattatcctcctgcttgcaactatagcaacagccttcataggctatgtcctcccgtgaggccaaatatcattctgaggggccacagtaattacaaacttactatccgccatcccatacattgggacagacctagttcaatgaatctgaggaggctactcagtagacagtcccaccctcacacgattctttacctttcacttcatcttgcccttcattattgcagccctagcagcactccacctcctattcttgcacgaaacgggatcaaacaaccccctaggaatcacctcccattccgataaaatcaccttccacccttactacacaatcaaagacgccctcggcttacttctcttccttctctccttaatgacattaacactattctcaccagacctcctaggcgacccagacaattataccctagccaaccccttaaacacccctccccacatcaagcccgaatgatatttcctattcgcctacacaattctccgatccgtccctaacaaactaggaggcgtccttgccctattactatccatcctcatcctagcaataatccccatcctccatatatccaaacaacaaagcataatatttcgcccactaagccaatcactttattgactcctagccgcagacctcctcattctaacctgaatcggaggacaaccagtaagctacccttttaccatcattggacaagtagcatccgtactatacttcacaacaatcctaatcctaataccaactatctccctaattgaaaacaaaatactcaaatgggcctgtccttgtagtataaactaatacaccagtcttgtaaaccggagatgaaaacctttttccaaggacaaatcagagaaaaagtctttaactccaccattagcacccaaagctaagattctaatttaaactattctctgttctttcatggggaagcagatttgggtaccacccaagtattgactcacccatcaacaaccgctatgtatttcgtacattactgccagccaccatgaatattgtacggtaccataaatacttgaccacctgtagtacataaaaacccaatccacatcaaaaccccctccccatgcttacaagcaagtacagcaatcaaccctcaactatcacacatcaactgcaactccaaagccacccctcacccactaggataccaacaaacctacccacccttaacagtacatagtacataaagccatttaccgtacatagcacattacagtcaaatcccttctcgtccccatggatgacccccctcagataggggtcccttgaccaccatcctccgtgaaatcaatatcccgcacaagagtgctactctcctcgctccgggcccataacacttgggggtagctaaagtgaactgtatccgacatctggttcctacttcagggccataaagcctaaatagcccacacgttccccttaaataagacatcacgatg

SEQ ID NO: 247 - DNA, 16570 bp, Homo sapiens mitochondrial
  3108: "n" refers to a nucleotide at position 3107 of the Cambridge Reference Sequence (CRS, Anderson et al. 1981 Nature 290:457-465), later determined to be absent from the human mtDNA sequence according to the revised CRS (rCRS, Andrews et al. 1999 Nature Genetics 23:147); "n" therefore represents a single nucleotide deletion at a position corresponding to nucleotide 3107 of SEQ ID NO:1 as provided herein.
gatcacaggtctatcaccctattaaccactcacgggagctctccatgcatttggtattttcgtctggggggtatgcacgcgatagcattgcgagacgctggagccggagcaccctatgtcgcagtatctgtctttgattcctgcctcatcccattatttatcgcacctacgttcaatattacaggcgaacatacttactaaagtgtattaattaattaatgcttgtaggacataataataacaattgaatgtctgcacagccgctttccacacagacatcataacaaaaaatttccaccaaaccccccctcccccgccttctggccacagcacttaaacacatctctgccaaaccccaaaaacaaagaaccctaacaccagcctaaccagatttcaaattttatcttttggcggtatgcacttttaacagtcaccccccaactaacacattattttcccctcccactcccatactactaatctcatcaatacaacccccgcccatcctacccagcacacacacaccgctgctaaccccataccccgaaccaaccaaaccccaaagacaccccccacagtttatgtagcttacctcctcaaagcaatacactgaaaatgtttagacgggctcacatcaccccataaacaaataggtttggtcctagcctttctattagctcttagtaagattacacatgcaagcatccccgttccagtgagttcaccctctaaatcaccacgatcaaaagggacaagcatcaagcacgcagcaatgcagctcaaaacgcttagcctagccacacccccacgggaaacagcagtgattaacctttagcaataaacgaaagtttaactaagctatactaaccccagggttggtcaatttcgtgccagccaccgcggtcacacgattaacccaagtcaatagaagccggcgtaaagagtgttttagatcaccccctccccaataaagctaaaactcacctgagttgtaaaaaactccagttgacacaaaatagactacgaaagtggctttaacatatctgaacacacaatagctaagacccaaactgggattagataccccactatgcttagccctaaacctcaacagttaaatcaacaaaactgctcgccagaacactacgagccacagcttaaaactcaaaggacctggcggtgcttcatatccctctagaggagcctgttctgtaatcgataaaccccgatcaacctcaccacctcttgctcagcctatataccgccatcttcagcaaaccctgatgaaggctacaaagtaagcgcaagtacccacgtaaagacgttaggtcaaggtgtagcccatgaggtggcaagaaatgggctacattttctaccccagaaaactacgatagcccttatgaaacttaagggtcgaaggtggatttagcagtaaactgagagtagagtgcttagttgaacagggccctgaagcgcgtacacaccgcccgtcaccctcctcaagtatacttcaaaggacatttaactaaaacccctacgcatttatatagaggagacaagtcgtaacatggtaagtgtactggaaagtgcacttggacgaaccagagtgtagcttaacacaaagcacccaacttacacttaggagatttcaacttaacttgaccgctctgagctaaacctagccccaaacccactccaccttactaccagacaaccttagccaaaccatttacccaaataaagtataggcgatagaaattgaaacctggcgcaatagatatagtaccgcaagggaaagatgaaaaattataaccaagcataatatagcaaggactaacccctataccttctgcataatgaattaactagaaataactttgcaaggagagccaaagctaagacccccgaaaccagacgagctacctaagaacagctaaaagagcacacccgtctatgtagcaaaatagtgggaagatttataggtagaggcgacaaacctaccgagcctggtgatagctggttgtccaagatagaatcttagttcaactttaaatttgcccacagaaccctctaaatccccttgtaaatttaactgttagtccaaagaggaacagctctttggacactaggaaaaaaccttgtagagagagtaaaaaatttaacacccatagtaggcctaaaagcagccaccaattaagaaagcgttcaagctcaacacccactacctaaaaaatcccaaacatataactgaactcctcacacccaattggaccaatctatcaccctatagaagaactaatgttagtataagtaacatgaaaacattctcctccgcataagcctgcgtcagattaaaacactgaactgacaattaacagcccaatatctacaatcaaccaacaagtcattattaccctcactgtcaacccaacacaggcatgctcataaggaaaggttaaaaaaagtaaaaggaactcggcaaatcttaccccgcctgtttaccaaaaacatcacctctagcatcaccagtattagaggcaccgcctgcccagtgacacatgtttaacggccgcggtaccctaaccgtgcaaaggtagcataatcacttgttccttaaatagggacctgtatgaatggctccacgagggttcagctgtctcttacttttaaccagtgaaattgacctgcccgtgaagaggcgggcataacacagcaagacgagaagaccctatggagctttaatttattaatgcaaacagtacctaacaaacccacaggtcctaaactaccaaacctgcattaaaaatttcggttggggcgacctcggagcagaacccaacctccgagcagtacatgctaagacttcaccagtcaaagcgaactactatactcaattgatccaataacttgaccaacggaacaagttaccctagggataacagcgcaatcctattctagagtccatatcaacaatagggtttacgacctcgatgttggatcaggacatcccaatggtgcagccgctattaaaggttcgtttgttcaacgattaaagtcctacgtgatctgagttcagaccggagtaatccaggtcggtttctatctacnttcaaattcctccctgtacgaaaggacaagagaaataaggcctacttcacaaagcgccttcccccgtaaatgatatcatctcaacttagtattatacccacacccacccaagaacagggtttgttaagatggcagagcccggtaatcgcataaaacttaaaactttacagtcagaggttcaattcctcttcttaacaacatacccatggccaacctcctactcctcattgtacccattctaatcgcaatggcattcctaatgcttaccgaacgaaaaattctaggctatatacaactacgcaaaggccccaacgttgtaggcccctacgggctactacaacccttcgctgacgccataaaactcttcaccaaagagcccctaaaacccgccacatctaccatcaccctctacatcaccgccccgaccttagctctcaccatcgctcttctactatgaacccccctccccatacccaaccccctggtcaacctcaacctaggcctcctatttattctagccacctctagcctagccgtttactcaatcctctgatcagggtgagcatcaaactcaaactacgccctgatcggcgcactgcgagcagtagcccaaacaatctcatatgaagtcaccctagccatcattctactatcaacattactaataagtggctcctttaacctctccacccttatcacaacacaagaacacctctgattactcctgccatcatgacccttggccataatatgatttatctccacactagcagagaccaaccgaacccccttcgaccttgccgaaggggagtccgaactagtctcaggcttcaacatcgaatacgccgcaggccccttcgccctattcttcatagccgaatacacaaacattattataataaacaccctcaccactacaatcttcctaggaacaacatatgacgcactctcccctgaactctacacaacatattttgtcaccaagaccctacttctaacctccctgttcttatgaattcgaacagcatacccccgattccgctacgaccaactcatacacctcctatgaaaaaacttcctaccactcaccctagcattacttatatgatatgtctccatacccattacaatctccagcattccccctcaaacctaagaaatatgtctgataaaagagttactttgatagagtaaataataggagcttaaacccccttatttctaggactatgagaatcgaacccatccctgagaatccaaaattctccgtgccacctatcacaccccatcctaaagtaaggtcagctaaataagctatcgggcccataccccgaaaatgttggttatacccttcccgtactaattaatcccctggcccaacccgtcatctactctaccatctttgcaggcacactcatcacagcgctaagctcgcactgattttttacctgagtaggcctagaaataaacatgctagcttttattccagttctaaccaaaaaaataaaccctcgttccacagaagctgccatcaagtatttcctcacgcaagcaaccgcatccataatccttctaatagctatcctcttcaacaatatactctccggacaatgaaccataaccaatactaccaatcaatactcatcattaataatcataatggctatagcaataaaactaggaatagccccctttcacttctgagtcccagaggttacccaaggcacccctctgacatccggcctgcttcttctcacatgacaaaaactagcccccatctcaatcatataccaaatctctccctcactaaacgtaagccttctcctcactctctcaatcttatccatcatagcaggcagttgaggtggattaaaccaaacccagctacgcaaaatcttagcatactcctcaattacccacataggatgaataatagcagttctaccgtacaaccctaacataaccattcttaatttaactatttatattatcctaactactaccgcattcctactactcaacttaaactccagcaccacgaccctactactatctcgcacctgaaacaagctaacatgactaacacccttaattccatccaccctcctctccctaggaggcctgcccccgctaaccggctttttgcccaaatgggccattatcgaagaattcacaaaaaacaatagcctcatcatccccaccatcatagccaccatcaccctccttaacctctacttctacctacgcctaatctactccacctcaatcacactactccccatatctaacaacgtaaaaataaaatgacagtttgaacatacaaaacccaccccattcctccccacactcatcgcccttaccacgctactcctacctatctccccttttatactaataatcttatagaaatttaggttaaatacagaccaagagccttcaaagccctcagtaagttgcaatacttaatttctgtaacagctaaggactgcaaaaccccactctgcatcaactgaacgcaaatcagccactttaattaagctaagcccttactagaccaatgggacttaaacccacaaacacttagttaacagctaagcaccctaatcaactggcttcaatctacttctcccgccgccgggaaaaaaggcgggagaagccccggcaggtttgaagctgcttcttcgaatttgcaattcaatatgaaaatcacctcggagctggtaaaaagaggcctaacccctgtctttagatttacagtccaatgcttcactcagccattttacctcacccccactgatgttcgccgaccgttgactattctctacaaaccacaaagacattggaacactatacctattattcggcgcatgagctggagtcctaggcacagctctaagcctccttattcgagccgagctgggccagccaggcaaccttctaggtaacgaccacatctacaacgttatcgtcacagcccatgcatttgtaataatcttcttcatagtaatacccatcataatcggaggctttggcaactgactagttcccctaataatcggtgcccccgatatggcgtttccccgcataaacaacataagcttctgactcttacctccctctctcctactcctgctcgcatctgctatagtggaggccggagcaggaacaggttgaacagtctaccctcccttagcagggaactactcccaccctggagcctccgtagacctaaccatcttctccttacacctagcaggtgtctcctctatcttaggggccatcaatttcatcacaacaattatcaatataaaaccccctgccataacccaataccaaacgcccctcttcgtctgatccgtcctaatcacagcagtcctacttctcctatctctcccagtcctagctgctggcatcactatactactaacagaccgcaacctcaacaccaccttcttcgaccccgccggaggaggagaccccattctataccaacacctattctgatttttcggtcaccctgaagtttatattcttatcctaccaggcttcggaataatctcccatattgtaacttactactccggaaaaaaagaaccatttggatacataggtatggtctgagctatgatatcaattggcttcctagggtttatcgtgtgagcacaccatatatttacagtaggaatagacgtagacacacgagcatatttcacctccgctaccataatcatcgctatccccaccggcgtcaaagtatttagctgactcgccacactccacggaagcaatatgaaatgatctgctgcagtgctctgagccctaggattcatctttcttttcaccgtaggtggcctgactggcattgtattagcaaactcatcactagacatcgtactacacgacacgtactacgttgtagcccacttccactatgtcctatcaataggagctgtatttgccatcataggaggcttcattcactgatttcccctattctcaggctacaccctagaccaaacctacgccaaaatccatttcactatcatattcatcggcgtaaatctaactttcttcccacaacactttctcggcctatccggaatgccccgacgttactcggactaccccgatgcatacaccacatgaaacatcctatcatctgtaggctcattcatttctctaacagcagtaatattaataattttcatgatttgagaagccttcgcttcgaagcgaaaagtcctaatagtagaagaaccctccataaacctggagtgactatatggatgccccccaccctaccacacattcgaagaacccgtatacataaaatctagacaaaaaaggaaggaatcgaaccccccaaagctggtttcaagccaaccccatggcctccatgactttttcaaaaaggtattagaaaaaccatttcataactttgtcaaagttaaattataggctaaatcctatatatcttaatggcacatgcagcgcaagtaggtctacaagacgctacttcccctatcatagaagagcttatcacctttcatgatcacgccctcataatcattttccttatctgcttcctagtcctgtatgcccttttcctaacactcacaacaaaactaactaatactaacatctcagacgctcaggaaatagaaaccgtctgaactatcctgcccgccatcatcctagtcctcatcgccctcccatccctacgcatcctttacataacagacgaggtcaacgatccctcccttaccatcaaatcaattggccaccaatggtactgaacctacgagtacaccgactacggcggactaatcttcaactcctacatacttcccccattattcctagaaccaggcgacctgcgactccttgacgttgacaatcgagtagtactcccgattgaagcccccattcgtataataattacatcacaagacgtcttgcactcatgagctgtccccacattaggcttaaaaacagatgcaattcccggacgtctaaaccaaaccactttcaccgctacacgaccgggggtatactacggtcaatgctctgaaatctgtggagcaaaccacagtttcatgcccatcgtcctagaattaattcccctaaaaatctttgaaatagggcccgtatttaccctatagcaccccctctaccccctctagagcccactgtaaagctaacttagcattaaccttttaagttaaagattaagagaaccaacacctctttacagtgaaatgccccaactaaatactaccgtatggcccaccataattacccccatactccttacactattcctcatcacccaactaaaaatattaaacacaaactaccacctacctccctcaccaaagcccataaaaataaaaaattataacaaaccctgagaaccaaaatgaacgaaaatctgttcgcttcattcattgcccccacaatcctaggcctacccgccgcagtactgatcattctatttccccctctattgacccccacctccaaatatctcatcaacaaccgactaatcaccacccaacaatgactaatcaaactaacctcaaaacaaatgataaccatacacaacactaaaggacgaacctgatctcttatactagtatccttaatcatttttattgccacaactaacctcctcggactcctgcctcactcatttacaccaaccacccaactatctataaacctagccatggccatccccttatgagcgggcgcagtgattataggctttcgctctaagattaaaaatgccctagcccacttcttaccacaaggcacacctacaccccttatccccatactagttattatcgaaaccatcagcctactcattcaaccaatagccctggccgtacgcctaaccgctaacattactgcaggccacctactcatgcacctaattggaagcgccaccctagcaatatcaaccattaaccttccctctacacttatcatcttcacaattctaattctactgactatcctagaaatcgctgtcgccttaatccaagcctacgttttcacacttctagtaagcctctacctgcacgacaacacataatgacccaccaatcacatgcctatcatatagtaaaacccagcccatgacccctaacaggggccctctcagccctcctaatgacctccggcctagccatgtgatttcacttccactccataacgctcctcatactaggcctactaaccaacacactaaccatataccaatgatggcgcgatgtaacacgagaaagcacataccaaggccaccacacaccacctgtccaaaaaggccttcgatacgggataatcctatttattacctcagaagtttttttcttcgcaggatttttctgagccttttaccactccagcctagcccctaccccccaattaggagggcactggcccccaacaggcatcaccccgctaaatcccctagaagtcccactcctaaacacatccgtattactcacatcaggagtatcaatcacctgagctcaccatagtctaatagaaaacaaccgaaaccaaataattcaagcactgcttattacaattttactgggtctctattttaccctcctacaagcctcagagtacttcgagtctcccttcaccatttccgacggcatctacggctcaacattttttgtagccacaggcttccacggacttcacgtcattattggctcaactttcctcactatctgcttcatccgccaactaatatttcactttacatccaaacatcactttggcttcgaagccgccgcctgatactggcattttgtagatgtggtttgactatttctgtatgtctccatctattgatgagggtcttactcttttagtataaatagtaccgttaacttccaattaactagttttgacaacattcaaaaaagagtaataaacttcgccttaattttaataatcaacaccctcctagccttactactaataattattacattttgactaccacaactcaacggctacatagaaaaatccaccccttacgagtgcggcttcgaccctatatcccccgcccgcgtccctttctccataaaattcttcttagtagctattaccttcttattatttgatctagaaattgccctccttttacccctaccatgagccctacaaacaactaacctgccactaatagttatgtcatccctcttattaatcatcatcctagccctaagtctggcctatgagtgactacaaaaaggattagactgaaccgaattggtatatagtttaaacaaaacgaatgatttcgactcattaaattatgataatcatatttaccaaatgcccctcatttacataaatattatactagcatttaccatctcacttctaggaatactagtatatcgctcacacctcatatcctccctactatgcctagaaggaataatactatcgctgttcattatagctactctcataaccctcaacacccactccctcttagccaatattgtgcctattgccatactagtctttgccgcctgcgaagcagcggtgggcctagccctactagtctcaatctccaacacatatggcctagactacgtacataacctaaacctactccaatgctaaaactaatcgtcccaacaattatattactaccactgacatgactttccaaaaaacacataatttgaatcaacacaaccacccacagcctaattattagcatcatccctctactattttttaaccaaatcaacaacaacctatttagctgttccccaaccttttcctccgaccccctaacaacccccctcctaatactaactacctgactcctacccctcacaatcatggcaagccaacgccacttatccagtgaaccactatcacgaaaaaaactctacctctctatactaatctccctacaaatctccttaattataacattcacagccacagaactaatcatattttatatcttcttcgaaaccacacttatccccaccttggctatcatcacccgatgaggcaaccagccagaacgcctgaacgcaggcacatacttcctattctacaccctagtaggctcccttcccctactcatcgcactaatttacactcacaacaccctaggctcactaaacattctactactcactctcactgcccaagaactatcaaactcctgagccaacaacttaatatgactagcttacacaatagcttttatagtaaagatacctctttacggactccacttatgactccctaaagcccatgtcgaagcccccatcgctgggtcaatagtacttgccgcagtactcttaaaactaggcggctatggtataatacgcctcacactcattctcaaccccctgacaaaacacatagcctaccccttccttgtactatccctatgaggcataattataacaagctccatctgcctacgacaaacagacctaaaatcgctcattgcatactcttcaatcagccacatagccctcgtagtaacagccattctcatccaaaccccctgaagcttcaccggcgcagtcattctcataatcgcccacgggcttacatcctcattactattctgcctagcaaactcaaactacgaacgcactcacagtcgcatcataatcctctctcaaggacttcaaactctactcccactaatagctttttgatgacttctagcaagcctcgctaacctcgccttaccccccactattaacctactgggagaactctctgtgctagtaaccacgttctcctgatcaaatatcactctcctacttacaggactcaacatactagtcacagccctatactccctctacatatttaccacaacacaatggggctcactcacccaccacattaacaacataaaaccctcattcacacgagaaaacaccctcatgttcatacacctatcccccattctcctcctatccctcaaccccgacatcattaccgggttttcctcttgtaaatatagtttaaccaaaacatcagattgtgaatctgacaacagaggcttacgaccccttatttaccgagaaagctcacaagaactgctaactcatgcccccatgtctaacaacatggctttctcaacttttaaaggataacagctatccattggtcttaggccccaaaaattttggtgcaactccaaataaaagtaataaccatgcacactactataaccaccctaaccctgacttccctaattccccccatccttaccaccctcgttaaccctaacaaaaaaaactcatacccccattatgtaaaatccattgtcgcatccacctttattatcagtctcttccccacaacaatattcatgtgcctagaccaagaagttattatctcgaactgacactgagccacaacccaaacaacccagctctccctaagcttcaaactagactacttctccataatattcatccctgtagcattgttcgttacatggtccatcatagaattctcactgtgatatataaactcagacccaaacattaatcagttcttcaaatatctactcatcttcctaattaccatactaatcttagttaccgctaacaacctattccaactgttcatcggctgagagggcgtaggaattatatccttcttgctcatcagttgatgatacgcccgagcagatgccaacacagcagccattcaagcaatcctatacaaccgtatcggcgatatcggtttcatcctcgccttagcatgatttatcctacactccaactcatgagacccacaacaaatagcccttctaaacgctaatccaagcctcaccccactactaggcctcctcctagcagcagcaggcaaatcagcccaattaggtctccacccctgactcccctcagccatagaaggccccaccccagtctcagccctactccactcaagcactatagttgtagcaggaatcttcttactcatccgcttccaccccctagcagaaaatagcccactaatccaaactctaacactatgcttaggcgctatcaccactctgttcgcagcagtctgcgcccttacacaaaatgacatcaaaaaaatcgtagccttctccacttcaagtcaactaggactcataatagttacaatcggcatcaaccaaccacacctagcattcctgcacatctgtacccacgccttcttcaaagccatactatttatgtgctccgggtccatcatccacaaccttaacaatgaacaagatattcgaaaaataggaggactactcaaaaccatacctctcacttcaacctccctcaccattggcagcctagcattagcaggaatacctttcctcacaggtttctactccaaagaccacatcatcgaaaccgcaaacatatcatacacaaacgcctgagccctatctattactctcatcgctacctccctgacaagcgcctatagcactcgaataattcttctcaccctaacaggtcaacctcgcttccccacccttactaacattaacgaaaataaccccaccctactaaaccccattaaacgcctggcagccggaagcctattcgcaggatttctcattactaacaacatttcccccgcatcccccttccaaacaacaatccccctctacctaaaactcacagccctcgctgtcactttcctaggacttctaacagccctagacctcaactacctaaccaacaaacttaaaataaaatccccactatgcacattttatttctccaacatactcggattctaccctagcatcacacaccgcacaatcccctatctaggccttcttacgagccaaaacctgcccctactcctcctagacctaacctgactagaaaagctattacctaaaacaatttcacagcaccaaatctccacctccatcatcacctcaacccaaaaaggcataattaaactttacttcctctctttcttcttcccactcatcctaaccctgctcctaatcacataacctattcccccgagcaatctcaattacaatatatacaccaacaaacaatgttcaaccagtaactactactaatcaacgcccataatcatacaaagcccccgcaccaataggatcctcccgaatcaaccctgacccctctccttcataaattattcagcttcctacactattaaagtttaccacaaccaccaccccatcatactctttcacccacagcaccaatcctacctccatcgctaaccccactaaaacactcaccaagacctcaacccctgacccccatgcctcaggatactcctcaatagccatcgctgtagtatatccaaagacaaccatcattccccctaaataaattaaaaaaactattaaacccatataacctcccccaaaattcagaataataacacacccgaccacaccgctaacaatcaatactaaacccccataaataggagaaggcttagaagaaaaccccacaaaccccattactaaacccacactcaacagaaacaaagcatacatcattattctcgcacggactacaaccacgaccaatgatatgaaaaaccatcgttgtatttcaactacaagaacaccaatgaccccaatacgcaaaactaaccccctaataaaattaattaaccactcattcatcgacctccccaccccatccaacatctccgcatgatgaaacttcggctcactccttggcgcctgcctgatcctccaaatcaccacaggactattcctagccatgcactactcaccagacgcctcaaccgccttttcatcaatcgcccacatcactcgagacgtaaattatggctgaatcatccgctaccttcacgccaatggcgcctcaatattctttatctgcctcttcctacacatcgggcgaggcctatattacggatcatttctctactcagaaacctgaaacatcggcattatcctcctgcttgcaactatagcaacagccttcataggctatgtcctcccgtgaggccaaatatcattctgaggggccacagtaattacaaacttactatccgccatcccatacattgggacagacctagttcaatgaatctgaggaggctactcagtagacagtcccaccctcacacgattctttacctttcacttcatcttgcccttcattattgcagccctagcagcactccacctcctattcttgcacgaaacgggatcaaacaaccccctaggaatcacctcccattccgataaaatcaccttccacccttactacacaatcaaagacgccctcggcttacttctcttccttctctccttaatgacattaacactattctcaccagacctcctaggcgacccagacaattataccctagccaaccccttaaacacccctccccacatcaagcccgaatgatatttcctattcgcctacacaattctccgatccgtccctaacaaactaggaggcgtccttgccctattactatccatcctcatcctagcaataatccccatcctccatatatccaaacaacaaagcataatatttcgcccactaagccaatcactttattgactcctagccgcagacctcctcattctaacctgaatcggaggacaaccagtaagctacccttttaccatcattggacaagtagcatccgtactatacttcacaacaatcctaatcctaataccaactatctccctaattgaaaacaaaatactcaaatgggcctgtccttgtagtataaactaatacaccagtcttgtaaaccggagatgaaaacctttttccaaggacaaatcagagaaaaagtctttaactccaccattagcacccaaagctaagattctaatttaaactattctctgttctttcatggggaagcagatttgggtaccacccaagtattgactcacccatcaacaaccgctatgtatttcgtacattactgccagccaccatgaatattgtacggtaccataaatacttgaccacctgtagtacataaaaacccaacccacatcaaaaccccctcctcatgcttacaagcaagtacagcaatcaaccctcaactatcacacatcaactgcaactccaaagccacccctcacccactaggataccaacaaacctacccacccttaacagtacatagtacataaagccatttaccgtacatagcacattacagtcaaatcccttctcgtccccatggatgacccccctcagataggggtcccttgaccaccatcctccgtgaaatcaatatcccgcacaagagtgctactctcctcgctccgagcccataacacttgggggtagctaaagtgaactgtatccgacatctggttcctacttcagggccataaagcctaaatagcccacacgttccccttaaataagacatcacgatg

SEQ ID NO: 248 - DNA, 16570 bp, Homo sapiens mitochondrial
  3108: "n" refers to a nucleotide at position 3107 of the Cambridge Reference Sequence (CRS, Anderson et al. 1981 Nature 290:457-465), later determined to be absent from the human mtDNA sequence according to the revised CRS (rCRS, Andrews et al. 1999 Nature Genetics 23:147); "n" therefore represents a single nucleotide deletion at a position corresponding to nucleotide 3107 of SEQ ID NO:1 as provided herein.
gatcacaggtctatcaccctattaaccactcacgggagctctccatgcatttggtattttcgtttggggggtgtgcacgcgatagcattgcgagacgctggagccggagcaccctatgtcgcagtatctgtctttgattcctgccccatcctgttatttatcgcacctacgttcaatattacaggcgaacatacttactaaagtgtgttaattaattaatgcttgtaggacatagtaataacaattgaatgtctgcacagccgctttccacacagacatcataacaaaaaatttccaccaaaccccccctccccccccgcttctggccacagcacttaaacacatctctgccaaaccccaaaaacaaagaaccctaacaccagcctaaccagatttcaaattttatcttttggcggtatgcacttttaacagtcaccccccaactaacacattattttcccctcccactcccatactactaatctcatcaatacaacccccgcccatcctacccagcacacacaccgctgctaaccccataccccgaaccaaccaaaccccaaagacaccccccacagtttatgtagcttacctcctcaaagcaatacactgaaaatgtttagacgggctcacatcaccccataaacaaataggtttggtcctggcctttctattagctcttagtaagattacacatgcaagcatccccgttccagtgagttcaccctctaaatcaccacgatcaaaagggacaagcatcaagcacgcagcaatgcagctcaaaacgcttagcctagccacacccccacgggaaacagcagtgattaacctttagcaataaacgaaagtttaactaagctatactaaccccagggttggtcaatttcgtgccagccaccgcggtcacacgattaacccaagtcaatagaagccggcgtaaagagtgttttagatcaccccctccccaataaagctaaaactcacctgagttgtaaaaaactccagttgacacaaaatagactacgaaagtggctttaacatatctgaacacacaatagctaagacccaaactgggattagataccccactatgcttagccctaaacctcaacagttaaatcaacaaaactgctcgccagaacactacgagccacagcttaaaactcaaaggacctggcggtgcttcatatccctctagaggagcctgttctgtaatcgataaaccccgatcaacctcaccacctcttgctcagcctatataccgccatcttcagcaaaccctgatgaaggctacaaagtaagcgcaagtacccacgtaaagacgttaggtcaaggtgtagcccatgaggtggcaagaaatgggctacattttctaccccagaaaactacgatagcccttatgaaacttaagggtcgaaggtggatttagcagtaaactgagagtagagtgcttagttgaacagggccctgaagcgcgtacacaccgcccgtcaccctcctcaagtatacttcaaaggacatttaactaaaacccctacgcatttatatagaggagacaagtcgtaacatggtaagtgtactggaaagtgcacttggacaaaccagagtgtagcttaacacaaagcacccaacttacacttaggagatttcaacttaacttgaccgctctgagctaaacctagccccaaacccactccaccttactaccagacaaccttagccaaaccatttacccagataaagtataggcgatagaaattgaaacctggcgcaatagatatagtaccgcaagggaaagatgaaaaattataaccaagcataatatagcaaggactaacccctataccttctgcataatgaattaactagaaataactttgcaaggagaaccaaagctaagacccccgaaaccagacgagctacctaagaacagctaaaagagcacacccgtctatgtagcaaaatagtgggaagatttataggtagaggcgacaaacctaccgagcctggtgatagctggttgtccaagatagaatcttagttcaactttaaatttgcccacagaaccctctaaatccccttgtaaatttaactgttagtccaaagaggaacagctctttggacactaggaaaaaaccttgtagagagagtaaaaaatttaacacccatagtaggcctaaaagcagccaccaattaagaaagcgttcaagctcaacacccactacctaaaaaatcccaaacatataactgaactcctcacacccaattggaccaatctatcaccctatagaagaactaatgttagtataagtaacatgaaaacattctcctccgcataagcctgcgtcagattaaaacactgaactgacaattaacagcccaatatctacaatcaaccaacaagtcattattaccctcactgtcaacccaacacaggcatgctcataaggaaaggttaaaaaaagtaaaaggaactcggcaaatcttaccccgcctgtttaccaaaaacatcacctctagcatcaccagtattagaggcaccgcctgcccagtgacacatgtttaacggccgcggtaccctaaccgtgcaaaggtagcataatcacttgttccttaaatagggacctgtatgaatggctccacgagggttcagctgtctcttacttttaaccagtgaaattgacctgcccgtgaagaggcgggcatgacacagcaagacgagaagaccctatggagctttaatttattaatgcaaacagtacctaacaaacccacaggtcctaaactaccaaacctgcattaaaaatttcggttggggcgacctcggagcagaacccaacctccgagcagtacatgctaagacttcaccagtcaaagcgaactactatactcaattgatccaataacttgaccaacggaacaagttaccctagggataacagcgcaatcctattctagagtccatatcaacaatagggtttacgacctcgatgttggatcaggacatcccgatggtgcagccgctattaaaggttcgtttgttcaacgattaaagtcctacgtgatctgagttcagaccggagtaatccaggtcggtttctatctacnttcaaattcctccctgtacgaaaggacaagagaaataaggcctacttcacaaagcgccttcccccgtaaatgatatcatctcaacttagtattatacccacacccacccaagaacagggtttgttaagatggcagagcccggtaatcgcataaaacttaaaactttacagtcagaggttcaattcctcttcttaacaacatacccatggccaacctcctactcctcattgtacccattctaatcgcaatggcattcctaatgcttaccgaacgaaaaattctaggctatatacaactacgcaaaggccccaacgttgtaggcccctacgggctactacaacccttcgctgacgccataaaactcttcaccaaagagcccctaaaacccgccacatctaccatcaccctctacatcaccgccccgaccttagctctcaccatcgctcttctactatgaacccccctccccatacccaaccccctggtcaacctcaacctaggcctcctatttattctagccacctctagcctagccgtttactcaatcctctgatcagggtgagcatcaaactcaaactacgccctgatcggcgcactgcgagcagtagcccaaacaatctcatatgaagtcaccctagccatcattctactatcaacattactaataagtggctcctttaacctctccacccttatcacaacacaagaacacctctgattactcctgccatcatgacccttggccataatatgatttatctccacactagcagagaccaaccgaacccccttcgaccttgccgaaggggagtccgaactagtctcaggcttcaacatcgaatacgccgcaggccccttcgccctattcttcatagccgaatacacaaacattattataataaacaccctcaccactacaatcttcctaggaacaacatatgacgcactctcccctgaactctacacaacatattttgtcaccaagaccctacttctaacctccctgttcttatgaattcgaacagcatacccccgattccgctacgaccaactcatacacctcctatgaaaaaacttcctaccactcaccctagcattacttatatgatatgtctccatacccattacaatctccagcatcccccctcaaacctaagaaatatgtctgataaaagagttactttgatagagtaaataataggagcttaaacccccttatttctaggactatgagaatcgaacccatccctgagaatccaaaattctccgtgccacctatcacaccccatcctaaagtaaggtcagctaaataagctatcgggcccataccccgaaaatgttggttatacccttcccgtactaattaatcccctggcccaacccgtcatctactctaccatctttgcaggcacactcatcacagcgctaagctcgcactgattttttacctgagtaggcctagaaataaacatgctagcttttattccagttctaaccaaaaaaataaaccctcgttccacagaagctgccatcaagtatttcctcacgcaagcaaccgcatccataatccttctaatagctatcctcttcaacaatatactctccggacaatgaaccataaccaatactaccaatcaatactcatcattaataatcataatggctatagcaataaaactaggaatagccccctttcacttctgagtcccagaggttgcccaaggcacccctctgacatccggcctgcttcttctcacatgacaaaaactagcccccatctcaatcatataccaaatctctccctcactaaacgtaagccttctcctcactctctcaatcttatccatcatagcaggcagttgaggtggattaaaccaaacccagctacgcaaaatcttagcatactcctcaattacccacataggatgaataatagcagttctaccgtacaaccctaacataaccattcttaatttaactatttatattatcctaactactaccgcattcctactactcaacttaaactccagcaccacgaccctactactatctcgcacctgaaacaagctaacatgactaacacccttaattccatccaccctcctctccctaggaggcctgcccccgctaaccggctttttgcccaaatgggccattatcgaagaattcacaaaaaacaatagcctcatcatccccaccatcatagccaccatcaccctccttaacctctacttctacctacgcctaatctactccacctcaatcacactactccccatatctaacaacgtaaaaataaaatgacagtttgaacatacaaaacccaccccattcctccccacactcatcgcccttaccacgctactcctacctatctccccttttatactaataatcttatagaaatttaggttaaatacagaccaagagccttcaaagccctcagtaagttgcaatacttaatttctgtaacagctaaggactgcaaaaccccactctgcatcaactgaacgcaaatcagccactttaattaagctaagcccttactagaccaatgggacttaaacccacaaacacttagttaacagctaagcaccctaatcaactggcttcaatctacttctcccgccgccgggaaaaaaggcgggagaagccccggcaggtttgaagctgcttcttcgaatttgcaattcaatatgaaaatcacctcggagctggtaaaaagaggcctaacccctgtctttagatttacagtccaatgcttcactcagccattttacctcacccccactgatgttcgccgaccgttgactattctctacaaaccacaaagacattggaacactatacctattattcggcgcatgagctggagtcctaggcacagctctaagcctccttattcgagccgagctgggccagccaggcaaccttctaggtaacgaccacatctacaacgttatcgtcacagcccatgcatttgtaataatcttcttcatagtaatacccatcataatcggaggctttggcaactgactagttcccctaataatcggtgcccccgatatggcgtttccccgcataaacaacataagcttctgactcttacctccctctctcctactcctgctcgcatctgctatagtggaggccggagcaggaacaggttgaacagtctaccctcccttagcagggaactactcccaccctggagcctccgtagacctaaccatcttctccttacacctagcaggtgtctcctctatcttaggggccatcaatttcatcacaacaattatcaatataaaaccccctgccataacccaataccaaacgcccctcttcgtctgatccgtcctaatcacagcagtcctacttctcctatctctcccagtcctagctgctggcatcactatactactaacagaccgcaacctcaacaccaccttcttcgaccccgccggaggaggagaccccattctataccaacacctattctgatttttcggtcaccctgaagtttatattcttatcctaccaggcttcggaataatctcccatattgtaacttactactccggaaaaaaagaaccatttggatacataggtatggtctgagctatgatatcaattggcttcctagggtttatcgtgtgagcacaccatatatttacagtaggaatagacgtagacacacgagcatatttcacctccgctaccataatcatcgctatccccaccggcgtcaaagtatttagctgactcgccacactccacggaagcaatatgaaatgatctgctgcagtgctctgagccctaggattcatctttcttttcaccgtaggtggcctgactggcattgtattagcaaactcatcactagacatcgtactacacgacacgtactacgttgtagctcacttccactatgtcctatcaataggagctgtatttgccatcataggaggcttcattcactgatttcccctattctcaggctacaccctagaccaaacctacgccaaaatccatttcactatcatattcatcggcgtaaatctaactttcttcccacaacactttctcggcctatccggaatgccccgacgttactcggactaccccgatgcatacaccacatgaaacatcctatcatctgtaggctcattcatttctctaacagcagtaatattaataattttcatgatttgagaagccttcgcttcgaagcgaaaagtcctaatagtagaagaaccctccataaacctggagtgactatatggatgccccccaccctaccacacattcgaagaacccgtatacataaaatctagacaaaaaaggaaggaatcgaaccccccaaagctggtttcaagccaaccccatggcctccatgactttttcaaaaaggtattagaaaaaccatttcataactttgtcaaagttaaattataggctaaatcctatatatcttaatggcacatgcagcgcaagtaggtctacaagacgctacttcccctatcatagaagagcttatcacctttcatgatcacgccctcataatcattttccttatctgcttcctagtcctatatgcccttttcctaacactcacaacaaaactaactaatactaacatctcagacgctcaggaaatagaaaccgtctgaactatcctgcccgccatcatcctagtcctcatcgccctcccatccctacgcatcctttacataacagacgaggtcaacgatccctcccttaccatcaaatcaattggccaccaatggtactgaacctacgagtacaccgactacggcggactaatcttcaactcctacatacttcccccattattcctagaaccaggcgacctgcgactccttgacgttgacaatcgagtagtactcccgattgaaacccccattcgtataataattacatcacaagacgtcttgcactcatgagctgtccccacattaggcttaaaaacagatgcaattcccggacgtctaaaccaaaccactttcaccgctacacgaccgggggtatactacggtcaatgctctgaaatctgtggagcaaaccacagtttcatgcccatcgtcctagaattaattcccctaaaaatctttgaaatagggcccgtatttaccctatagcaccccctctaccccctctagagcccactgtaaagctaacttagcattaaccttttaagttaaagattaagagaaccaacacctctttacagtgaaatgccccaactaaatactaccgtatggcccaccataattacccccatactccttacactattcctcatcacccaactaaaaatattaaacacaaactaccacctacctccctcaccaaagcccataaaaataaaaaattataacaaaccctgagaaccaaaatgaacgaaaatctgttcgcttcattcattgcccccacaatcctaggcctacccgccgcagtactgatcattctatttccccctctattgatccccacctccaaatatctcatcaacaaccgactaatcaccacccaacaatgactaatcaaactaacctcaaaacaaatgataaccatacacaacactaaaggacgaacctgatctcttatactagtatccttaatcatttttattgccacaactaacctcctcggactcctgccttactcatttacaccaaccacccaactatctataaacctagccatggccatccccttatgagcgggcgcagtgattataggctttcgctctaagattaaaaatgccctagcccacttcttaccacaaggcacacctacaccccttatccccatactagttattatcgaaaccatcagcctactcattcaaccaatagccctggccgtacgcctaaccgctaacattactgcaggccacctactcatgcacctaattggaagcgccaccctagcaatatcaaccattaaccttccctctacacttatcatcttcacaattctaattctactgactatcctagaaatcgctgtcgccttaatccaagcctacgttttcacacttctagtaagcctctacctgcacgacaacacataatgacccaccaatcacatgcctatcatatagtaaaacccagcccatgacccctaacaggggccctctcagccctcctaatgacctccggcctagccatgtgatttcacttccactccataacgctcctcatactaggcctactaaccaacacactaaccatataccaatgatggcgcgatgtaacacgagaaagcacataccaaggccaccacacaccacctgtccaaaaaggccttcgatacgggataatcctatttattacctcagaagtttttttcttcgcaggatttttctgagccttttaccactccagcctagcccctaccccccaattaggagggcactggcccccaacaggcatcaccccgctaaatcccctagaagtcccactcctaaacacatccgtattactcgcatcaggagtatcaatcacctgagctcaccatagtctaatagaaaacaaccgaaaccaaataattcaagcactgcttattacaattttactgggtctctattttaccctcctacaagcctcagagtacttcgagtctcccttcaccatttccgacggcatctacggctcaacattttttgtagccacaggcttccacggacttcacgtcattattggctcaactttcctcactatctgcttcatccgccaactaatatttcactttacatccaaacatcactttggcttcgaagccgccgcctgatactggcattttgtagatgtggtttgactatttctgtatgtctccatctattgatgagggtcttactcttttagtataaatagtaccgttaacttccaattaactagttttgacaacattcaaaaaagagtaataaacttcgccttaattttaataatcaacaccctcctagccttactactaataattattacattttgactaccacaactcaacggctacatagaaaaatccaccccttacgagtgcggcttcgaccctatatcccccgcccgcgtccctttctccataaaattcttcttagtagctattaccttcttattatttgatctagaaattgccctccttttacccctaccatgagccctacaaacaactaacctgccactaatagttatgtcatccctcttattaatcatcatcctagccctaagtctggcctatgagtgactacaaaaaggattagactgaaccgaattggtatatagtttaaacaaaacgaatgatttcgactcattaaattatgataatcatatttaccaaatgcccctcatttacataaatattatactagcatttaccatctcacttctaggaatactagtatatcgctcacacctcatatcctccctactatgcctagaaggaataatactatcgctgttcattatagctactctcataaccctcaacacccactccctcttagccaatattgtgcctattgccatactagtctttgccgcctgcgaagcagcggtgggcctagccctactagtctcaatctccaacacatatggcctagactacgtacataacctaaacctactccaatgctaaaactaatcgtcccaacaattatattactaccactgacatgactttccaaaaaacacataatttgaatcaacacaaccacccacagcctaattattagcatcatccctctactattttttaaccaaatcaacaacaacctatttagctgttccccaaccttttcctccgaccccctaacaacccccctcctaatactaactacctgactcctacccctcacaatcatggcaagccaacgccacttatccagtgaaccactatcacgaaaaaaactctacctctctatactaatctccctacaaatctccttaattataacattcacagccacagaactaatcatattttatatcttcttcgaaaccacacttatccccaccttggctatcatcacccgatgaggcaaccagccagaacgcctgaacgcaggcacatacttcctattctacaccctagtaggctcccttcccctactcatcgcactaatttacactcacaacaccctaggctcactaaacattctactactcactctcactgcccaagaactatcaaactcctgagccaacaacttaatatgactagcttacacaatagcttttatagtaaagatacctctttacggactccacttatgactccctaaagcccatgtcgaagcccccatcgctgggtcaatagtacttgccgcagtactcttaaaactaggcggctatggtataatacgcctcacactcattctcaaccccctgacaaaacacatagcctaccccttccttgtactatccctatgaggcataattataacaagctccatctgcctacgacaaacagacctaaaatcgctcattgcatactcttcaatcagccacatagccctcgtagtaacagccattctcatccaaaccccctgaagcttcaccggcgcagtcattctcataatcgcccacggacttacatcctcattactattctgcctagcaaactcaaactacgaacgcactcacagtcgcatcataatcctctctcaaggacttcaaactctactcccactaatagctttttgatgacttctagcaagcctcgctaacctcgccttaccccccactattaacctactgggagaactctctgtgctagtaaccacgttctcctgatcaaatatcactctcctacttacaggactcaacatactagtcacagccctatactccctctacatatttaccacaacacaatggggctcactcacccaccacattaacaacataaaaccctcattcacacgagaaaacaccctcatgttcatacacctatcccccattctcctcctatccctcaaccccgacatcattaccgggttttcctcttgtaaatatagtttaaccaaaacatcagattgtgaatctgacaacagaggcttacgaccccttatttaccgagaaagctcacaagaactgctaactcatgcccccatgtctaacaacatggctttctcaacttttaaaggataacagctatccattggtcttaggccccaaaaattttggtgcaactccaaataaaagtaataaccatgcacactactataaccaccctaaccctgacttccctaattccccccatccttaccaccctcgttaaccctaacaaaaaaaactcatacccccattatgtaaaatccattgtcgcatccacctttattatcagtctcttccccacaacaatattcatgtgcctagaccaagaagttattatctcgaactgacactgagccacaacccaaacaacccagctctccctaagcttcaaactagactacttctccataatattcatccctgtagcattgttcgttacatggtccatcatagaattctcactgtgatatataaactcagacccaaacattaatcagttcttcaaatatctactcattttcctaattaccatactaatcttagttaccgctaacaacctattccaactgttcatcggctgagagggcgtaggaattatatccttcttgctcatcagttgatgacacgcccgagcagatgccaacacagcagccattcaagcaatcctatacaaccgtatcggcgatatcggtttcatcctcgccttagcatgatttatcctacactccaactcatgagacccacaacaaatagcccttctaaacgctaatccaagcctcaccccactactaggcctcctcctagcagcagcaggcaaatcagcccaattaggtctccacccctgactcccctcagccatagaaggccccaccccagtctcagccctactccactcaagcactatagttgtagcaggaatcttcttactcatccgcttccaccccctagcagaaaatagcccactaatccaaactctaacactatgcttaggcgctatcaccactctgttcgcagcagtctgcgcccttacacaaaatgacatcaaaaaaatcgtagccttctccacttcaagtcaactaggactcataatagttacaatcggcatcaaccaaccacacctagcattcctgcacatctgtacccacgccttcttcaaagccatactatttatgtgctccgggtccatcatccacaaccttaacaatgaacaagatattcgaaaaataggaggactactcaaaaccatacctctcacttcaacctccctcaccattggcagcctagcattagcaggaatacctttcctcacaggtttctactccaaagaccacatcatcgaaaccgcaaacatatcatacacaaacgcctgagccctatctattactctcatcgctacctccctgacaagcgcctatagcactcgaataattcttctcaccctaacaggtcaacctcgcttccccacccttactaacattaacgaaaataaccccaccctactaaaccccattaaacgcctggcagccggaagcctattcgcaggatttctcattactaacaacatttcccccgcatcccccttccaaacaacaatccccctctacctaaaactcacagccctcgctgtcactttcctaggacttctaacagccctagacctcaactacctaaccaacaaacttaaaataaaatccccactatgcacattttatttctccaacatactcggattctaccctagcatcacacaccgcacaatcccctatctaggccttcttacgagccaaaacctgcccctactcctcctagacctaacctgactagaaaagctattacctaaaacaatttcacagcaccaaatctccacctccatcatcacctcaacccaaaaaggcataattaaactttacttcctctctttcttcttcccactcatcctaaccctactcctaatcacataacctattcccccgagcaatctcaattacaatatatacaccaacaaacaatgttcaaccagtaactactactaatcaacgcccataatcatacaaagcccccgcaccaataggatcctcccgaatcaaccctgacccctctccttcataaattattcagcttcctacactattaaagtttaccacaaccaccaccccatcatactctttcacccacagcaccaatcctacctccatcgctaaccccactaaaacactcaccaagacctcaacccctgacccccatgcctcaggatactcctcaatagccatcgctgtagtatatccaaagacaaccatcattccccctaaataaattaaaaaaactattaaacccatataacctcccccaaaattcagaataataacacacccgaccacaccgctaacaatcaatactaaacccccataaataggagaaggcttagaagaaaaccccacaaaccccattactaaacccacactcaacagaaacaaagcatacatcattattctcgcacggactacaaccacgaccaatgatatgaaaaaccatcgttgtatttcaactacaagaacaccaatgaccccaatacgcaaaattaaccccctaataaaattaattaaccactcattcatcgacctccccaccccatccaacatctccgcatgatgaaacttcggctcactccttggcgcctgcctgatcctccaaatcaccacaggactattcctagccatgcactactcaccagacgcctcaaccgccttttcatcaatcgcccacatcactcgagacgtaaattatggctgaatcatccgctaccttcacgccaatggcgcctcaatattctttatctgcctcttcctacacatcgggcgaggcctatattacggatcatttctctactcagaaacctgaaacatcggcattatcctcctgcttgcaactatagcaacagccttcataggctatgtcctcccgtgaggccaaatatcattctgaggggccacagtaattacaaacttactatccgccatcccatacattgggacagacctagttcaatgaatctgaggaggctactcagtagacagtcccaccctcacacgattctttacctttcacttcatcttgcccttcattattgcagccctagcagcactccacctcctattcttgcacgaaacgggatcaaacaaccccctaggaatcacctcccattccgataaaatcaccttccacccttactacacaatcaaagacgccctcggcttacttctcttccttctctccttaatgacattaacactattctcaccagacctcctaggcgacccagacaattataccctagccaaccccttaaacacccctccccacatcaagcccgaatgatatttcctattcgcctacacaattctccgatccgtccctaacaaactaggaggcgtccttgccctattactatccatcctcatcctagcaataatccccatcctccatatatccaaacaacaaagcataatatttcgcccactaagccaatcactttattgactcctagccgcagacctcctcattctaacctgaatcggaggacaaccagtaagctacccttttaccatcattggacaagtagcatccgtactatacttcacaacaatcctaatcctaataccaactatctccctaattgaaaacaaaatactcaaatgggcctgtccttgtagtataaactaatacaccagtcttgtaaaccggagatgaaaacctttttccaaggacaaatcagagaaaaagtctttaactccaccattagcacccaaagctaagattctaatttaaactattctctgttctttcatggggaagcagatttgggtaccacccaagtattgactcacccatcaacaaccgctatgtatttcgtacattactgccagtcaccatgaatattgtacggtaccataaatacttgaccacctgtagtacataaaaacccaatccacatcaaaaccccctccccatgcttacaagcaagtacagcaatcaaccttcaactatcacacatcaactgcaactccaaagccacccctcacccactaggataccaacaaacctatccacccttaacagtacatagtacataaaaccatttaccgtacatggcacattacagtcaaatcccttctcgtccccatggatgacccccctcagataggggtcccttgaccaccatcctccgtgaaatcaatatcccgcacaagagtgctactctcctcgctccgggcccataacacttgggggtagctaaagtgaactgtatccgacatctggttcctacttcagggtcataaaacctaaatagcccacacgttccccttaaataagacatcacgatg

SEQ ID NO: 249 - DNA, 16571 bp, Homo sapiens mitochondrial
  3109: "n" refers to a nucleotide at position 3107 of the Cambridge Reference Sequence (CRS, Anderson et al. 1981 Nature 290:457-465), later determined to be absent from the human mtDNA sequence according to the revised CRS (rCRS, Andrews et al. 1999 Nature Genetics 23:147); "n" therefore represents a single nucleotide deletion at a position corresponding to nucleotide 3107 of SEQ ID NO:1 as provided herein.
gatcacaggtctatcaccctattaaccactcacgggagctctccatgcatttggtattttcgtctggggggtatgcacgcgatagcattgcgagacgctggagccggagcaccctatgtcgcagtatctgtctttgattcctgcctcatcctattatttatcgcacctacgttcaatattacaggcgaacatacttactaaagtgtgttaattaattaatgcttgtaggacataataataacaattgaatgtctgcacagccgctttccacacagacatcataacaaaaaatttccaccaaaccccccctcccccccgcttctggccacagcacttaaacacatctctgccaaaccccaaaaacaaagaaccctaacaccagcctaaccagatttcaaattttatcttttggcggtatgcacttttaacagtcaccccccaactaacacattattttcccctcccactcccatactactaatctcatcaatacaacccccgcccatcctacccagcacacacacaccgctgctaaccccataccccgaaccaaccaaaccccaaagacaccccccacagtttatgtagcttacctcctcaaagcaatacactgaaaatgtttagacgggctcacatcaccccataaacaaataggtttggtcctagcctttctattagctcttagtaagattacacatgcaagcatccccgttccagtgagttcaccctctaaatcaccacgatcaaaagggacaagcatcaagcacgcagcaatgcagctcaaaacgcttagcctagccacacccccacgggaaacagcagtgattaacctttagcaataaacgaaagtttaactaagctatactaaccccagggttggtcaatttcgtgccagccaccgcggtcacacgattaacccaagtcaatagaagccggcgtaaagagtgttttagatcaccccctccccaataaagctaaaactcacctgagttgtaaaaaactccagttgacacaaaatagactacgaaagtggctttaacatatctgaacacacaatagctaagacccaaactgggattagataccccactatgcttagccctaaacctcaacagttaaatcaacaaaactgctcgccagaacactacgagccacagcttaaaactcaaaggacctggcggtgcttcatatccctctagaggagcctgttctgtaatcgataaaccccgatcaacctcaccacctcttgctcagcctatataccgccatcttcagcaaaccctgatgaaggctacaaagtaagcgcaagtacccacgtaaagacgttaggtcaaggtgtagcccatgaggtggcaagaaatgggctacattttctaccccagaaaactacgatagcccttatgaaacttaagggtcgaaggtggatttagcagtaaactgagagtagagtgcttagttgaacagggccctgaagcgcgtacacaccgcccgtcaccctcctcaagtatacttcaaaggacatttaactaaaacccctacgcatttatatagaggagacaagtcgtaacatggtaagtgtactggaaagtgcacttggacgaaccagagtgtagcttaacacaaagcacccaacttacacttaggagatttcaacttaacttgaccgctctgagctaaacctagccccaaacccactccaccttactaccagacaaccttagccaaaccatttacccaaataaagtataggcgatagaaattgaaacctggcgcaatagatatagtaccgcaagggaaagatgaaaaattataaccaagcataatatagcaaggactaacccctataccttctgcataatgaattaactagaaataactttgcaaggagagccaaagctaagacccccgaaaccagacgagctacctaagaacagctaaaagagcacacccgtctatgtagcaaaatagtgggaagatttataggtagaggcgacaaacctaccgagcctggtgatagctggttgtccaagatagaatcttagttcaactttaaatttgcccacagaaccctctaaatccccttgtaaatttaactgttagtccaaagaggaacagctctttggacactaggaaaaaaccttgtagagagagtaaaaaattcaacacccatagtaggcctaaaagcagccaccaattaagaaagcgttcaagctcaacacccactacctaaaaaatcccaaacatataactgaactcctcacacccaattggaccaatctatcaccctatagaagaactaatgttagtataagtaacatgaaaacattctcctccgcataagcctgcgtcagattaaaacactgaactgacaattaacagcccaatatctacaatcaaccaacaagtcattattaccctcactgtcaacccaacacaggcatgctcataaggaaaggttaaaaaaagtaaaaggaactcggcaaatcttaccccgcctgtttaccaaaaacatcacctctagcatcaccagtattagaggcaccgcctgcccagtgacacatgtttaacggccgcggtaccctaaccgtgcaaaggtagcataatcacttgttccttaaatagggacctgtatgaatggctccacgagggttcagctgtctcttacttttaaccagtgaaattgacctgcccgtgaagaggcgggcataacacagcaagacgagaagaccctatggagctttaatttattaatgcaaacagtacctaacaaacccacaggtcctaaactaccaaacctgcattaaaaatttcggttggggcgacctcggagcagaacccaacctccgagcagtacatgctaagacttcaccagtcaaagcgaactactatactcaattgatccaataacttgaccaacggaacaagttaccctagggataacagcgcaatcctattctagagtccatatcaacaatagggtttacgacctcgatgttggatcaggacatcccgatggtgcagccgctattaaaggttcgtttgttcaacgattaaagtcctacgtgatctgagttcagaccggagtaatccaggtcggtttctatctacnttcaaattcctccctgtacgaaaggacaagagaaataaggcctacttcacaaagcgccttcccccgtaaatgatatcatctcaacttagtattatacccacacccacccaagaacagggtttgttaagatggcagagcccggtaatcgcataaaacttaaaactttacagtcagaggttcaattcctcttcttaacaacatacccatggccaacctcctactcctcattgtacccattctaatcgcaatggcattcctaatgcttaccgaacgaaaaattctaggctatatacaactacgcaaaggccccaacgttgtaggcccctacgggctactacaacccttcgctgacgccataaaactcttcaccaaagagcccctaaaacccgccacatctaccatcaccctctacatcaccgccccgaccttagctctcaccatcgctcttctactatgaacccccctccccatacccaaccccctggtcaacctcaacctaggcctcctatttattctagccacctctagcctagccgtttactcaatcctctgatcagggtgagcatcaaactcaaactacgccctgatcggcgcactgcgagcagtagcccaaacaatctcatatgaagtcaccctagccatcattctactatcaacattactaataagtggctcctttaacctctccacccttatcacaacacaagaacacctctgattactcctgccatcatgacccttggccataatatgatttatctccacactagcagagaccaaccgaacccccttcgaccttgccgaaggggagtccgaactagtctcaggcttcaacatcgaatacgccgcaggccccttcgccctattcttcatagccgaatacacaaacattattataataaacaccctcaccactacaatcttcctaggaacaacatatgacgcactctcccctgaactctacacaacatattttgtcaccaagaccctacttctaacctccctgttcttatgaattcgaacagcatacccccgattccgctacgaccaactcatacacctcctatgaaaaaacttcctaccactcaccctagcattacttatatgatatgtctccatacccattacaatctccagcattccccctcaaacctaagaaatatgtctgataaaagagttactttgatagagtaaataataggagcttaaacccccttatttctaggactatgagaatcgaacccatccctgagaatccaaaattctccgtgccacctatcacaccccatcctaaagtaaggtcagctaaataagctatcgggcccataccccgaaaatgttggttatacccttcccgtactaattaatcccctggcccaacccgtcatctactctaccatctttgcaggcacactcatcacagcgctaagctcgcactgattttttacctgagtaggcctagaaataaacatgctagcttttattccagttctaaccaaaaaaataaaccctcgttccacagaagctgccatcaagtatttcctcacgcaagcaaccgcatccataatccttctaatagctatcctcttcaacaatatactctccggacaatgaaccataaccaatactaccaatcaatactcatcattaataatcataatggctatagcaataaaactaggaatagccccctttcacttctgagtcccagaggttacccaaggcacccctctgacatccggcctgcttcttctcacatgacaaaaactagcccccatctcaatcatataccaaatctctccctcactaaacgtaagccttctcctcactctctcaatcttatccatcatagcaggcagttgaggtggattaaaccaaacccagctacgcaaaatcttagcatactcctcaattacccacataggatgaataatagcagttctaccgtacaaccctaacataaccattcttaatttaactatttatattatcctaactactaccgcattcctactactcaacttaaactccagcaccacgaccctactactatctcgcacctgaaacaagctaacatgactaacacccttaattccatccaccctcctctccctaggaggcctgcccccgctaaccggctttttgcccaaatgggccattatcgaagaattcacaaaaaacaatagcctcatcatccccaccatcatagccaccatcaccctccttaacctctacttctacctacgcctaatctactccacctcaatcacactactccccatatctaacaacgtaaaaataaaatgacagtttgaacatacaaaacccaccccattcctccccacactcatcgcccttaccacgctactcctacctatctccccttttatactaataatcttatagaaatttaggttaaatacagaccaagagccttcaaagccctcagtaagttgcaatacttaatttctgtaacagctaaggactgcaaaaccccactctgcatcaactgaacgcaaatcagccactttaattaagctaagcccttactagaccaatgggacttaaacccacaaacacttagttaacagctaagcaccctaatcaactggcttcaatctacttctcccgccgccgggaaaaaaggcgggagaagccccggcaggtttgaagctgcttcttcgaatttgcaattcaatatgaaaatcacctcggagctggtaaaaagaggcctaacccctgtctttagatttacagtccaatgcttcactcagccattttacctcacccccactgatgttcgccgaccgttgactattctctacaaaccacaaagacattggaacactatacctattattcggcgcatgagctggagtcctaggcacagctctaagcctccttattcgagccgagctgggccagccaggcaaccttctaggtaacgaccacatctacaacgttatcgtcacagcccatgcatttgtaataatcttcttcatagtaatacccatcataatcggaggctttggcaactgactagttcccctaataatcggtgcccccgatatggcgtttccccgcataaacaacataagcttctgactcttacctccctctctcctactcctgctcgcatctgctatagtggaggccggagcaggaacaggttgaacagtctaccctcccttagcagggaactactcccaccctggagcctccgtagacctaaccatcttctccttacacctagcaggtgtctcctctatcttaggggccatcaatttcatcacaacaattatcaatataaaaccccctgccataacccaataccaaacgcccctcttcgtctgatccgtcctaatcacagcagtcctacttctcctatctctcccagtcctagctgctggcatcactatactactaacagaccgcaacctcaacaccaccttcttcgaccccgccggaggaggagaccccattctataccaacacctattctgatttttcggtcaccctgaagtttatattcttatcctaccaggcttcggaataatctcccatattgtaacttactactccggaaaaaaagaaccatttggatacataggtatggtctgagctatgatatcaattggcttcctagggtttatcgtgtgagcacaccatatatttacagtaggaatagacgtagacacacgagcatatttcacctccgctaccataatcatcgctatccccaccggcgtcaaagtatttagctgactcgccacactccacggaagcaatatgaaatgatctgctgcagtgctctgagccctaggattcatctttcttttcaccgtaggtggcctgactggcattgtattagcaaactcatcactagacatcgtactacacgacacgtactacgttgtagcccacttccactatgtcctatcaataggagctgtatttgccatcataggaggcttcattcactgatttcccctattctcaggctacaccctagaccaaacctacgccaaaatccatttcactatcatattcatcggcgtaaatctaactttcttcccacaacactttctcggcctatccggaatgccccgacgttactcggactaccccgatgcatacaccacatgaaacatcctatcatctgtaggctcattcatttctctaacagcagtaatattaataattttcatgatttgagaagccttcgcttcgaagcgaaaagtcctaatagtagaagaaccctccataaacctggagtgactatatggatgccccccaccctaccacacattcgaagaacccgtatacataaaatctagacaaaaaaggaaggaatcgaaccccccaaagctggtttcaagccaaccccatggcctccatgactttttcaaaaaggtattagaaaaaccatttcataactttgtcaaagttaaattataggctaaatcctatatatcttaatggcacatgcagcgcaagtaggtctacaagacgctacttcccctatcatagaagagcttatcacctttcatgatcacgccctcataatcattttccttatctgcttcctagtcctgtatgcccttttcctaacactcacaacaaaactaactaatactaacatctcagacgctcaggaaatagaaaccgtctgaactatcctgcccgccatcatcctagtcctcatcgccctcccatccctacgcatcctttacataacagacgaggtcaacgatccctcccttaccatcaaatcaattggccaccaatggtactgaacctacgagtacaccgactacggcggactaatcttcaactcctacatacttcccccattattcctagaaccaggcgacctgcgactccttgacgttgacaatcgagtagtactcccgattgaagcccccattcgtataataattacatcacaagacgtcttgcactcatgagctgtccccacattaggcttaaaaacagatgcaattcccggacgtctaaaccaaaccactttcaccgctacacgaccgggggtatactacggtcaatgctctgaaatctgtggagcaaaccacagtttcatgcccatcgtcctagaattaattcccctaaaaatctttgaaatagggcccgtatttaccctatagcaccccctctaccccctctagagcccactgtaaagctaacttagcattaaccttttaagttaaagattaagagaaccaacacctctttacagtgaaatgccccaactaaatactaccgtatggcccaccataattacccccatactccttacactattcctcatcacccaactaaaaatattaaacacaaactaccacctacctccctcaccaaagcccataaaaataaaaaattataacaaaccctgagaaccaaaatgaacgaaaatctgttcgcttcattcattgcccccacaatcctaggcctacccgccgcagtactgatcattctatttccccctctattgatccccacctccaaatatctcatcaacaaccgactaatcaccacccaacaatgactaatcaaactaacctcaaaacaaatgataaccatacacaacactaaaggacgaacctgatctcttatactagtatccttaatcatttttattgccacaactaacctcctcggactcctgcctcactcatttacaccaaccacccaactatctataaacctagccatggccatccccttatgagcgggcgcagtgattataggctttcgctctaagattaaaaatgccctagcccacttcttaccacaaggcacacctacaccccttatccccatactagttattatcgaaaccatcagcctactcattcaaccaatagccctggccgtacgcctaaccgctaacattactgcaggccacctactcatgcacctaattggaagcgccaccctagcaatatcaaccattaaccttccctctacacttatcatcttcacaattctaattctactgactatcctagaaatcgctgtcgccttaatccaagcctacgttttcacacttctagtaagcctctacctgcacgacaacacataatgacccaccaatcacatgcctatcatatagtaaaacccagcccatgacccctaacaggggccctctcagccctcctaatgacctccggcctagccatgtgatttcacttccactccataacgctcctcatactaggcctactaaccaacacactaaccatataccaatgatggcgcgatgtaacacgagaaagcacataccaaggccaccacacaccacctgtccaaaaaggccttcgatacgggataatcctatttattacctcagaagtttttttcttcgcaggatttttctgagccttttaccactccagcctagcccctaccccccaattaggagggcactggcccccaacaggcatcaccccgctaaatcccctagaagtcccactcctaaacacatccgtattactcgcatcaggagtatcaatcacctgagctcaccatagtctaatagaaaacaaccgaaaccaaataattcaagcactgcttattacaattttactgggtctctattttaccctcctacaagcctcagagtacttcgagtctcccttcaccatttccgacggcatctacggctcaacattttttgtagccacaggcttccacggacttcacgtcattattggctcaactttcctcactatctgcttcatccgccaactaatatttcactttacatccaaacatcactttggcttcgaagccgccgcctgatactggcattttgtagatgtggtttgactatttctgtatgtctccatctattgatgagggtcttactcttttagtataaatagtaccgttaacttccaattaactagttttgacaacattcaaaaaagagtaataaacttcgccttaattttaataatcaacaccctcctagccttactactaataattattacattttgactaccacaactcaacggctacatagaaaaatccaccccttacgagtgcggcttcgaccctatatcccccgcccgcgtccctttctccataaaattcttcttagtagctattaccttcttattatttgatctagaaattgccctccttttacccctaccatgagccctacaaacaactaacctgccactaatagttatgtcatccctcttattaatcatcatcctagccctaagtctggcctatgagtgactacaaaaaggattagactgaaccgaattggtatatagtttaaacaaaacgaatgatttcgactcattaaattatgataatcatatttaccaaatgcccctcatttacataaatattatactagcatttaccatctcacttctaggaatactagtatatcgctcacacctcatatcctccctactatgcctagaaggaataatactatcgctgttcattatagctactctcataaccctcaacacccactccctcttagccaatattgtgcctattgccatactagtctttgccgcctgcgaagcagcggtgggcctagccctactagtctcaatctccaacacatatggcctagactacgtacataacctaaacctactccaatgctaaaactaatcgtcccaacaattatattactaccactgacatgactttccaaaaaacacataatttgaatcaacacaaccacccacagcctaattattagcatcatccctctactattttttaaccaaatcaacaacaacctatttagctgttccccaaccttttcctccgaccccctaacaacccccctcctaatactaactacctgactcctacccctcacaatcatggcaagccaacgccacttatccagtgaaccactatcacgaaaaaaactctacctctctatactaatctccctacaaatctccttaattataacattcacagccacagaactaatcatattttatatcttcttcgaaaccacacttatccccaccttggctatcatcacccgatgaggcaaccagccagaacgcctgaacgcaggcacatacttcctattctacaccctagtaggctcccttcccctactcatcgcactaatttacactcacaacaccctaggctcactaaacattctactactcactctcactgcccaagaactatcaaactcctgagccaacaacttaatatgactagcttacacaatagcttttatagtaaagatacctctttacggactccacttatgactccctaaagcccatgtcgaagcccccatcgctgggtcaatagtacttgccgcagtactcttaaaactaggcggctatggtataatacgcctcacactcattctcaaccccctgacaaaacacatagcctaccccttccttgtactatccctatgaggcataattataacaagctccatctgcctacgacaaacagacctaaaatcgctcattgcatactcttcaatcagccacatagccctcgtagtaacagccattctcatccaaaccccctgaagcttcaccggcgcagtcattctcataatcgcccacgggcttacatcctcattactattctgcctagcaaactcaaactacgaacgcactcacagtcgcatcataatcctctctcaaggacttcaaactctactcccactaatagctttttgatgacttctagcaagcctcgctaacctcgccttaccccccactattaacctactgggagaactctctgtgctagtaaccacgttctcctgatcaaatatcactctcctacttacaggactcaacatactagtcacagccctatactccctctacatatttaccacaacacaatggggctcactcacccaccacattaacaacataaaaccctcattcacacgagaaaacaccctcatgttcatacacctatcccccattctcctcctatccctcaaccccgacatcattaccgggttttcctcttgtaaatatagtttaaccaaaacatcagattgtgaatctgacaacagaggcttacgaccccttatttaccgagaaagctcacaagaactgctaactcatgcccccatgtctaacaacatggctttctcaacttttaaaggataacagctatccattggtcttaggccccaaaaattttggtgcaactccaaataaaagtaataaccatgcacactactataaccaccctaaccctgacttccctaattccccccatccttaccaccctcgttaaccctaacaaaaaaaactcatacccccattatgtaaaatccattgtcgcatccacctttattatcagtctcttccccacaacaatattcatgtgcctagaccaagaagttattatctcgaactgacactgagccacaacccaaacaacccagctctccctaagcttcaaactagactacttctccataatattcatccctgtagcattgttcgttacatggtccatcatagaattctcactgtgatatataaactcagacccaaacattaatcagttcttcaaatatctactcatcttcctaattaccatactaatcttagttaccgctaacaacctattccaactgttcatcggctgagagggcgtaggaattatatccttcttgctcatcagttgatgatacgcccgagcagatgccaacacagcagccattcaagcaatcctatacaaccgtatcggcgatatcggtttcatcctcgccttagcatgatttatcctacactccaactcatgagacccacaacaaatagcccttctaaacgctaatccaagcctcaccccactactaggcctcctcctagcagcagcaggcaaatcagcccaattaggtctccacccctgactcccctcagccatagaaggccccaccccagtctcagccctactccactcaagcactatagttgtagcaggaatcttcttactcatccgcttccaccccctagcagaaaatagcccactaatccaaactctaacactatgcttaggcgctatcaccactctgttcgcagcagtctgcgcccttacacaaaatgacatcaaaaaaatcgtagccttctccacttcaagtcaactaggactcataatagttacaatcggcatcaaccaaccacacctagcattcctgcacatctgtacccacgccttcttcaaagccatactatttatgtgctccgggtccatcatccacaaccttaacaatgaacaagatattcgaaaaataggaggactactcaaaaccatacctctcacttcaacctccctcaccattggcagcctagcattagcaggaatacctttcctcacaggtttctactccaaagaccacatcatcgaaaccgcaaacatatcatacacaaacgcctgagccctatctattactctcatcgctacctccctgacaagcgcctatagcactcgaataattcttctcaccctaacaggtcaacctcgcttccccacccttactaacattaacgaaaataaccccaccctactaaaccccattaaacgcctggcagccggaagcctattcgcaggatttctcattactaacaacatttcccccgcatcccccttccaaacaacaatccccctctacctaaaactcacagccctcgctgtcactttcctaggacttctaacagccctagacctcaactacctaaccaacaaacttaaaataaaatccccactatgcacattttatttctccaacatactcggattctaccctagcatcacacaccgcacaatcccctatctaggccttcttacgagccaaaacctgcccctactcctcctagacctaacctgactagaaaagctattacctaaaacaatttcacagcaccaaatctccacctccatcatcacctcaacccaaaaaggcataattaaactttacttcctctctttcttcttcccactcatcctaaccctactcctaatcacataacctattcccccgagcaatctcaattacaatatatacaccaacaagcaatgttcaaccagtaactactactaatcaacgcccataatcatacaaagcccccgcaccaataggatcctcccgaatcaaccctgacccctctccttcataaattattcagcttcctacactattaaagtttaccacaaccaccaccccatcatactctttcacccacagcaccaatcctacctccatcgctaaccccactaaaacactcaccaagacctcaacccctgacccccatgcctcaggatactcctcaatagccatcgctgtagtatatccaaagacaaccatcattccccctaaataaattaaaaaaactattaaacccatataacctcccccaaaattcagaataataacacacccgaccacaccactaacaatcaatactaaacccccataaataggagaaggcttagaagaaaaccccacaaaccccattactaaacccacactcaacagaaacaaagcatacatcattattctcgcacggactacaaccacgaccaatgatatgaaaaaccatcgttgtatttcaactacaagaacaccaatgaccccaatacgcaaaactaaccccctaataaaattaattaaccactcattcatcgacctccccaccccatccaacatctccgcatgatgaaacttcggctcactccttggcgcctgcctgatcctccaaatcaccacaggactattcctagccatgcactactcaccagacgcctcaaccgccttttcatcaatcgcccacatcactcgagacgtaaattatggctgaatcatccgctaccttcacgccaatggcgcctcaatattctttatctgcctcttcctacacatcgggcgaggcctatattacggatcatttctctactcagaaacctgaaacatcggcattatcctcctgcttgcaactatagcaacagccttcataggctatgtcctcccgtgaggccaaatatcattctgaggggccacagtaattacaaacttactatccgccatcccatacattgggacagacctagttcaatgaatctgaggaggctactcagtagacagtcccaccctcacacgattctttacctttcacttcatcttgcccttcattattgcagccctagcagcactccacctcctattcttgcacgaaacgggatcaaacaaccccctaggaatcacctcccattccgataaaatcaccttccacccttactacacaatcaaagacgccctcggcttacttctcttccttctctccttaatgacattaacactattctcaccagacctcctaggcgacccagacaattataccctagccaaccccttaaacacccctccccacatcaagcccgaatgatatttcctattcgcctacacaattctccgatccgtccctaacaaactaggaggcgtccttgccctattactatccatcctcatcctagcaataatccccatcctccatatatccaaacaacaaagcataatatttcgcccactaagccaatcactttattgactcctagccgcagacctcctcattctaacctgaatcggaggacaaccagtaagctacccttttaccatcattggacaagtagcatccgtactatacttcacaacaatcctaatcctaataccaactatctccctaattgaaaacaaaatactcaaatgggcctgtccttgtagtataaactaatacaccagtcttgtaaaccggagatgaaaacctttttccaaggacaaatcagagaaaaagtctttaactccaccattagcacccaaagctaagattctaatttaaactattctctgttctttcatggggaagcagatttgggtaccacccaagtattgactcacccatcaacaaccgctatgtatttcgtacattactgccagccaccatgaatattgtacggtaccataaatacttgaccacctgtagtacataaaaacccaatccacatcaaaaccccctccccatgcttacaagcaagtacagcaatcaaccctcaactatcacacatcaactgcaactccaaagccacccctcacccactaggataccaacaaacctacccacccttaacagtacatagtacataaagccatttaccgtacatagcacattacagtcaaatcccttctcgtccccatggatgacccccctcagataggggtcccttgaccaccatcctccgtgaaatcaatatcccgcacaagagtgctactctcctcgctccgggcccataacacttgggggtagctaaagtgaactgtatccgacatctggttcctacttcagggccataaagcctaaatagcccacacgttccccttaaataagacatcacgatg

SEQ ID NO: 250 - DNA, 16573 bp, Homo sapiens mitochondrial
  3111: "n" refers to a nucleotide at position 3107 of the Cambridge Reference Sequence (CRS, Anderson et al. 1981 Nature 290:457-465), later determined to be absent from the human mtDNA sequence according to the revised CRS (rCRS, Andrews et al. 1999 Nature Genetics 23:147); "n" therefore represents a single nucleotide deletion at a position corresponding to nucleotide 3107 of SEQ ID NO:1 as provided herein.
gatcacaggtctatcaccctattaaccactcacgggagctctccatgcatttggtattttcgtctggggggtgtgcacgcgatagcattgcgagacgctggagccggagcaccctatgtcgcagtatctgtctttgattcctgcctcatcccattatttatcgcacctacgttcaatattacaggcgaacatacctactaaagtgtgttaattaattaatgcttgtaggacataataataacaattgaatgtctgcacagccgctttccacacagacatcataacaaaaaatttccaccaaaccccccctccccccccgcttctggccacagcacttaaacacatctctgccaaaccccaaaaacaaagaaccctaacaccagcctaaccagatttcaaattttatcttttggcggtatgcacttttaacagtcaccccccaactaacacattattttcccctcccactcccatactactaatctcatcaatacaacccccgcccatcctacccagcacacacacaccgctgctaaccccataccccgaaccaaccaaaccccaaagacaccccccaccagtttatgtagcttacctcctcaaagcaatacactgaaaatgtttagacgggctcacatcaccccataaacaaataggtttggtcctagcctttctattagctcttagtaagattacacatgcaagcatccccattccagtgagttcaccctctaaatcaccacgatcaaaagggacaagcatcaagcacgcagcaatgcagctcaaaacgcttagcctagccacacccccacgggaaacagcagtgattaacctttagcaataaacgaaagtttaactaagctatactaaccccagggttggtcaatttcgtgccagccaccgcggtcacacgattaacccaagtcaatagaagccggcgtaaagagtgttttagatcaccccctccccaataaagctaaaactcacctgagttgtaaaaaactccagttgacacaaaatagactacgaaagtggctttaacatatctgaacacacaatagctaagacccaaactgggattagataccccactatgcttagccctaaacctcaacagttaaatcaacaaaactgctcgccagaacactacgagccacagcttaaaactcaaaggacctggcggtgcttcatatccctctagaggagcctgttctgtaatcgataaaccccgatcaacctcaccacctcttgctcagcctatataccgccatcttcagcaaaccctgatgaaggctacaaagtaagcgcaagtacccacgtaaagacgttaggtcaaggtgtagcccatgaggtggcaagaaatgggctacattttctaccccagaaaactacgatagcccttatgaaacttaagggtcgaaggtggatttagcagtaaactgagagtagagtgcttagttgaacagggccctgaagcgcgtacacaccgcccgtcaccctcctcaagtatacttcaaaggacatttaactaaaacccctacgcatttatatagaggagacaagtcgtaacatggtaagtgtactggaaagtgcacttggacaaaccagagtgtagcttaacacaaagcacccaacttacacttaggagatttcaacttaacttgaccgctctgagctaaacctagccccaaacccactccaccttactaccagacaaccttagccaaaccatttacccaaataaagtataggcgatagaaattgaaacctggcgcaatagatatagtaccgcaagggaaagatgaaaaattataaccaagcataatatagcaaggactaacccctataccttctgcataatgaattaactagaaataactttgcaaggagaaccaaagctaagacccccgaaaccagacgagctacctaagaacagctaaaagagcacacccgtctatgtagcaaaatagtgggaagatttataggtagaggcgacaaacctaccgagcctggtgatagctggttgtccaagatagaatcttagttcaactttaaatttgcccacagaaccctctaaatccccttgtaaatttaactgttagtccaaagaggaacagctctttggacactaggaaaaaaccttgtagagagagtaaaaaatttaacacccatagtaggcctaaaagcagccaccaattaagaaagcgttcaagctcaacacccactacctaaaaaatcccaaacatataactgaactcctcacacccaattggaccaatctatcaccctatagaagaactaatgttagtataagtaacatgaaaacattctcctccgcataagcctgcgtcagattaaaacactgaactgacaattaacagcccaatatctacaatcaaccaacaagtcattattaccctcactgtcaacccaacacaggcatgctcataaggaaaggttaaaaaaagtaaaaggaactcggcaaatcttaccccgcctgtttaccaaaaacatcacctctagcatcaccagtattagaggcaccgcctgcccagtgacacatgtttaacggccgcggtaccctaaccgtgcaaaggtagcataatcacttgttccttaaatagggacctgtatgaatggctccacgagggttcagctgtctcttacttttaaccagtgaaattgacctgcccgtgaagaggcgggcatgacacagcaagacgagaagaccctatggagctttaatttattaatgcaaacagtacctaacaaacccacaggtcctaaactaccaaacctgcattaaaaatttcggttggggcgacctcggagcagaacccaacctccgagcagtacatgctaagacttcaccagtcaaagcgaactactatactcaattgatccaataacttgaccaacggaacaagttaccctagggataacagcgcaatcctattctagagtccatatcaacaatagggtttacgacctcgatgttggatcaggacatcccgatggtgcagccgctattaaaggttcgtttgttcaacgattaaagtcctacgtgatctgagttcagaccggagtaatccaggtcggtttctatctacnttcaaattcctccctgtacgaaaggacaagagaaataaggcctacttcacaaagcgccttcccccgtaaatgatatcatctcaacttagtattatacccacacccacccaagaacagggtttgttaagatggcagagcccggtaatcgcataaaacttaaaactttacagtcagaggttcaattcctcttcttaacaacatacccatggccaacctcctactcctcattgtacccattctaatcgcaatggcattcctaatgcttaccgaacgaaaaattctaggctatatacaactacgcaaaggccccaacgttgtaggcccctacgggctactacaacccttcgctgacgccataaaactcttcaccaaagagcccctaaaacccgccacatctaccatcaccctctacatcaccgccccgaccttagctctcaccatcgctcttctactatgaacccccctccccatacccaaccccctggtcaacctcaacctaggcctcctatttattctagccacctctagcctagccgtttactcaatcctctgatcagggtgagcatcaaactcaaactacgccctgatcggcgcactgcgagcagtagcccaaacaatctcatatgaagtcaccctagccatcattctactatcaacattactaataagtggctcctttaacctctccacccttatcacaacacaagaacacctctgattactcctgccatcatgacccttggccataatatgatttatctccacactagcagagaccaaccgaacccccttcgaccttgccgaaggggagtccgaactagtctcaggcttcaacatcgaatacgccgcaggccccttcgccctattcttcatagccgaatacacaaacattattataataaacaccctcaccactacaatcttcctaggaacaacatatgacgcactctcccctgaactctacacaacatattttgtcaccaagaccctacttctaacctccctgttcttatgaattcgaacagcatacccccgattccgctacgaccaactcatacacctcctatgaaaaaacttcctaccactcaccctagcattacttatatgacatgtctccatacccattacaatctccagcattccccctcaaacctaagaaatatgtctgataaaagagttactttgatagagtaaataataggagcttaaacccccttatttctaggactatgagaatcgaacccatccctgagaatccaaaattctccgtgccacctatcacaccccatcctaaagtaaggtcagctaaataagctatcgggcccataccccgaaaatgttggttatacccttcccgtactaattaatcccctggcccaacccgtcatctactctaccatctttgcaggcacactcatcacagcgctaagctcgcactgattttttacctgagtaggcctagaaataaacatgctagcttttattccagttctaaccaaaaaaataaaccctcgttccacagaagctgccatcaagtatttcctcacgcaagcaaccgcatccataatccttctaatagctatcctcttcaacaatatactctccggacaatgaaccataaccaatactaccaatcaatactcatcattaataatcataatggctatagcaataaaactaggaatagccccctttcacttctgagtcccagaggttacccaaggcacccctctgacatccggcctgcttcttctcacatgacaaaaactagcccccatctcaatcatataccaaatctctccctcactagacgtaagccttctcctcactctctcaatcttatccatcatagcaggcagttgaggtggattaaaccaaacccagctacgcaaaatcttagcatactcctcaattacccacataggatgaataatagcagttctaccgtacaaccctaacataaccattcttaatttaactatttatattatcctaactactaccgcattcctactactcaacttaaactccagcaccacgaccctactactatctcgcacctgaaacaagctaacatgactaacacccttaattccatccaccctcctctccctaggaggcctgcccccgctaaccggctttttgcccaaatgggccattatcgaagaattcacaaaaaacaatagcctcatcatccccaccatcatagccaccatcaccctccttaacctctacttctacctacgcctaatctactccacctcaatcacactactccccatatctaacaacgtaaaaataaaatgacagtttgaacatacaaaacccaccccattcctccccacactcatcgcccttaccacgctactcctacctatctccccttttatactaataatcttatagaaatttaggttaaatacagaccaagagccttcaaagccctcagtaagttgcaatacttaatttctgtaacagctaaggactgcaaaaccccactctgcatcaactgaacgcaaatcagccactttaattaagctaagcccttactagaccaatgggacttaaacccacaaacacttagttaacagctaagcaccctaatcaactggcttcaatctacttctcccgccgccgggaaaaaaggcgggagaagccccggcaggtttgaagctgcttcttcgaatttgcaattcaatatgaaaatcacctcggagctggtaaaaagaggcctaacccctgtctttagatttacagtccaatgcttcactcagccattttacctcacccccactgatgttcgccgaccgttgactattctctacaaaccacaaagacattggaacactatacctattattcggcgcatgagctggagtcctaggcacagctctaagcctccttattcgagccgaactgggccagccaggcaaccttctaggtaacgaccacatctacaacgttatcgtcacagcccatgcatttgtaataatcttcttcatagtaatacccatcataatcggaggctttggcaactgactagttcccctaataatcggtgcccccgatatggcgtttccccgcataaacaacataagcttctgactcttacctccctctctcctactcctgctcgcatctgctatagtggaggccggagcaggaacaggttgaacagtctaccctcccttagcagggaactactcccaccctggagcctccgtagacctaaccatcttctccttacacctagcaggtgtctcctctatcttaggggccatcaatttcatcacaacaattatcaatataaaaccccctgccataacccaataccaaacgcccctcttcgtctgatccgtcctaatcacagcagtcctacttctcctatctctcccagtcctagctgctggcatcactatactactaacagaccgcaacctcaacaccaccttcttcgaccccgccggaggaggagaccccattctataccaacacctattctgatttttcggtcaccctgaagtttatattcttatcctaccaggcttcggaataatctcccatattgtaacttactactccggaaaaaaagaaccatttggatacataggtatggtctgagctatgatatcaattggcttcctagggtttatcgtgtgagcacaccatatatttacagtaggaatagacgtagacacacgagcatatttcacctccgctaccataatcatcgctatccccaccggcgtcaaagtatttagctgactcgccacactccacggaagcaatatgaaatgatctgctgcagtgctctgagccctaggattcatctttcttttcaccgtaggtggcctgactggcattgtattagcaaactcatcactagacatcgtactacacgacacgtactacgttgtagctcacttccactatgtcctatcaataggagctgtatttgccatcataggaggcttcattcactgatttcccctattctcaggctacaccctagaccaaacctacgccaaaatccatttcactatcatattcatcggcgtaaatctaactttcttcccacaacactttctcggcctatccggaatgccccgacgttactcggactaccccgatgcatacaccacatgaaacatcctatcatctgtaggctcattcatttctctaacagcagtaatattaataattttcatgatttgagaagccttcgcttcgaagcgaaaagtcctaatagtagaagaaccctccataaacctggagtgactatatggatgccccccaccctaccacacattcgaagaacccgtatacataaaatctagacaaaaaaggaaggaatcgaaccccccaaagctggtttcaagccaaccccatggcctccatgactttttcaaaaaggtattagaaaaaccatttcataactttgtcaaagttaaattataggctaaatcctatatatcttaatggcacatgcagcgcaagtaggtctacaagacgctacttcccctatcatagaagagcttatcacctttcatgatcacgccctcataatcattttccttatctgcttcctagtcctgtatgcccttttcctaacactcacaacaaaactaactaatactaacatctcagacgctcaggaaatagaaaccgtctgaactatcctgcccgccatcatcctagtcctcatcgccctcccatccctacgcatcctttacataacagacgaggtcaacgatccctcccttaccatcaaatcaattggccaccaatggtactgaacctacgagtacaccgactacggcggactaatcttcaactcctacatacttcccccattattcctagaaccaggcgacctgcgactccttgacgttgacaatcgagtagtactcccgattgaagcccccattcgtataataattacatcacaagacgtcttgcactcatgagctgtccccacattaggcttaaaaacagatgcaattcccggacgtctaaaccaaaccactttcaccgctacacgaccgggggtatactacggtcaatgctctgaaatctgtggagcaaaccacagtttcatgcccatcgtcctagaattaattcccctaaaaatctttgaaatagggcccgtatttaccctatagcaccccctctaccccctctagagcccactgtaaagctaacttagcattaaccttttaagttaaagattaagagaaccaacacctctttacagtgaaatgccccaactaaatactaccgtatggcccaccataattacccccatactccttacactattcctcatcacccaactaaaaatattaaacacaaactaccacctacctccctcaccaaagcccataaaaataaaaaattataacaaaccctgagaaccaaaatgaacgaaaatctgttcgcttcattcattgcccccacaatcctaggcctacccgccgcagtactgatcattctatttccccctctattgatccccacctccaaatatctcatcaacaaccgactaatcaccacccaacaatgactaatcaaactaacctcaaaacaaataataaccatacacaacactaaaggacgaacctgatctcttatactagtatccttaatcatttttattgccacaactaacctcctcggactcctgcctcactcatttacaccaaccacccaactatctataaacctagccatggccatccccttatgagcgggcgcagtgattataggctttcgctctaagattaaaaatgccctagcccacttcttaccacaaggcacacctacaccccttatccccatactagttattatcgaaaccatcagcctactcattcaaccaatagccctggccgtacgcctaaccgctaacattactgcaggccacctactcatgcacctaattggaagcgccaccctagcaatatcaaccattaaccttccctctacacttatcatcttcacaattctaattctactgactatcctagaaatcgctgtcgccttaatccaagcctacgttttcacacttctagtaagcctctacctgcacgacaacacataatgacccaccaatcacatgcctatcatatagtaaaacccagcccatgacccctaacaggggccctctcagccctcctaatgacctccggcctagccatgtgatttcacttccactccataacgctcctcatactaggcctactaaccaacacactaaccatataccaatgatggcgcgatgtaacacgagaaagcacataccaaggccaccacacaccacctgtccaaaaaggccttcgatacgggataatcctatttattacctcagaagtttttttcttcgcaggatttttctgagccttttaccactccagcctagcccctaccccccaattaggagggcactggcccccaacaggcatcaccccgctaaatcccctagaagtcccactcctaaacacatccgtattactcgcatcaggagtatcaatcacctgagctcaccatagtctaatagaaaacaaccgaaaccaaataattcaagcactgcttattacaattttactgggtctctattttaccctcctacaagcctcagagtacttcgagtctcccttcaccatttccgacggcatctacggctcaacattttttgtagccacaggcttccacggacttcacgtcattattggctcaactttcctcactatctgcttcatccgccaactaatatttcactttacatccaaacaccactttggcttcgaagccgccgcctgatactggcattttgtagatgtggtttgactatttctgtatgtctccatctattgatgagggtcttactcttttagtataaatagtaccgttaacttccaattaactagttttgacaacattcaaaaaagagtaataaacttcgccttaattttaataatcaacaccctcctagccttactactaataattattacattttgactaccacaactcaacggctacatagaaaaatccaccccttacgagtgcggcttcgaccctatatcccccgcccgcgtccctttctccataaaattcttcttagtagctattaccttcttattatttgatctagaaattgccctccttttacccctaccatgagccctacaaacaactaacctgccactaatagttatgtcatccctcttattaatcatcatcctagccctaagtctggcctatgagtgactacaaaaaggattagactgaaccgaattggtatatagtttaaacaaaacgaatgatttcgactcattaaattatgataatcatatctaccaaatgcccctcatttacataaatattatactagcatttaccatctcacttctaggaatactagtatatcgctcacacctcatatcctccctactatgcctagaaggaataatactatcgctgttcattatagctactctcataaccctcaacacccactccctcttagccaatattgtgcctattgccatactagtctttgccgcctgcgaagcagcggtgggcctagccctactagtctcaatctccaacacatatggcctagactacgtacataacctaaacctactccaatgctaaaactaatcgtcccaacaattatattactaccactgacatgactttccaaaaaacacataatttgaatcaacacaaccacccacagcctaattattagcatcatccctctactattttttaaccaaatcaacaacaacctatttagctgttccccaaccttttcctccgaccccctaacaacccccctcctaatactaactacctgactcctacccctcacaatcatggcaagccaacgccacttatccagtgaaccactatcacgaaaaaaactctacctctctatactaatctccctacaaatctccttaattataacattcacagccacagaactaatcatattttatatcttcttcgaaaccacacttatccccaccttggctatcatcacccgatgaggcaaccagccagaacgcctgaacgcaggcacatacttcctattctacaccctagtaggctcccttcccctactcatcgcactgatttacactcacaacaccctaggctcactaaacattctactactcactctcactgcccaagaactatcaaactcctgagccaacaacttaatatgactagcttacacaatagcttttatagtaaagatacctctttacggactccacttatgactccctaaagcccatgtcgaagcccccatcgctgggtcaatagtacttgccgcagtactcttaaaactaggcggctatggtataatacgcctcacactcattctcaaccccctgacaaaacacatagcctaccccttccttgtactatccctatgaggcataattataacaagctccatctgcctacgacaaacagacctaaaatcgctcattgcatactcttcaatcagccacatagccctcgtagtaacagccattctcatccaaaccccctgaagcttcaccggcgcagtcattctcataatcgcccacggacttacatcctcattactattctgcctagcaaactcaaactacgaacgcactcacagtcgcatcataatcctctctcaaggacttcaaactctactcccactaatagctttttgatgacttctagcaagcctcgctaacctcgccttaccccccactattaacctactgggagaactctctgtgctagtaaccacgttctcctgatcaaatatcactctcctacttacaggactcaacatactagtcacagccctatactccctctacatatttaccacaacacaatggggctcactcacccaccacattaacaacataaaaccctcattcacacgagaaaacaccctcatgttcatacacctatcccccattctcctcctatccctcaaccccgacatcattaccgggttttcctcttgtaaatatagtttaaccaaaacatcagattgtgaatctgacaacagaggcttacgaccccttatttaccgagaaagctcacaagaactgctaactcatgcccccatgtctaacaacatggctttctcaacttttaaaggataacagctatccattggtcttaggccccaaaaattttggtgcaactccaaataaaagtaataaccatgcacactactataaccaccctaaccctgacttccctaattccccccatccttaccaccctcgttaaccctaacaaaaaaaactcatacccccattatgtaaaatccattgtcgcatccacctttattatcagtctcttccccacaacaatattcatgtgcctagaccaagaagttattatctcgaactgacactgagccacaacccaaacaacccagctctccctaagcttcaaactagactacttctccataatattcatccctgtagcattgttcgttacatggtcaatcatagaattctcactgtgatatataaactcagacccaaacattaatcagttcttcaaatatctactcatcttcctaattaccatactaatcttagttaccgctaacaacctattccaactgttcatcggctgagagggcgtaggaattatatccttcttgctcatcagttgatgatacgcccgagcagatgccaacacagcagccattcaagcaatcctatacaaccgtatcggcgatatcggtttcatcctcgccttagcatgatttatcctacactccaactcatgagacccacaacaaatagcccttctaaacgctaatccaagcctcaccccactactaggcctcctcctagcagcagcaggcaaatcagcccaattaggtctccacccctgactcccctcagccatagaaggccccaccccagtctcagccctactccactcaagcactatagttgtagcaggaatcttcttactcatccgcttccaccccctagcagaaaatagcccactaatccaaactctaacactatgcttaggcgctatcaccactctgttcgcagcagtctgcgcccttacacaaaatgacatcaaaaaaatcgtagccttctccacttcaagtcaactaggactcataatagttacaatcggcatcaaccaaccacacctagcattcctgcacatctgtacccacgccttcttcaaagccatactatttatgtgctccggatccatcatccacaaccttaacaatgaacaagatattcgaaaaataggaggactactcaaaaccatacctctcacttcaacctccctcaccattggcagcctagcattagcaggaatacctttcctcacaggtttctactccaaagaccacatcatcgaaaccgcaaacatatcatacacaaacgcctgagccctatctattactctcatcgctacctccctgacaagcgcctatagcactcgaataattcttctcaccctaacaggtcaacctcgcttccccacccttactaacattaacgaaaataaccccaccctactaaaccccattaaacgcctggcagccggaagcctattcgcaggatttctcattactaacaacatttcccccgcatcccccttccaaacaacaatccccctctacctaaaactcacagccctcgctgtcactttcctaggacttctaacagccctagacctcaactacctaaccaacaaacttaaaataaaatccccactatgcacattttatttctccaacatactcggattctaccctagcatcacacaccgcacaatcccctatctaggccttcttacgagccaaaacctgcccctactcctcctagacctaacctgactagaaaagctattacctaaaacaatttcacagcaccaaatctccacctccatcatcacctcaacccaaaaaggcataattaaactttacttcctctctttcttcttcccactcatcctaaccctactcctaatcacataacctattcccccgagcaatctcaattacaatatatacaccaacaaacaatgttcaaccagtaactactactaatcaacgcccataatcatacaaagcccccgcaccaataggatcctcccgaatcaaccctgacccctctccttcataaattattcagcttcctacactattaaagtttaccacaaccaccaccccatcatactctttcacccacagcaccaatcctacctccatcgctaaccccactaaaacactcaccaagacctcaacccctgacccccatgcctcaggatactcctcaatagccatcgctgtagtatatccaaagacaaccatcattccccctaaataaattaaaaaaactattaaacccatataacctcccccaaaattcagaataataacacacccgaccacaccgctaacaatcaatactaaacccccataaataggagaaggcttagaagaaaaccccacaaaccccattactaaacccacactcaacagaaacaaagcatacatcattattctcgcacggactacaaccacgaccaatgatatgaaaaaccatcgttgtatttcaactacaagaacaccaatgaccccaatacgcaaaattaaccccctaataaaattaattaaccactcattcatcgacctccccaccccatccaacatctccgcatgatgaaacttcggctcactccttggcgcctgcctgatcctccaaatcaccacaggactattcctagccatacactactcaccagacgcctcaaccgccttttcatcaatcgcccacatcactcgagacgtaaattatggctgaatcatccgctaccttcacgccaatggcgcctcaatattctttatctgcctcttcctacacatcgggcgaggcctatattacggatcatttctctactcagaaacctgaaacatcggcattatcctcctgcttgcaactatagcaacagccttcataggctatgtcctcccgtgaggccaaatatcattctgaggggccacagtaattacaaacttactatccgccatcccatacattgggacagacctagttcaatgaatctgaggaggctactcagtagacagtcccaccctcacacgattctttacctttcacttcatcttgcccttcattattgcagccctagcagcactccacctcctattcttgcacgaaacgggatcaaacaaccccctaggaatcacctcccattccgataaaatcaccttccacccttactacacaatcaaagacgccctcggcttacttctcttcattctctccttaatgacattaacactattctcaccagacctcctaggcgacccagacaattataccctagccaaccccttaaacacccctccccacatcaagcccgaatgatatttcctattcgcctacacaattctccgatccgtccctaacaagctaggaggcgtccttgccctattactatccatcctcatcctagcaataatccccatcctccatatatccaaacaacaaagcataatatttcgcccactaagccaatcactttattgactcctagccgcagacctcctcattctaacctgaatcggaggacaaccagtaagctacccttttaccatcattggacaagtagcatccgtactatacttcacaacaatcctaatcctaataccaactatctccctaattgaaaacaaaatactcaaatgggcctgtccttgtagtataaactaatacaccagtcttgtaaaccgaagatgaaaacctttttccaaggacaaatcagagaaaaagtctttaactccaccattagcacccaaagctaagattctaatttaaactattctctgttctttcatggggaagcagatttgggtaccacccaagtattgactcacccatcaacaaccgctatgtatctcgtacattactgccagccaccatgaatattgcacggtaccataaatacttgaccacctgtagtacatagaaacccaatccacatcaaaacctcccccccatgcttacaagcaagtacagcaatcaaccctcaactatcacacatcaactgcaactccaaagccacccctcacccactagaataccaacaaacctacccatccttaacagtacatagtacataaagccatttaccgtacatagcacattacagtcaaatcccttctcgtccccatggatgacccccctcagataggggtcccttgaccaccatcctccgtgaaatcaatatcccgcacaagagtgctactctcctcgctccgggcccataacacttgggggtagctaaagtgaactgtatccgacatctggttcctacttcagggccataaagcctaaatagcccacacgttccccttaaataagacatcacgatg

SEQ ID NO: 251 - DNA, 16570 bp, Homo sapiens mitochondrial
  3107: "n" refers to a nucleotide at position 3107 of the Cambridge Reference Sequence (CRS, Anderson et al. 1981 Nature 290:457-465), later determined to be absent from the human mtDNA sequence according to the revised CRS (rCRS, Andrews et al. 1999 Nature Genetics 23:147); "n" therefore represents a single nucleotide deletion at a position corresponding to nucleotide 3107 of SEQ ID NO:1 as provided herein.
gatcacaggtctatcaccctattaaccactcacgggagctctccatgcatttggtattttcgtctggggggtgtgcacgcgatagcattgcgagacgctggagccggagcaccctatgtcgcagtatctgtctttgattcctgcctcatcctattatttatcgcacctacgttcaatattacaggcgaacatacttactaaagtgtgttaattaattaatgcttgtaggacataataataacaattgaatgtctgcacagctgctttccacacagacatcataataaaaaatttccaccaaaccccccctcccccccgcttctggccacagcacttaaacacatctctgccaaaccccaaaaacaaagaaccctaacaccagcctagccagatttcaaattttatcttttggcggtatgcacttttaacagtcaccccccaactaacacattattttcccctcccactcccatactactaatctcatcaatacaacccccgcccatcctacccagcacacacaccgctgctaaccccataccccgaaccaaccaaaccccaaagacaccccccacagtttatgtagcttacctcctcaaagcaatacactgaaaatgtttagacgggctcacatcaccccataaacaaataggtttggtcctagcctttctattagctcttagtaagattacacatgcaagcatccccgttccagtgagttcaccctctaaatcaccacgatcaaaagggacaagcatcaagcacgcagcaatgcagctcaaaacgcttagcctagccacacccccacgggaaacagcagtgattaacctttagcaataaacgaaagtttaactaagctatactaaccccagggttggtcaatttcgtgccagccaccgcggtcacacgattaacccaagtcaatagaagccggcgtaaagagtgttttagatcaccccctccccaataaagctaaaactcacctgagttgtaaaaaactccagttgacacaaaatagactacgaaagtggctttaacatatctgaacacacaatagctaagacccaaactgggattagataccccactatgcttagccctaaacctcaacagttaaatcaacaaaactgctcgccagaacactacgagccacagcttaaaactcaaaggacctggcggtgcttcatatccctctagaggagcctgttctgtaatcgataaaccccgatcaacctcaccacctcttgctcagcctatataccgccatcttcagcaaaccctgatgaaggctacaaagtaagcgcaagtacccacgtaaagacgttaggtcaaggtgtagcccatgaggtggcaagaaatgggctacattttctaccccagaaaactacgatagcccttatgaaacttaagggtcgaaggtggatttagcagtaaactgagagtagagtgcttagttgaacagggccctgaagcgcgtacacaccgcccgtcaccctcctcaagtatacttcaaaggacatttaactaaaacccctacgcatttatatagaggagacaagtcgtaacatggtaagtgtactggaaagtgcacttggacgaaccagagtgtagcttaacacaaagcacccaacttacacttaggagatttcaacttaacttgaccgctctgagctaaacctagccccaaacccactccaccttactaccagacaaccttagccaaaccatttacccaaataaagtataggcgatagaaattgaaacctggcgcaatagatatagtaccgcaagggaaagatgaaaaattataaccaagcataatatagcaaggactaacccctataccttctgcataatgaattaactagaaataactttgcaaggagagccaaagctaagacccccgaaaccagacgagctacctaagaacagctaaaagagcacacccgtctatgtagcaaaatagtgggaagatttataggtagaggcgacaaacctaccgagcctggtgatagctggttgtccaagatagaatcttagttcaactttaaatttgcccacagaaccctctaaatccccttgtaaatttaactgttagtccaaagaggaacagctctttggacactaggaaaaaaccttgtagagagagtaaaaaatttaacacccatagtaggcctaaaagcagccaccaattaagaaagcgttcaagctcaacactcactacctaaaaaatcccaaacatataactgaactcctcacacccaattggaccaatctatcaccctatagaagaactaatgttagtataagtaacatgaaaacattctcctccgcataagcctgcgtcagattaaaacactgaactgacaattaacagcccaatatctacaatcaaccaacaagtcattattaccctcactgtcaacccaacacaggcatgctcataaggaaaggttaaaaaaagtaaaaggaactcggcaaatcttaccccgcctgtttaccaaaaacatcacctctagcatcaccagtattagaggcaccgcctgcccagtgacacatgtttaacggccgcggtaccctaaccgtgcaaaggtagcataatcacttgttccttaaatagggacctgtatgaatggctccacgagggttcagctgtctcttacttttaaccagtgaaattgacctgcccgtgaagaggcgggcatgacacagcaagacgagaagaccctatggagctttaatttattaatgcaaacagtacctaacaaacccacaggtcctaaactaccaaacctgcattaaaaatttcggttggggcgacctcggagcagaacccaacctccgagcagtacatgctaagacttcaccagtcaaagcgaactactatactcaattgatccaataacttgaccaacggaacaagttaccctagggataacagcgcaatcctattctagagtccatatcaacaatagggtttacgacctcgatgttggatcaggacatcccgatggtgcagccgctattaaaggttcgtttgttcaacgattaaagtcctacgtgatctgagttcagaccggagtaatccaggtcggtttctatctacnttcaaattcctccctgtacgaaaggacaagagaaataaggcctacttcacaatagcgccttcccccgtaaatgatatcatctcaacttagtattatacccacacccacccaagaacagggtttgttaagatggcagagcccggtaatcgcataaaacttaaaactttacagtcagaggttcaattcctcttcttaacaacatacccatggccaacctcctactcctcattgtacccattctaatcgcaatgacattcctaatgcttaccgaacgaaaaattctaggctatatacaactacgcaaaggccccaacgttgtaggcccctacgggctactacaacccttcgctgacgccataaaactcttcaccaaagagcccctaaaacccgccacatctaccatcaccctctacatcaccgccccgaccttagctctcaccatcgctcttctactatgaacccccctccccatacccaaccccctagtcaacctcaacctaggcctcctatttattctagccacctctagcctagccgtttactcaatcctctgatcagggtgagcatcaaactcaaactacgccctgatcggcgcactgcgagcagtagcccaaacaatctcatatgaagtcaccctagccatcattctactatcaacattactaataagtggctcctttaacctctccacccttatcacaacacaagaacacctctgattactcctgccatcatgacccttggccataatatgatttatctccacactagcagagaccaaccgaacccccttcgaccttgccgaaggggagtccgaactagtctcaggcttcaacatcgaatacgccgcaggccccttcgccctattcttcatagccgaatacacaaacattattataataaacaccctcaccactacaatcttcctaggaacaacatatgacgcactctcccctgaactctacacaacatattttgtcaccaagaccctacttctaacctccctgttcttatgaattcgaacagcatacccccgattccgctacgaccaactcatacacctcctatgaaaaaacttcctaccactcaccctagcattacttatatgatatgtctccatacccattacaatctccagcattccccctcaaacctaagaaatatgtctgataaaagagttactttgatagagtaaataataggagcttaaacccccttatttctaggactatgagaatcgaacccatccctgagaatccaaaattctccgtgccacctatcacaccccatcctaaagtaaggtcagctaaataagctatcgggcccataccccgaaaatgttggttatacccttcccgtactaattaatcccctggcccaacccgtcatctactctaccatctttgcaggcacactcatcacagcgctaagctcgcactgattttttacctgagcaggcctagaaataaacatgctagcttttattccagttctaaccaaaaaaataaaccctcgttccacagaagctgccatcaagtatttcctcacgcaagcaaccgcatccataatccttctaatagctatcctcttcaacaatatactctccggacaatgaaccataaccaatactaccaatcaatactcatcattaataatcataatggctatagcaataaaactaggaatagccccctttcacttctgagtcccagaggttacccaaggcacccctctgacatccggcctgcttcttctcacatgacaaaaactagcccccatctcaatcatataccaaatctctccctcactaaacgtaagccttctcctcactctctcaatcttatccatcatagcaggcagttgaggtggattaaaccaaacccaactacgcaaaatcttagcatactcctcaattacccacataggatgaataatagcagtcctaccgtacaaccctaacataaccattcttaatttaactatttatattatcctaactactaccgcattcctactactcaacttaaactccagcaccacgaccctactactatctcgcacctgaaacaagctaacatgactaacacccttaattccatccaccctcctctccctaggaggcctgcccccgctaaccggctttttgcccaaatgggccattatcgaagaattcacaaaaaacaatagcctcatcatccccaccatcatagccaccatcaccctccttaacctctacttctacctacgcctaatctactccacctcaatcacactactccccatatctaacaacgtaaaaataaaatgacagtttgaacatacaaaacccaccccattcctccccacactcatcgcccttaccacgctactcctacctatctccccttttatactaataatcttatagaaatttaggttaaatacagaccaagagccttcaaagccctcagtaagttgcaatacttaatttctgtaacagctaaggactgcaaaaccccactctgcatcaactgaacgcaaatcagccactttaattaagctaagcccttactagaccaatgggacttaaacccacaaacacttagttaacagctaagcaccctaatcaactggcttcaatctacttctcccgccgccgggaaaaaaggcgggagaagccccggcaggtttgaagctgcttcttcgaatttgcaattcaatatgaaaatcacctcggagctggtaaaaagaggcctaacccctgtctttagatttacagtccaatgcttcactcagccattttacctcacccccactgatgttcgccgaccgttgactattctctacaaaccacaaagacattggaacactatacctattattcggcgcatgagctggagtcctaggcacagctctaagcctccttattcgagccgagctgggccagccaggcaaccttctaggtaacgaccacatctacaacgttatcgtcacagcccatgcatttgtaataatcttcttcatagtaatacccatcataatcggaggctttggcaactgactagttcccctaataatcggtgcccccgatatggcgtttccccgcataaacaacataagcttctgactcttacctccctctctcctactcctgctcgcatctgctatagtggaggccggagcaggaacaggttgaacagtctaccctcccttagcagggaactactcccaccctggagcctccgtagacctaaccatcttctccttacacctagcaggtgtctcctctatcttaggggccatcaatttcatcacaacaattatcaatataaaaccccctgccataacccaataccaaacgcccctcttcgtctgatccgtcctaatcacagcagtcctacttctcctatctctcccagtcctagctgctggcatcactatactactaacagaccgcaacctcaacaccaccttcttcgaccccgccggaggaggagaccccattctataccaacacctattctgatttttcggtcaccctgaagtttatattcttatcctaccaggcttcggaataatctcccatattgtaacttactactccggaaaaaaagaaccatttggatacataggtatggtctgagctatgatatcaattggcttcctagggtttatcgtgtgagcacaccatatatttacagtaggaatagacgtagacacacgagcatatttcacctccgctaccataatcatcgctatccccaccggcgtcaaagtatttagctgactcgccacactccacggaagcaatatgaaatgatctgctgcagtgctctgagccctaggattcatctttcttttcaccgtaggtggcctgactggcattgtattagcaaactcatcactagacatcgtactacacgacacgtactacgttgtagctcacttccactatgtcctatcaataggagctgtatttgccatcataggaggcttcattcactgatttcccctattctcaggctacaccctagaccaaacctacgccaaaatccatttcactatcatattcatcggcgtaaatctaactttcttcccacaacactttctcggcctatccggaatgccccgacgttactcggactaccccgatgcatacaccacatgaaacatcctatcatctgtaggctcattcatttctctaacagcagtaatattaataattttcatgatttgagaagccttcgcttcgaagcgaaaagtcctaatagtagaagaaccctccataaacctggagtgactatatggatgccccccaccctaccacacattcgaagaacccgtatacataaaatctagacaaaaaaggaaggaatcgaaccccccaaagctggtttcaagccaaccccatggcctccatgactttttcaaaaaggtattagaaaaaccatttcataactttgtcaaagttaaattataggctaaatcctatataccttaatggcacatgcagcgcaagtaggtctacaagacgctacttcccctatcatagaagagcttatcacctttcatgatcacgccctcataatcattttccttatctgcttcctagtcctgtatgcccttttcctaacactcacaacaaaactaactaatactaacatctcagacgctcaggaaatagaaaccgtctgaactatcctgcccgccatcatcctagtcctcatcgccctcccatccctacgcatcctttacataacagacgaggtcaacgatccctcccttaccatcaaatcaattggccaccaatggtactgaacctacgagtacaccgactacggcggactaatcttcaactcctacatacttcccccattattcctagaaccaggcgacctgcgactccttgacgttgacaatcgagtagtactcccgattgaagcccccattcgtataataattacatcacaagacgtcttgcactcatgagctgtccccacattaggcttaaaaacagatgcaattcccggacgtctaaaccaaaccactttcaccgctacacgaccgggggtatactacggtcaatgctctgaaatctgtggagcaaaccacagtttcatgcccatcgtcctagaattaattcccctaaaaatctttgaaatagggcccgtatttaccctatagcaccccctctaccccctctagagcccactgtaaagctaacttagcattaaccttttaagttaaagattaagagaaccaacacctctttacagtgaaatgccccaactaaatactaccgtatggcccaccataattacccccatactccttacactattcctcatcacccaactaaaaatattaaacacaaactaccacctacctccctcaccaaagcccataaaaataaaaaattataacaaaccctgagaaccaaaatgaacgaaaatctgttcgcttcattcattgcccccacaatcctaggcctacccgccgcagtactgatcattctatttccccctctattgatccccacctccaaatatctcatcaacaaccgactaatcaccacccaacaatgactaatcaaactaacctcaaaacaaatgataaccatacacaacactaaaggacgaacctgatctcttatactagtatccttaatcatttttattgccacaactaacctcctcggactcctgcctcactcatttacaccaaccacccaactatctataaacctagccatggccatccccttatgagcgggcgcagtgattataggctttcgctctaagattaaaaatgccctagcccacttcttaccacaaggcacacctacaccccttatccccatactagttattatcgaaaccatcagcctactcattcaaccaatagccctggccgtacgcctaaccgctaacattactgcaggccacctactcatgcacctaattggaagcgccaccctagcaatatcaaccattaaccttccctctacacttatcatcttcacaattctaattctactgactatcctagaaatcgctgtcgccttaatccaagcctacgttttcacacttctagtaagcctctacctgcacgacaacacataatgacccaccaatcacatgcctatcatatagtaaaacccagcccatgacccctaacaggggccctctcagccctcctaatgacctccggcctagccatgtgatttcacttccactccataacgctcctcatactaggcctactaaccaacacactaaccatataccaatgatggcgcgatgtaacacgagaaagcacataccaaggccaccacacaccacctgtccaaaaaggccttcgatacgggataatcctatttattacctcagaagtttttttcttcgcaggatttttctgagccttttaccactccagcctagcccctaccccccaattaggagggcactggcccccaacaggcatcaccccgctaaatcccctagaagtcccactcctaaacacatccgtattactcgcatcaggagtatcaatcacctgagctcaccatagtctaatagaaaacaaccgaaaccaaataattcaagcactgcttattacaattttactgggtctctattttaccctcctacaagcctcagagtacttcgagtctcccttcaccatttccgacggcatctacggctcaacattttttgtagccacaggcttccacggacttcacgtcattattggctcaactttcctcactatctgcttcatccgccaactaatatttcactttacatccaaacatcactttggcttcgaagccgccgcctgatactggcattttgtagatgtggtttgactatttctgtatgtctccatctattgatgagggtcttactcttttagtataaatagtaccgttaacttccaattaactagttttgacaacattcaaaaaagagtaataaacttcgccttaattttaataatcaacaccctcctagccttactactaataattattacattttgactaccacaactcaacggctacatagaaaaatccaccccttacgagtgcggcttcgaccctatatcccccgcccgcgtccctttctccataaaattcttcttagtagctattaccttcttattatttgatctagaaattgccctccttttacccctaccatgagccctacaaacaactaacctgccactaatagttatgtcatccctcttattaatcatcatcctagccctaagtctggcctatgagtgactacaaaaaggattagactgaaccgaattggtatatagtttaaacaaaacgaatgatttcgactcattaaattatgataatcatatttaccaaatgcccctcatttacataaatattatactagcatttaccatctcacttctaggaatactagtatatcgctcacacctcatatcctccctactatgcctagaaggaataatactatcgctgttcattatagctactctcataaccctcaacacccactccctcttagccaatattgtgcctattgccatactagtctttgccgcctgcgaagcagcggtgggcctagccctactagtctcaatctccaacacatatggcctagactacgtacataacctaaacctactccaatgctaaaactaatcgtcccaacaattatattactaccactgacatgactttccaaaaaacacataatttgaatcaacacaaccacccacagcctaattattagcatcatccctctactattttttaaccaaatcaacaacaacctatttagctgttccccaaccttttcctccgaccccctaacaacccccctcctaatactaactacctgactcctacccctcacaatcatggcaagccaacgccacttatccagtgaaccactatcacgaaaaaaactctacctctctatactaatctccctacaaatctccttaattataacattcacagccacagaactaatcatattttatatcttcttcgaaaccacacttatccccaccttggctatcatcacccgatgaggcaaccagccagaacgcctgaacgcaggcacatacttcctattctacaccctagtaggctcccttcccctactcatcgcactaatttacactcacaacaccctaggctcactaaacattctactactcactctcactgcccaagaactatcaaactcctgagccaacaacttaatatgactagcttacacaatagcttttatagtaaagatacctctttacggactccacttatgactccctaaagcccatgtcgaagcccccatcgctgggtcaatagtacttgccgcagtactcttgaaactaggcggctatggtataatacgcctcacactcattctcaaccccctgacaaaacacatagcctaccccttccttgtactatccctatgaggcataattataacaagctccatctgcctacgacaaacagacctaaaatcgctcattgcatactcttcaatcagccacatagccctcgtagtaacagccattctcatccaaaccccctgaagcttcaccggcgcagtcattctcataatcgcccacggacttacatcctcattactattctgcctagcaaactcaaactacgaacgcactcacagtcgcatcataatcctctctcaaggacttcaaactctactcccactaatagctttttgatgacttctagcaagcctcgctaacctcgccttaccccccactattaacctactgggagaactctctgtgctagtaaccacgttctcctgatcaaatatcactctcctacttacaggactcaacatactagtcacagccctatactccctctacatatttaccacaacacaatggggctcactcacccaccacattaacaacataaaaccctcattcacacgagaaaacaccctcatgttcatacacctatcccccattctcctcctatccctcaaccccgacatcattaccgggttttcctcttgtaaatatagtttaaccaaaacatcagattgtgaatctgacaacagaggcttacgaccccttatttaccgagaaagctcacaagaactgctaactcatgcccccatgtctaacaacatggctttctcaacttttaaaggataacagctatccattggtcttaggccccaagaattttggtgcaactccaaataaaagtaataaccatgcacactactataaccaccctaaccctaacttccctaattccccccatccttaccaccctcgttaaccctaacaaaaaaaactcatacccccattatgtaaaatccattgtcgcatccacctttattatcagtctcttccccacaacaatattcatgtgcctagaccaagaagttattatctcgaactgacactgagccacaacccaaacaacccagctctccctaagcttcaaactagactacttctccataatattcatccctgtagcattgttcgttacatggtccatcatagaattctcactgtgatatataaactcagacccaaacattaatcagttcttcaaatatctactcatcttcctaattaccatactaatcttagttaccgctaacaacctattccaactgttcatcggctgagagggcgtaggaattatatccttcttgctcatcagttgatgatacgcccgagcagatgccaacacagcagccattcaagcaatcctatacaaccgtatcggcgatatcggcttcatcctcgccttagcatgatttatcctacactccaactcatgagacccacaacaaatagcccttctaaacgctaatccaagcctcaccccactactaggcctcctcctagcagcagcaggcaaatcagcccaattaggtctccacccctgactcccctcagccatagaaggccccaccccagtctcagccctactccactcaagcactatagttgtagcagggatcttcttactcatccgcttccaccccctagcagaaaatagcccactaatccaaactctaacactatgcttaggcgctatcaccactctgttcgcagcagtctgcgcccttacacaaaatgacatcaaaaaaatcgtagccttctccacttcaagtcaactaggactcataatagttacaatcggcatcaaccaaccacacctagcattcctgcacatctgtacccacgccttcttcaaagccatactatttatgtgctccgggtccatcatccacaaccttaacaatgaacaagatattcgaaaaataggaggactgctcaaaaccatacctctcacttcaacctccctcaccattggcagcctagcattagcaggaatacctttcctcacaggtttctactccaaagaccacatcatcgaaaccgcaaacatatcatacacaaacgcctgagccctatctattactctcatcgctacctccctgacaagcgcctatagcactcgaataattcttctcaccctaacaggtcaacctcgcttccccacccttactaacattaacgaaaataaccccaccctactaaaccccattaaacgcctggcagccggaagcctattcgcaggatttctcattactaacaacatttcccccgcatcccccttccaaacaacaatccccctctacctaaaactcacagccctcgctgtcactttcctaggacttctaacagccctagacctcaactacctaaccaacaaacttaaaataaaatccccactatgcacattttatttctccaacatactcggattctaccctagcatcacacaccgcacaatcccctatctaggccttcttacgagccaaaacctgcccctactcctcctagacctaacctgactagaaaagctattacctaaaacaatttcacagcaccaaatctccacctccatcatcacctcgacccaaaaaggcataattaaactttacttcctctctttcttcttcccactcatcctaaccctactcctaatcacataacctattcccccgagcaatctcaattacaatatatacaccaacaaacaatgttcaaccagtaactactactaatcaacgcccataatcatacaaagcccccgcaccaataggatcctcccgaatcaaccctgacccctctccttcataaattattcagcttcctacactattaaagtttaccacaaccaccaccccatcatactctttcacccacaacaccaatcctacctccatcgctaaccccactaaaacactcaccaagacctcaacccctgacccccatgcctcaggatactcctcaatagccatcgctgtagtatatccaaagacaaccatcattccccctaaataaattaaaaaaactattaaacccatataacctcccccaaaattcagaataataacacacccgaccacaccgctaacaatcaatactaaacccccataaataggagaaggcttagaagaaaaccccacaaaccccattactaaacccacactcaacagaaacaaagcatacatcattattctcgcacggactacaaccacgaccaatgatatgaaaaaccatcgttgtatttcaactacaagaacaccaatgaccccaatacgcaaaattaaccccctaataaaattaattaaccactcattcatcgacctccccaccccatccaacatctccgcatgatgaaacttcggctcactccttggcgcctgcctgatcctccaaatcaccacaggactattcctagccatgcactactcaccagacgcctcaaccgccttttcatcaatcgcccacatcactcgagacgtaaattatggctgaatcatccgctaccttcacgccaatggcgcctcaatattctttatctgcctcttcctacacatcgggcgaggcctatattacggatcatttctctactcagaaacctgaaacatcggcattatcctcctgcttgcaactatagcaacagccttcataggctatgtcctcccatgaggccaaatatcattctgaggggccacagtaattacaaacttactatccgccatcccatacattgggacagacctagttcaatgaatctgaggaggctactcagtagacagtcccaccctcacacgattctttacctttcacttcatcttgcccttcattattgcagccctagcagcactccacctcctattcttgcacgaaacgggatcaaacaaccccctaggaatcacctcccattccgataaaatcaccttccacccttactacacaatcaaagacgccctcggcttacttctcttccttctctccttaatgacattaacactattctcaccagacctcctaggcgacccagacaattataccctagccaaccccttaaacacccctccccacatcaagcccgaatgatatttcctattcgcctacacaattctccgatccgtccctaacaaactaggaggcgtccttgccctattactatccatcctcatcctagcaataatccccatcctccatatatccaaacaacaaagcataatatttcgcccactaagccaatcactttattgactcctagccgcagacctcctcattctaacctgaatcggaggacaaccagtaagctacccttttaccatcattggacaagtagcatccgtactatacttcacaacaatcctaatcctaataccaactatctccctaattgaaaacaaaatactcaaatgggcctgtccttgtagtataaactaatacaccagtcttgtaaaccggagatgaaaacctttttccaaggacacatcagagaaaaagtctttaactccaccattagcacccaaagctaagattctaatttaaactattctctgttctttcatggggaagcagatttgggtaccacccaagtattgactcacccatcaacaaccgctatgtatttcgtacattactgccagccaccatgaatattgtacggtaccataaatacttgaccacctgtagtacataaaaacccaatccacatcaaaaccccccccccatgcttacaagcaagtacagcaatcaaccctcaactatcacacatcaactgcaactccaaagccacccctcacccactaggataccaacaaacctacccacccttaacagtacatagtacataaagccatttaccgtacatagcacattacagtcaaatcccttctcgtccccatggatgacccccctcagataggggtcccttgaccaccatcctccgtgaaatcaatatcccgcacaagagtgctactctcctcgctccgggcccataacacttgggggtagctaaagtgaactgtatccgacatctggttcctacttcagggtcataaagcctaaatagcccacacgttccccttaaataagacatcacgatg

SEQ ID NO: 252 - DNA, 16571 bp, Homo sapiens mitochondrial
  3109: "n" refers to a nucleotide at position 3107 of the Cambridge Reference Sequence (CRS, Anderson et al. 1981 Nature 290:457-465), later determined to be absent from the human mtDNA sequence according to the revised CRS (rCRS, Andrews et al. 1999 Nature Genetics 23:147); "n" therefore represents a single nucleotide deletion at a position corresponding to nucleotide 3107 of SEQ ID NO:1 as provided herein.
gatcacaggtctatcaccctattaaccactcacgggagctctccatgcatttggtattttcgtctggggggtgtgcacgcgatagcattgcgagacgctggagccggagcaccctatgtcgcagtatctgtctttgattcctgcctcatcctattatttatcgcacctacgttcaatattacaggcgaacatacttaccaaaacgtgttaattaattaatgcttgtaggacataataataacaattgaacgtctgcacagcccctttccacacagacatcataacaaaaaatttccaccaaaccccccctcccccgccttctggccacagcacttaaacacatctctgccaaaccccaaaaacaaagaaccctaacaccagcctaaccagatttcaaattttatcttttggcggtatgcacttttaacagtcaccccccaactaacacattattttctccctcccactcccatactactaatctcatcaatacaacccccgcccatcctacccagcacacacacaccgctgctaaccccataccccgaaccaaccaaaccccaaagacaccccccacagtttatgtagcttacctcctcaaagcaatacactgaaaatgtttagacgggctcacatcaccccataaacaaataggtttggtcctagcctttctattagctcttagtaagattacacatgcaagcatccccgttccagtgagttcaccctctaaatcaccacgatcaaaagggacaagcatcaagcacgcagcaatgcagctcaaaacgcttagcctagccacacccccacgggaaacagcagtgattaacctttagcaataaacgaaagtttaactaagctatactaaccccagggttggtcaatttcgtgccagccaccgcggtcacacgattaacccaagtcaatagaagccggcgtaaagagtgttttagatcaccccctccccaataaagctaaaactcacctgagttgtaaaaaactccagttgacacaaaatagactacgaaagtggctttaacatatctgaacacacaatagctaagacccaaactgggattagataccccactatgcttagccctaaacctcaacagttaaatcaacaaaactgctcgccagaacactacgagccacagcttaaaactcaaaggacctggcggtgcttcatatccctctagaggagcctgttctgtaatcgataaaccccgatcaacctcaccacctcttgctcagcctatataccgccatcttcagcaaaccctgatgaaggctacaaagtaagcgcaagtacccacgtaaagacgttaggtcaaggtgtagcccatgaggtggcaagaaatgggctacattttctaccccagaaaactacgatagcccttatgaaacttaagggtcgaaggtggatttagcagtaaactgagagtagagtgcttagttgaacagggccctgaagcgcgtacacaccgcccgtcaccctcctcaagtatacttcaaaggacatttaactaaaacccctacgcatttatatagaggagacaagtcgtaacatggtaagtgtactggaaagtgcacttggacgaaccagagtgtagcttaacacaaagcacccaacttacacttaggagatttcaacttaacttgaccgctctgagctaaacctagccccaaacccactccaccttactaccagacaaccttaaccaaaccatttacccaaataaagtataggcgatagaaattgaaacctggcgcaatagatatagtaccgcaagggaaagatgaaaaattataaccaagcataatatagcaaggactaacccctataccttctgcataatgaattaactagaaataactttgcaaggagagccaaagctaagacccccgaaaccagacgagctacctaagaacagctaaaagagcacacccgtctatgtagcaaaatagtgggaagatttataggtagaggcgacaaacctaccgagcctggtgatagctggttgtccaagatagaatcttagttcaactttaaatttgcccacagaaccctctaaatccccttgtaaatttaactgttagtccaaagaggaacagctctttggacactaggaaaaaaccttgtagagagagtaaaaaatttaacacccatagtaggcctaaaagcagccaccaattaagaaagcgttcaagctcaacacccactacctaaaaaatcccaaacatataactgaactcctcacacccaattggaccaatctatcaccctatagaagaactaatgttagtataagtaacatgaaaacattctcctccgcataagcctgcgtcagattaaaacactgaactgacaattaacagcccaatatctacaatcaaccaacaagtcattattaccctcactgtcaacccaacacaggcatgctcataaggaaaggttaaaaaaagtaaaaggaactcggcaaatcttaccccgcctgtttaccaaaaacatcacctctagcatcaccagtattagaggcaccgcctgcccagtgacacatgtttaacggccgcggtaccctaaccgtgcaaaggtagcataatcacttgttccttaaatagggacctgtatgaatggctccacgagggttcagctgtctcttacttttaaccagtgaaattgacctgcccgtgaagaggcgggcatgacacagcaagacgagaagaccctatggagctttaatttattaatgcaaacagtacctaacaaacccacaggtcctaaactaccaaacctgcattaaaaatttcggttggggcgacctcggagcagaacccaacctccgagcagtacatgctaagacttcaccagtcaaagcgaactactatactcaattgatccaataacttgaccaacggaacaagttaccctagggataacagcgcaatcctattctagagtccatatcaacaatagggtttacgacctcgatgttggatcaggacatcccgatggtgcagccgctattaaaggttcgtttgttcaacgattaaagtcctacgtgatctgagttcagaccggagtaatccaggtcggtttctatctacnttcaaattcctccctgtacgaaaggacaagagaaataaggcctacttcacaaagcgccttcccccgtaaatgatatcatctcaacttagtattatacccacacccacccaagaacagggtttgttaagatggcagagcccggtaatcgcataaaacttaaaactttacagtcagaggttcaattcctcttcttaacaacatacccatggccaacctcctactcctcattgtacccattctaatcgcaatggcattcctaatgcttaccgaacgaaaaattctaggctatatacaactacgcaaaggccccaacgttgtaggcccctacgggctactacagcccttcgctgacgccataaaactcttcaccaaagagcccctaaaacccgccacatctaccatcaccctctacatcaccgccccgaccttagctctcaccatcgctcttctactatgaacccccctccccatacccaaccccctggtcaacctcaacctaggcctcctatttattctagccacctctagcctagccgtttactcaatcctctgatcagggtgagcatcaaactcaaactacgccctgatcggcgcactgcgagcagtagcccaaacaatctcatatgaagtcaccctagccatcattctactatcaacattactaataagtggctcctttaacctctccacccttatcacaacacaagaacacctctgattactcctgccatcatgacccttggccataatatgatttatctccacactagcagagaccaaccgaacccccttcgaccttgccgaaggggagtccgaactagtctcaggcttcaacatcgaatacgccgcaggccccttcgccctattcttcatagccgaatatacaaacattattataataaacaccctcaccactacaatcttcctaggaacaacatatgacgcactctcccctgaactctacacaacatattttgtcaccaagaccctacttctaacctccctgttcttatgaattcgaacagcatacccccgattccgctacgaccaactcatacacctcctatgaaaaaacttcctaccactcaccctagcattacttatatgatatgtctccatacccattacaatctccagcattccccctcaaacctaagaaatatgtctgataaaagagttactttgatagagtaaataataggagcttaaacccccttatttctaggactatgagaatcgaacccatccctgagaatccaaaattctccgtgccacctatcacaccccatcctaaagtaaggtcagctaaataagctatcgggcccataccccgaaaatgttggttatacccttcccgtactaattaatcccctggcccaacccgtcatctactctaccatctttgcaggcacactcatcactgcgctaagctcgcactgattttttacctgagtaggcctagaaataaacatgctagcttttattccagttctaaccaaaaaaataaaccctcgttccacagaagctgccatcaagtatttcctcacgcaagcaaccgcatccataatccttctaatagctatcctcttcaacaatatactctccggacaatgaaccataaccaatactaccaatcaatactcatcattaataatcataatggctatagcaataaaactaggaatagccccctttcacttctgagtcccagaggttacccaaggcacccctctgacatccggcctgcttcttctcacatgacaaaaactagcccccatctcaatcatataccaaatctctccctcactaaacgtaagccttctcctcactctctcaatcttatccatcatagcaggcagttgaggtggattaaaccaaacccagctacgcaaaatcttagcatactcctcaattacccacataggatgaataatagcagttctaccgtacaaccctaacataaccattcttaatttaactatttatattatcctaactactaccgcattcctactactcaacttaaactccagcaccacgaccctactactatctcgcacctgaaacaagctaacatgactaacacccttaattccatccaccctcctctccctaggaggcctgcccccgctaaccggctttttgcccaaatgggccattatcgaagaattcacaaaaaacaatagcctcatcatccccaccatcatagccaccatcaccctccttaacctctacttctacctacgcctaatctactccacctcaatcacactactccccatatctaacaacgtaaaaataaaatgacagtttgaacatacaaaacccaccccattcctccccacactcatcgcccttaccacgctactcctacctatctccccttttatactaataatcttatagaaatttaggttaaatacagaccaagagccttcaaagccctcagtaagttgcaatacttaatttctgtaacagctaaggactgcaaaaccccactctgcatcaactgaacgcaaatcagccactttaattaagctaagcccttactagaccaatgggacttaaacccacaaacacttagttaacagctaagcaccctaatcaactggcttcaatctacttctcccgccgccgggaaaaaaggcgggagaagccccggcaggtttgaagctgcttcttcgaatttgcaattcaatatgaaaatcacctcggagctggtaaaaagaggcctaacccctgtctttagatttacagtccaatgcttcactcagccattttacctcacccccactgatgttcgccgaccgttgactattctctacaaaccacaaagacattggaacactatacctattattcggcgcatgagctggagtcctaggcacagctctaagcctccttattcgagccgagctgggccagccaggcaaccttctaggtaacgaccacatctacaacgttatcgtcacagcccatgcatttgtaataatcttcttcatagtaatacccatcataatcggaggctttggcaactgactagttcccctaataatcggtgcccccgatatggcgtttccccgcataaacaacataagcttctgactcttacctccctctctcctactcctgctcgcatctgctatagtggaggccggagcaggaacaggttgaacagtctaccctcccttagcagggaactactcccaccctggagcctccgtagacctaaccatcttctccttacacctagcaggtgtctcctctatcttaggggccatcaatttcatcacaacaattatcaatataaaaccccctgccataacccaataccaaacgcccctcttcgtctgatccgtcctaatcacagcagtcctacttctcctatctctcccagtcctagctgctggcatcactatactactaacagaccgcaacctcaacaccaccttcttcgaccccgccggaggaggagaccccattctataccaacacctattctgatttttcggtcaccctgaagtttatattcttatcctaccaggcttcggaataatctcccatattgtaacttactactccggaaaaaaagaaccatttggatacataggtatggtctgagctataatatcaattggcttcctagggtttatcgtgtgagcacaccatatatttacagtaggaatagacgtagacacacgagcatatttcacctccgctaccataatcatcgctatccccaccggcgtcaaagtatttagctgactcgccacactccacggaagcaatatgaaatgatctgctgcagtgctctgagccctaggattcatctttcttttcaccgtaggtggcctgactggcattgtattagcaaactcatcactagacatcgtactacacgacacgtactacgttgtagctcacttccactatgtcctatcaataggagctgtatttgccatcataggaggcttcattcactgatttcccctattctcaggctacaccctagaccaaacctacgccaaaatccatttcactatcatattcatcggcgtaaatctaactttcttcccacaacactttctcggcctatccggaatgccccgacgttactcggactaccccgatgcatacaccacatgaaacatcctatcatctgtaggctcattcatttctctaacagcagtaatattaataattttcatgatttgagaagccttcgcttcgaagcgaaaagtcctaatagtagaagagccctccataaacctggagtgactatatggatgccccccaccctaccacacattcgaagaacccgtatacataaaatctagacaaaaaaggaaggaatcgaaccccccaaagctggtttcaagccaaccccatggcctccatgactttttcaaaaaggtattagaaaaaccatttcataactttgtcaaagttaaattataggctaaatcctatatatcttaatggcacatgcagcgcaagtaggtctacaagacgctacttcccctatcatagaagagcttatcacctttcatgatcacgccctcataatcattttccttatctgcttcctagtcctgtatgcccttttcctaacactcacaacaaaactaactaatactaacatctcagacgctcaggaaatagaaaccgtctgaactatcctgcccgccatcatcctagtcctcatcgccctcccatccctacgcatcctttacataacagacgaggtcaacgatccctcccttaccatcaaatcaattggccaccaatggtactgaacctacgagtacaccgactacggcggactaatcttcaactcctacatacttcccccattattcctagaaccaggcgacctgcgactccttgacgttgacaatcgagtagtactcccgattgaagcccccattcgtataataattacatcacaagacgtcttgcactcatgagctgtccccacattaggcttaaaaacagatgcaattcccggacgtctaaaccaaaccactttcaccgctacacgaccgggggtatactacggtcaatgctctgaaatctgtggagcaaaccacagtttcatgcccatcgtcctagaattaattcccctaaaaatctttgaaataggacccgtatttaccctatagcaccccctctaccccctctagagcccactgtaaagctaacttagcattaaccttttaagttaaagattaagagaaccaacacctctttacagtgaaatgccccaactaaatactaccgtatggcccaccataattacccccatactccttacactattcctcatcacccaactaaaaatattaaacacaaactaccacctacctccctcaccaaagcccataaaaataaaaaattataacaaaccctgagaaccaaaatgaacgaaaatctgttcgcttcattcattgcccccacaatcctaggcctacccgccgcagtactgatcattctatttccccctctatttatccccacctccaaatatctcatcaacaaccgactaatcaccacccaacaatgactaatcaaactaacctcaaaacaaatgataaccatacacaacactaaaggacgaacctgatctcttatactagtatccttaatcatttttattgccacaactaacctcctcggactcctgcctcactcatttacaccaaccacccaactatctataaacctagccatggccatccccttatgagcgggcgcagtgattataggctttcgctctaagattaaaaatgccctagcccacttcttaccacaaggcacacctacaccccttatccccatactagttattatcgaaaccatcagcctactcattcaaccaatagccctggccgtacgcctaaccgctaacattactgcaggccacctactcatgcacctaattggaagcgccaccctagcaatatcaaccattaaccttccctctacacttatcatcttcacaattctaattctactgactatcctagaaatcgctgtcgccttaatccaagcctacgttttcacacttctagtaagcctctacctgcacgacaacacataatgacccaccaatcacatgcctatcatatagtaaaacccagcccatgacccctaacaggggccctctcagccctcctaatgacctccggcctagccatgtgatttcacttccactccataacgctcctcatactaggcctactaaccaacacactaaccatataccaatgatggcgcgatgtaacacgagaaagcacataccaaggccaccacacaccacctgtccaaaaaggccttcgatacgggataatcctatttattacctcagaagtttttttcttcgcaggatttttctgagccttttaccactccagcctagcccctaccccccaattaggagggcactggcccccaacaggcatcaccccgctaaatcccctagaagtcccactcctaaacacatccgtattactcgcatcaggagtatcaatcacctgagctcaccatagtctaatagaaaacaaccgaaaccaaataattcaagcactgcttattacaattttactgggtctctattttaccctcctacaagcctcagagtacttcgagtctcccttcaccatttccgacggcatctacggctcaacattttttgtagccacaggcttccacggacttcacgtcattattggctcaactttcctcactatctgcttcatccgccaactaatatttcactttacatccaaacatcactttggcttcgaagccgccgcctgatactggcattttgtagatgtagtttgactatttctgtatgtctccatctattgatgagggtcttactcttttagtataaatagtaccgttaacttccaattaactagctttgacaacattcaaaaaagagtaataaacttcgccttaattttaataatcaacaccctcctagccttactactaataattattacattttgactaccacaactcaacggctacatagaaaaatccaccccttacgagtgcggcttcgaccctatatcccccgcccgcgtccctttctccataaaattcttcttagtagctatcaccttcttattatttgatctagaaattgccctccttttacccctaccatgagccctacaaacaactaacctgccactaatagttatgtcatccctcttattaatcatcatcctagccctaagtctggcctatgagtgactacaaaaaggattagactgagccgaattggtatatagtttaaacaaaacgaatgatttcgactcattaaattatgataatcatatttaccaaatgcccctcatttacataaatattatactagcatttaccatctcacttctaggaatactagtatatcgctcacacctcatatcctccctactatgcctagaaggaataatactatcgctgttcattatagctactctcataaccctcaacacccactccctcttagccaatattgtgcctattgccatactagtctttgccgcctgcgaagcagcggtgggcctagccctactagtctcaatctccaacacatatggcctagactacgtacataacctaaacctactccaatgctaaaactaatcgtcccaacaattatattactaccactgacatgactttccaaaaaacacataatttgaatcaacacaaccacccacagcctaattattagcatcatccctctactattttttaaccaaatcaacaacaacctatttagctgctccccaaccttttcctccgaccccctaacaacccccctcctaatactaactacctgactcctacccctcacaatcatggcaagccaacgccacttatccagtgaaccactatcacgaaaaaaactctacctctctatactaatctccctacaaatctccttaattataacattcacagccacagaactaatcatattttatatcttcttcgaaaccacacttatccccaccttggctatcatcacccgatgaggcaaccagccagaacgcctgaacgcaggcacatacttcctattctacaccctagtaggctcccttcccctactcatcgcactaatttacactcacaacaccctaggctcactaaacattctactactcactctcactgcccaagaactatcaaactcctgagccaacaacttaatatgactagcttacacaatagcttttatagtaaagatacctctttacggactccacttatgactccctaaagcccatgtcgaagcccccatcgctgggtcaatagtacttgccgcagtactcttaaaactaggcggctatggtataatacgcctcacactcattctcaaccccctgacaaaacacatagcctaccccttccttgtactatccctatgaggcataattataacaagctccatctgcctacgacaaacagacctaaaatcgctcattgcatactcttcaatcagccacatagccctcgtagtaacagccattctcatccaaaccccctgaagcttcaccggcgcagtcattctcataatcgcccacggacttacatcctcattactattctgcctagcaaactcaaactacgaacgcactcacagtcgcatcataatcctctctcaaggacttcaaactctactcccactaatagctttttgatgacttctagcaagcctcgctaacctcgccttaccccccactattaacctactgggagaactctctgtgctagtaaccacgttctcctgatcaaatatcactctcctacttacaggactcaacatactagtcacagccctatactccctctacatatttaccacaacacaatggggctcactcacccaccacattaacaacataaaaccctcattcacacgagaaaacaccctcatgttcatacacctatcccccattctcctcctatccctcaaccccgacatcattaccgggttttcctcttgtaaatatagtttaaccaaaacatcagattgtgaatctgacaacagaggcttacgaccccttatttaccgagaaagctcacaagaactgctaactcatgcccccatgtctaacaacatggctttctcaacttttaaaggataacagctatccattggtcttaggccccaaaaattttggtgcaactccaaataaaagtaataaccatgcacactactataaccaccctaaccctgacttccctaattccccccatccttaccaccctcgttaaccctaacaaaaaaaactcatacccccattatgtaaaatccattgtcgcatccacctttattatcagtctcttccccacaacaatattcatatgcctagaccaagaagttattatctcgaactgacactgagccacaacccaaacaacccagctctccctaagcttcaaactagactacttctccataatattcatccctgtagcattgttcgttacatggtccatcatagaattctcactgtgatatataaactcagacccaaacattaatcagttcttcaaatatctactcattttcctaattaccatactaatcttagttaccgctaacaacctattccaactgttcatcggctgagagggcgtaggaattatatccttcttgctcatcagttgatgatacgcccgagcagatgccaacacagcagccattcaagcaatcctatacaaccgtatcggcgatatcggtttcatcctcgccttagcatgatttatcctacactccaactcatgagacccacaacaaatagcccttctaaacgctaatccaagcctcaccccactactaggcctcctcctagcagcagcaggcaaatcagcccaattaggtctccacccctgactcccctcagccatagaaggccccaccccagtctcagccctactccactcaagcactatagttgtagcaggaatcttcttactcatccgcttccaccccctagcagaaaatagcccactaatccaaactctaacactatgcttaggcgctatcaccactctgttcgcagcagtctgcgcccttacacaaaatgacatcaaaaaaatcgtagccttctccacttcaagtcaactaggactcataatagttacaatcggcatcaaccaaccacacctagcattcctgcacatctgtacccacgccttcttcaaagccatactatttatgtgctccgggtccatcatccacaaccttaacaatgaacaagatattcgaaaaataggaggactactcaaaaccatacctctcacttcaacctccctcaccattggcagcctagcattagcaggaatacctttcctcacaggtttctactccaaagaccacatcatcgaaaccgcaaacatatcatacacaaacgcctgagccctatctattactctcatcgctacctccctgacaagcgcctatagcactcgaataattcttctcaccctaacaggtcaacctcgcttccccacccttactaacattaacgaaaataaccccaccctactaaaccccattaaacgcctggcagccggaagcctattcgcaggatttctcattactaacaacatttcccccgcatcccccttccaaacaacagtccccctctacctaaaactcacagccctcgctgtcactttcctaggacttctaacagccctagacctcaactacctaaccaacaaacttaaaataaaatccccactatgcacattttatttctccaacatactcggattctaccctagcatcacacaccgcacaatcccctatctaggccttcttacgagccaaaacctgcccctactcctcctagacctaacctgactagaaaagctattacctaaaacaatttcacagcaccaaatctccacctccatcatcacctcaacccaaaaaggcataattaaactttacttcctctctttcttcttcccactcatcctaaccctactcctaatcacataacctattcccccgagcaatctcaattacaatatatacaccaacaaacaatgttcaaccagtaactactactaatcaacgcccataatcatacaaagcccccgcaccaataggatcctcccgaatcaaccctgacccctctccttcataaattattcagcttcctacactattaaagtttaccacaaccaccaccccatcatactctttcacccacagcaccaatcctacctccatcgctaaccccactaaaacactcaccaagacctcaacccctgacccccatgcctcaggatactcctcaatagccatcgctgtagtatatccaaagacaaccatcattccccctaaataaattaaaaaaactattaaacccatataacctcccccaaaattcagaataataacacacccgaccacaccgctaacaatcaatactaaacccccataaataggagaaggcttagaagaaaaccccacaaaccccattactaaacccacactcaacagaaacaaagcatacatcattattctcgcacggactacaaccacgaccaatgatatgaaaaaccatcgttgtatttcaactacaagaacaccaatgaccccaatacgcaaaattaaccccctaataaaattaattaaccactcattcatcgacctccccaccccatccaacatctccgcatgatgaaacttcggctcactccttggcgcctgcctgatcctccaaatcaccacaggactattcctagccatgcactactcaccagacgcctcaaccgccttttcatcaatcgcccacatcactcgagacgtaaattatggctgaatcatccgctaccttcacgccaatggcgcctcaatattctttatctgcctcttcctacacatcggacgaggcctatattacggatcatttctctactcagaaacctgaaacatcggcattatcctcctgcttgcaactatagcaacagccttcataggctatgtcctcccgtgaggccaaatatcattctgaggggccacagtaattacaaacttactatccgccatcccatacattgggacagacctagttcaatgaatctgaggaggctactcagtagacagtcccaccctcacacgattctttacctttcacttcatcttgcccttcattattgcagccctagcagcactccacctcctattcttgcacgaaacgggatcaaacaaccccctaggaatcacctcccattccgataaaatcaccttccacccttactacacaatcaaagacgccctcggcttacttctcttccttctctccttaatgacattaacactattctcaccagacctcctaggcgacccagacaattataccctagccaaccccttaaacacccctccccacatcaagcccgaatgatatttcctattcgcctacacaattctccgatccgtccctaacaaactaggaggcgtccttgccctattactatccatcctcatcctagcaataatccccatcctccatatatccaaacaacaaagcataatatttcgcccactaagccaatcactttattgactcctagccgcagacctcctcattctaacctgaatcggaggacaaccagtaagctacccttttaccatcattggacaagtagcatccgtactatacttcacaacaatcctaatcctaataccaactatctccctaattgaaaacaaaatactcaaatgggcctgtccttgtagtataaactaatacaccagtcttgtaagccggagatgaaaacctttttccaaggacaaatcagagaaaaagtctttaactccaccattagcacccaaagctaagattctaatttaaactattctctgttctttcatggggaagcagatttgggtaccacccaagtattgactcacccatcaacaaccgctatgtatttcgtacattactgccagccaccatgaatattgtacagtaccataaatacttgaccacctgtagtacataaaaacccaacccacatcaaaaccccctccccatgcttacaagcaagtacagcaatcaaccttcaactatcacacatcaactgcaactccaaagccacccctcacccactaggataccaacaaacctacccacccttaacagtacatagcacataaagccatttaccgtacatagcacattacagtcaaatcccttctcgtccccatggatgacccccctcagatagggatcccttgaccaccatcctccgtgaaatcaatatcccgcacaagagtgctactctcctcgctccgggcccataacacttgggggtagctaaagtgaactgtatccgacatctggttcctacttcagggccataaagcctaaatagcccacacgttccccttaaataagacatcacgatg

SEQ ID NO: 253 - DNA, 16570 bp, Homo sapiens mitochondrial
  3108: "n" refers to a nucleotide at position 3107 of the Cambridge Reference Sequence (CRS, Anderson et al. 1981 Nature 290:457-465), later determined to be absent from the human mtDNA sequence according to the revised CRS (rCRS, Andrews et al. 1999 Nature Genetics 23:147); "n" therefore represents a single nucleotide deletion at a position corresponding to nucleotide 3107 of SEQ ID NO:1 as provided herein.
gatcacaggtctatcaccctattaaccactcacgggagctctccatgcatttggtattttcgtctggggggtgtgcacgcgatagcattgcgagacgctggagccggagcaccctatgtcgcagtatctgtctttgattcctgcctcatcctattatttatcgcacctacgttcaatattacaggcgaacatacttactaaagtgtgttaattaattaatgcttgtaggacataataataacaattgaatgtctgcacagccgctttccacacagacatcataacaaaaaatttccaccaaaccccccctcccccgccttctggccacagcacttaaacacatctctgccaaaccccaaaaacaaagaaccctaacaccagcctaaccagatttcaaattttatcttttggcggtatgcacttttaacagtcaccccccaactaacacattattttcccctcccactcccatactactaatctcatcaatacaacccccgcccatcctacccagcacacacacaccgctgctaaccccataccccgaaccaaccaaaccccaaagacaccccccacagtttatgtagcttacctcctcaaagcaatacactgaaaatgtttagacgggctcacatcaccccataaacaaataggtttggtcctagcctttctattagctcttagtaagattacacatgcaagcatccccattccagtgagttcaccctctaaatcaccacgatcaaaagggacaagcatcaagcacgcagcaatgcagctcaaaacgcttagcctagccacacccccacgggaaacagcagtgattaacctttagcaataaacgaaagtttaactaagctatactaaccccagggttggtcaatttcgtgccagccaccgcggtcacacgattaacccaagtcaatagaagccggcgtaaagagtgttttagatcaccccctccccaataaagctaaaactcacctgagttgtaaaaaactccagttgacacaaaatagactacgaaagtggctttaacatatctgaacacacaatagctaagacccaaactgggattagataccccactatgcttagccctaaacctcaacagttaaatcaacaaaactgctcgccagaacactacgagccacagcttaaaactcaaaggacctggcggtgcttcatatccctctagaggagcctgttctgtaatcgataaaccccgatcaacctcaccacctcttgctcagcctatataccgccatcttcagcaaaccctgatgaaggctacaaagtaagcgcaagtacccacgtaaagacgttaggtcaaggtgtagcccatgaggtggcaagaaatgggctacattttctaccccagaaaactacgatagcccttatgaaacttaagggtcgaaggtggatttagcagtaaactgagagtagagtgcttagttgaacagggccctgaagcgcgtacacaccgcccgtcaccctcctcaagtatacttcaaaggacatttaactaaaacccctacgcatttatatagaggagacaagtcgtaacatggtaagtgtactggaaagtgcacttggacgaaccagagtgtagcttaacacaaagcacccaacttacacttaggagatttcaacttaacttgaccgctctgagctaaacctagccccaaacccactccaccttactaccagacaaccttagccaaaccatttacccaaataaagtataggcgatagaaattgaaacctggcgcaatagatatagtaccgcaagggaaagatgaaaaattataaccaagcataatatagcaaggactaacccctataccttctgcataatgaattaactagaaataactttgcaaggagaaccaaagctaagacccccgaaaccagacgagctacctaagaacagctaaaagagcacacccgtctatgtagcaaaatagtgggaagatttataggtagaggcgacaaacctaccgagcctggtgatagctggttgtccaagatagaatcttagttcaactttaaatttgcccacagaaccctctaaatccccttgtaaatttaactgttagtccaaagaggaacagctctttggacactaggaaaaaaccttgcagagagagtaaaaaatttaacacccatagtaggcctaaaagcagccaccaattaagaaagcgttcaagctcaacacccactacctaaaaaatcccaaacatataactgaactcctcacacccaattggaccaatctatcaccctatagaagaactaatgttagtataagtaacatgaaaacattctcctccgcataagcctgcgtcagattaaaacactgaactgacaattaacagcccaatatctacaatcaaccaacaagtcattattaccctcactgtcaacccaacacaggcatgctcataaggaaaggttaaaaaaagtaaaaggaactcggcaaatcttaccccgcctgtttaccaaaaacatcacctctagcatcaccagtattagaggcaccgcctgcccagtgacacatgtttaacggccgcggtaccctaaccgtgcaaaggtagcataatcacttgttccttaaatagggacctgtatgaatggctccacgagggttcagctgtctcttacttttaaccagtgaaattgacctgcccgtgaagaggcgggcatgacacagcaagacgagaagaccctatggagctttaatttattaatgcaaacagtacctaacaaacccacaggtcctaaactaccaaacctgcattaaaaatttcggttggggcgacctcggagcagaacccaacctccgagcagtacatgctaagacttcaccagtcaaagcgaactactatactcaattgatccaataacttgaccaacggaacaagttaccctagggataacagcgcaatcctattctagagtccatatcaacaatagggtttacgacctcgatgttggatcaggacatcccgatggtgcagccgctattaaaggttcgtttgttcaacgattaaagtcctacgtgatctgagttcagaccggagtaatccaggtcggtttctatctacnttcaaattcctccctgtacgaaaggacaagagaaataaggcctacttcacaaagcgccttcccccgtaaatgatatcatctcaacttagtattatacccacacccacccaagaacagggtttgttaagatggcagagcccggtaatcgcataaaacttaaaactttacagtcagaggttcaattcctcttcttaacaacatacccatggccaacctcctactcctcattgtacccattctaatcgcaatggcattcctaatgcttaccgaacgaaaaattctaggctatatacaactacgcaaaggccccaacgttgtaggcccctacgggctactacaacccttcgctgacgccataaaactcttcaccaaagagcccctaaaacccgccacatctaccatcaccctctacatcaccgccccgaccttagctctcaccatcgctcttctactatgaacccccctccccatacccaaccccctggtcaacctcaacctaggcctcctatttattctagccacctctagcctagccgtttactcaatcctctgatcagggtgagcatcaaactcaaactacgccctgatcggcgcactgcgagcagtagcccaaacaatctcatatgaagtcaccctagccatcattctactatcaacattactaataagtggctcctttaacctctccacccttatcacaacacaagaacacctctgattactcctgccatcatgacccttggccataatatgatttatctccacactagcagagaccaaccgaacccccttcgaccttgccgaaggggagtccgaactagtctcaggcttcaacatcgaatacgccgcaggccccttcgccctattcttcatagccgaatacacaaacattattataataaacaccctcaccactacaatcttcctaggaacaacatatgacgcactctcccctgaactctacacaacatattttgtcaccaagaccctacttctaacctccctgttcttatgaattcgaacagcatacccccgattccgctacgaccaactcatacacctcctatgaaaaaacttcctaccactcaccctagcattacttatatgacatgtctccatacccattacaatctccagcattccccctcaaacctaagaaatatgtctgataaaagagttactttgatagagtaaataataggagcttaaacccccttatttctaggactatgagaatcgaacccatccctgagaatccaaaattctccgtgccacctatcacaccccatcctaaagtaaggtcagctaaataagctatcgggcccataccccgaaaatgttggttatacccttcccgtactaattaatcccctggcccaacccgtcatctactctaccatctttgcaggcacactcatcacagcgctaagctcgcactgattttttacctgagtaggcctagaaataaacatgctagcttttattccagttctaaccaaaaaaataaaccctcgttccacagaagctgccatcaagtatttcctcacgcaagcaaccgcatccataatccttctaatagctatcctcttcaacaatatactctccggacaatgaaccataaccaatactaccaatcaatactcatcattaataatcataatggctatagcaataaaactaggaatggccccctttcacttctgagtcccagaggttacccaaggcacccctctgacatccggcctgcttcttctcacatgacaaaaactagcccccatctcaatcatataccaaatctctccctcactagacgtaagccttctcctcactctctcaatcttatccatcatagcaggcagttgaggtggattaaaccaaacccagctacgcaaaatcttagcatactcctcaattacccacataggatgaataatagcagttctaccgtacaaccctaacataaccattcttaatttaactatttatattatcctaactactaccgcattcctactactcaacttaaactccagcaccacgaccctactactatctcgcacctgaaacaagctaacatgactaacacccttaattccatccaccctcctctccctaggaggcctgcccccgctaaccggctttttgcccaaatgggccattatcgaagaattcacaaaaaacaatagcctcatcatccccaccatcatagccaccatcaccctccttaacctctacttctacctacgcctaatctactccacctcaatcacactactccccatatctaacaacgtaaaaataaaatgacagtttgaacatacaaaacccaccccattcctccccacactcatcgcccttaccacgctactcctacctatctccccttttatactaataatcttatagaaatttaggttaaatacagaccaagagccttcaaagccctcagtaagttgcaatacttaatttctgtaacagctaaggactgcaaaaccccactctgcatcaactgaacgcaaatcagccactttaattaagctaagcccttactagaccaatgggacttaaacccacaaacacttagttaacagctaagcaccctaatcaactggcttcaatctacttctcccgccgccgggaaaaaaggcgggagaagccccggcaggtttgaagctgcttcttcgaatttgcaattcaatatgaaaatcacctcggagctggtaaaaagaggcctaacccctgtctttagatttacagtccaatgcttcactcagccattttacctcacccccactgatgttcgccgaccgttgactattctctacaaaccacaaagacattggaacactatacctattattcggcgcatgagctggagtcctaggcacagctctaagcctccttattcgagccgagctgggccagccaggcaaccttctaggtaacgaccacatctacaacgttatcgtcacagcccatgcatttgtaataatcttcttcatagtaatacccatcataatcggaggctttggcaactgactagttcccctaataatcggtgcccccgatatggcgtttccccgcataaacaacataagcttctgactcttacctccctctctcctactcctgctcgcatctgctatagtggaggccggagcaggaacaggttgaacagtctaccctcccttagcagggaactactcccaccctggagcctccgtagacctaaccatcttctccttacacctagcaggtgtctcctctatcttaggggccatcaatttcatcacaacaattatcaatataaaaccccctgccataacccaataccaaacgcccctcttcgtctgatccgtcctaatcacagcagtcctacttctcctatctctcccagtcctagctgctggcatcactatactactaacagaccgcaacctcaacaccaccttcttcgaccccgccggaggaggagaccccattctataccaacacctattctgatttttcggtcaccctgaagtttatattcttatcctaccaggcttcggaataatctcccatattgtaacttactactccggaaaaaaagaaccatttggatacataggtatggtctgagctatgatatcaattggcttcctagggtttatcgtgtgagcacaccatatatttacagtaggaatagacgtagacacacgagcatatttcacctccgctaccataatcatcgctatccccaccggcgtcaaagtatttagctgactcgccacactccacggaagcaatatgaaatgatctgctgcagtgctctgagccctaggattcatctttcttttcaccgtaggtggcctgactggcattgtattagcaaactcatcactagacatcgtactacacgacacgtactacgttgtagctcacttccactatgtcctatcaataggagctgtatttgccatcataggaggcttcattcactgatttcccctattctcaggctacaccctagaccaaacctacgccaaaatccatttcactatcatattcatcggcgtaaatctaactttcttcccacaacactttctcggcctatccggaatgccccgacgttactcggactaccccgatgcatacaccacatgaaacatcctatcatctgtaggctcattcatttctctaacagcagtaatattaataattttcatgatttgagaagccttcgcttcgaagcgaaaagtcctaatagtagaagaaccctccataaacctggagtgactatatggatgccccccaccctaccacacattcgaagaacccgtatacataaaatctagacaaaaaaggaaggaatcgaaccccccaaagctggtttcaagccaaccccatggcctccatgactttttcaaaaaggtattagaaaaaccatttcataactttgtcaaagttaaattataggctaaatcctatatatcttaatggcacatgcagcgcaagtaggtctacaagacgctacttcccctatcatagaagagcttatcacctttcatgatcacgccctcataatcattttccttatctgcttcctagtcctgtatgcccttttcctaacactcacaacaaaactaactaatactaacatctcagacgctcaggaaatagaaaccgtctgaactatcctgcccgccatcatcctagtcctcatcgccctcccatccctacgcatcctttacataacagacgaggtcaacgatccctcccttaccatcaaatcaattggccaccaatggtactgaacctacgagtacaccgactacggcggactaatcttcaactcctacatacttcccccattattcctagaaccaggcgacctgcgactccttgacgttgacaatcgagtagtactcccgattgaagcccccattcgtataataattacatcacaagacgtcttgcactcatgagctgtccccacattaggcttaaaaacagatgcaattcccggacgtctaaaccaaaccactttcaccgctacacgaccgggggtatactacggtcaatgctctgaaatctgtggagcaaaccacagtttcatgcccatcgtcctagaattaattcccctaaaaatctttgaaatagggcccgtatttaccctatagcaccccctctaccccctctagagcccactgtaaagctaacttagcattaaccttttaagttaaagattaagagaaccaacacctctttacagtgaaatgccccaactaaatactaccgtatggcccaccataattacccccatactccttacactattcctcatcacccaactaaaaatattaaacacaaactaccacctacctccctcaccaaagcccataaaaataaaaaattataacaaaccctgagaaccaaaatgaacgaaaatctgttcgcttcattcattgcccccacaatcctaggcctacccgccgcagtactgatcattctatttccccctctattgatccccacctccaaatatctcatcaacaaccgactaatcaccacccaacaatgactaatcaaactaacctcaaaacaaataataaccatacacaacactaaaggacgaacctgatctcttatactagtatccttaatcatttttattgccacaactaacctcctcggactcctgcctcactcatttacaccaaccacccaactatctataaacctagccatggccatccccttatgagcgggcgcagtgattataggctttcgctctaagattaaaaatgccctagcccacttcttaccacaaggcacacctacaccccttatccccatactagttattatcgaaaccatcagcctactcattcaaccaatagccctggccgtacgcctaaccgctaacattactgcaggccacctactcatgcacctaattggaagcgccaccctagcaatatcaaccattaaccttccctctacacttatcatcttcacaattctaatcctactgactatcctagaaatcgctgtcgccttaatccaagcctacgttttcacacttctagtaagcctctacctgcacgacaacacataatgacccaccaatcacatgcctatcatatagtaaaacccagcccatgacccctaacaggggccctctcagccctcctaatgacctccggcctagccatgtgatttcacttccactccataacgctcctcatactaggcctactaaccaacacactaaccatataccaatgatggcgcgatgtaacacgagaaagcacataccaaggccaccacacaccacctgtccaaaaaggccttcgatacgggataatcctatttattacctcagaagtttttttcttcgcaggatttttctgagccttttaccactccagcctagcccctaccccccaattaggagggcactggcccccaacaggcatcaccccgctaaatcccctagaagtcccactcctaaacacatccgtattactcgcatcaggagtatcaatcacctgagctcaccatagtctaatagaaaacaaccgaaaccaaataattcaagcactgcttattacaattttactgggtctctattttaccctcctacaagcctcagagtacttcgagtctcccttcaccatttccgacggcatctacggctcaacattttttgtagccacaggcttccacggacttcacgtcattattggctcaactttcctcactatctgcttcatccgccaactaatatttcactttacatccaaacatcactttggcttcgaagccgccgcctgatactggcattttgtagatgtggtttgactatttctgtatgtctccatctattgatgagggtcttactcttttagtataaatagtaccgttaacttccaattaactagttttgacaacattcaaaaaagagtaataaacttcgccttaattttaataatcaacaccctcctagccttactactaataattattacattttgactaccacaactcaacggctacatagaaaaatccaccccttacgagtgcggcttcgaccctatatcccccgcccgcgtccctttctccataaaattcttcttagtagctattaccttcttattatttgatctagaaattgccctccttttacccctaccatgagccctacaaacaactaacctgccactaatagttatgtcatccctcttattaatcatcatcctagccctaagtctggcctatgagtgactacaaaaaggattagactgaaccgaattggtatatagtttaaacaaaacgaatgatttcgactcattaaattatgataatcatatctaccaaatgcccctcatttacataaatattatactagcatttaccatctcacttctaggaatactagtatatcgctcacacctcatatcctccctactatgcctagaaggaataatactatcgctgttcattatagctactctcataaccctcaacacccactccctcttagccaatattgtgcctattgccatactagtctttgccgcctgcgaagcagcggtgggcctagccctactagtctcaatctccaacacatatggcctagactacgtacataacctaaacctactccaatgctaaaactaatcgtcccaacaattatattactaccactgacatgactttccaaaaaacacataatttgaatcaacacaaccacccacagcctaattattagcatcatccctctactattttttaaccaaatcaacaacaacctatttagctgttccccaaccttttcctccgaccccctaacaacccccctcctaatactaactacctgactcctacccctcacaatcatggcaagccaacgccacttatccagtgaaccactatcacgaaaaaaactctacctctctatactaatctccctacaaatctccttaattataacattcacagccacagaactaatcatattttatatcttcttcgaaaccacacttatccccaccttggctatcatcacccgatgaggcaaccagccagaacgcctgaacgcaggcacatacttcctattctacaccctagtaggctcccttcccctactcatcgcactgatttacactcacaacaccctaggctcactaaacattctactactcactctcactgcccaagaactatcaaactcctgagccaacaacttaatatgactagcttacacaatagcttttatagtaaagatacctctttacggactccacttatgactccctaaagcccatgtcgaagcccccatcgctgggtcaatagtacttgccgcagtactcttaaaactaggcggctatggtataatacgcctcacactcattctcaaccccctgacaaaacacatagcctaccccttccttgtactatccctatgaggcataattataacaagctccatctgcctacgacaaacagacctaaaatcgctcattgcatactcttcaatcagccacatagccctcgtagtaacagccattctcatccaaaccccctgaagcttcaccggcgcagtcattctcataatcgcccacggacttacatcctcattactattctgcctagcaaactcaaactacgaacgcactcacagtcgcatcataatcctctctcaaggacttcaaactctgctcccactaatagctttttgatgacttctagcaagcctcgctaacctcgccttaccccccactattaacctactgggagaactctctgtgctagtaaccacgttctcctgatcaaatatcactctcctacttacaggactcaacatactagtcacagccctatactccctctacatatttaccacaacacaatggggctcactcacccaccacattaacaacataaaaccctcattcacacgagaaaacaccctcatgttcatacacctatcccccattctcctcctatccctcaaccccgacatcattaccgggttttcctcttgtaaatatagtttaaccaaaacatcagattgtgaatctgacaacagaggcttacgaccccttatttaccgagaaagctcacaagaactgctaactcatgcccccatgtctaacaacatggctttctcaacttttaaaggataacagctatccattggtcttaggccccaaaaattttggtgcaactccaaataaaagtaataaccatgcacactactataaccaccctaaccctgacttccctaattccccccatccttaccaccctcgttaaccctaacaaaaaaaactcatacccccattatgtaaaatccattatcgcatccacctttattatcagtctcttccccacaacaatattcatgtgcctagaccaagaagttattatctcgaactgacactgagccacaacccaaacaacccagctctccctaagcttcaaactagactacttctccataatattcatccctgtagcattgttcgttacatggtccatcatagaattctcactgtgatatataaactcagacccaaacattaatcagttcttcaaatatctactcatcttcctaattaccatactaatcttagttaccgctaacaacctattccaactgttcatcggctgagagggcgtaggaattatatccttcttgctcatcagttgatgatacgcccgagcagatgccaacacagcagccattcaagcaatcctatacaaccgtatcggcgatatcggtttcatcctcgccttagcatgatttatcctacactccaactcatgagacccacaacaaatagcccttctaaacgctaatccaagcctcaccccactactaggcctcctcctagcagcagcaggcaaatcagcccaattaggtctccacccctgactcccctcagccatagaaggccccaccccagtctcagccctactccactcaagcactatagttgtagcaggaatcttcttactcatccgcttccaccccctagcagaaaatagcccactaatccaaactctaacactatgcttaggcgctatcaccactctgttcgcagcagtctgcgcccttacacaaaatgacatcaaaaaaatcgtagccttctccacttcaagtcaactaggactcataatagttacaatcggcatcaaccaaccacacctagcattcctgcacatctgtacccacgccttcttcaaagccatactatttatgtgctccggatccatcatccacaaccttaacaatgaacaagatattcgaaaaataggaggactactcaaaaccatacctctcacttcaacctccctcaccattggcagcctagcattagcaggaatacctttcctcacaggtttctactccaaagaccacatcatcgaaaccgcaaacatatcatacacaaacgcctgagccctatctattactctcatcgctacctccctgacaagcgcctatagcactcgaataattcttctcaccctaacaggtcaacctcgcttccccacccttactaacattaacgaaaataaccccaccctactaaaccccattaaacgcctggcagccggaagcctattcgcaggatttctcattactaacaacatttcccccgcatcccccttccaaacaacaatccccctctacctaaaactcacagccctcgctgtcactttcctaggacttctaacagccctagacctcaactacctaaccaacaaacttaaaataaaatccccactatgcacattttatttctccaacatactcggattctaccctaacatcacacaccgcacaatcccctatctaggccttctcgcgagccaaaacctgcccctactcctcctagacctaacctgactagaaaagctattacctaaaacaatttcacagcaccaaatctccacctccatcatcacctcaacccaaaaaggcataattaaactttacttcctctctttcttcttcccactcatcctaaccctactcctaatcacataacctattcccccgagcaatctcaattacaatatatacaccaacaaacaatgttcaaccagtaactactactaatcaacgcccatagtcatacaaagcccccgcaccaataggatcctcccgaatcaaccctgacccctctccttcataaattattcagcttcctacactattaaagtttaccacaaccaccaccccatcatactctttcacccacagcaccaatcctacctccatcgctaaccccactaaaacactcaccaagacctcaacccctgacccccatgcctcaggatactcctcaatagccatcgctgtagtatatccaaagacaaccatcattccccctaaataaattaaaaaaactattaaacccatataacctcccccaaaattcagaataataacacacccgaccacaccgctaacaatcaatactaaacccccataaataggagaaggcttagaagaaaaccccacaaaccccattactaaacccacactcaacagaaacaaagcatacatcattattctcgcacgggctacaaccacgaccaatgatatgaaaaaccatcgttgtatttcaactacaagaacaccaatgaccccaatacgcaaaattaaccccctaataaaattaattaaccactcattcatcgacctccccaccccatccaacatctccgcatgatgaaacttcggctcactccttggcgcctgcctgatcctccaaatcaccacaggactattcctagccatacactactcaccagacgcctcaaccgccttttcatcaatcgcccacatcactcgagacgtaaattatggctgaatcatccgctaccttcacgccaatggcgcctcaatattctttatctgcctcttcctacacatcgggcgaggcctatattacggatcatttctctactcagaaacctgaaacatcggcattatcctcctgcttgcaactatagcaacagccttcataggctatgtcctcccgtgaggccaaatatcattctgaggggccacagtaattacaaacttactatccgccatcccatacattgggacagacctagttcaatgaatctgaggaggctactcagtagacagtcccaccctcacacgattctttacctttcacttcatcttgcccttcattattgcagccctagcagcactccacctcctattcttgcacgaaacgggatcaaacaaccccctaggaatcacctcccattccgataaaatcaccttccacccttactacacaatcaaagacgccctcggcttacttctcttcattctctccttaatgacattaacactattctcaccagacctcctaggcgacccagacaattataccctagccaaccccttaaacacccctccccacatcaagcccgaatgatatttcctattcgcctacacaattctccgatccgtccctaacaagctaggaggcgtccttgccctattactatccatcctcatcctagcaataatccccatcctccatatatccaaacaacaaagcataatatttcgcccactaagccaatcactttattgactcctagccgcagacctcctcattctaacctgaatcggaggacaaccagtaagctacccttttaccatcattggacaagtagcatccgtactatacttcacaacaatcctaatcctaataccaactatctccctaattgaaaacaaaatactcaaatgggcctgtccttgtagtataaactaatacaccagtcttgtaaaccgaagatgaaaacctttttccaaggacaaatcagagaaaaagtctttaactccaccattagcacccaaagctaagattctaatttaaactattctctgttctttcatggggaagcagatttgggtaccacccaagtattgactcacccatcaacaaccgctatgtatttcgtacattactgccagccaccatgaatattgcacggtaccataaatacttgaccacctgtagtacataaaaacccaatccacatcaaaaccccctccccatgcttacaagcaagtacagcaatcaaccctcaactatcacacatcaactgcaactccaaagccacccctcacccactaggataccaacaaacctacccatctttaacagtacatagtacataaagccatctaccgtacatagcacattacagtcaaatcccttctcgtccccatggatgacccccctcagataggggtcccttgaccaccatcctccgtgaaatcaatatcccgcacaagagtgctactctcctcgctccgggcccataacacttgggggtagctaaagtgaactgtatccgacatctggttcctacttcagggccataaagcctaaatagcccacacgttccccttaaataagacatcacgatg

SEQ ID NO: 254 - DNA, 16572 bp, Homo sapiens mitochondrial
  3110: "n" refers to a nucleotide at position 3107 of the Cambridge Reference Sequence (CRS, Anderson et al. 1981 Nature 290:457-465), later determined to be absent from the human mtDNA sequence according to the revised CRS (rCRS, Andrews et al. 1999 Nature Genetics 23:147); "n" therefore represents a single nucleotide deletion at a position corresponding to nucleotide 3107 of SEQ ID NO:1 as provided herein.
gatcacaggtctatcaccctattaaccactcacgggagctctccatgcatttggtattttcgtctggggggtatgcacgcgatagcattgcgagacgctggagccggagcaccctatgtcgcagtatctgtctttgattcctgcctcatcctattatttatcgcacctacgttcaatattacaggcgaacatacttactaaagtgtgttaattaattaatgcttgtaggacataataataacaattgaatgtctgcacagccgctttccacacagacatcataacaaaaaatttccaccaaaccccccctccccccccgcttctggccacagcacttaaacacatctctgccaaaccccaaaaacaaagaaccctaacaccagcctaaccagatttcaaattttatcttttggcggtatgcacttttaacagtcaccccccaactaacacattatttttccctcccactcccatactactaatctcatcaatacaacccccgcccatcctacccaacacacacacaccgctgctaaccccataccccgaaccaaccaaaccccaaagacaccccccacagtttatgtagcttacctcctcaaagcaatacactgaaaatgtttagacgggctcacatcaccccataaacaaataggtttggtcctagcctttctattagctcttagtaagattacacatgcaagcatccccgttccagtgagttcaccctctaaatcaccacgatcaaaagggacaagcatcaagcacgcagcaatgcagctcaaaacgcttagcctagccacacccccacgggaaacagcagtgattaacctttagcaataaacgaaagtttaactaagctatactaaccccagggttggtcaatttcgtgccagccaccgcggtcacacgattaacccaagtcaatagaagccggcgtaaagagtgttttagatcaccccctccccaataaagctaaaactcacctgagttgtaaaaaactccagttgacacaaaatagactacgaaagtggctttaacatatctgaacacacaatagctaagacccaaactgggattagataccccactatgcttagccctaaacctcaacagttaaatcaacaaaactgctcgccagaacactacgagccacagcttaaaactcaaaggacctggcggtgcttcatatccctctagaggagcctgttctgtaatcgataaaccccgatcaacctcaccacctcttgctcagcctatataccgccatcttcagcaaaccctgatgaaggctacaaagtaagcgcaagtacccacgtaaagacgttaggtcaaggtgtagcccatgaggtggcaagaaatgggctacattttctaccccagaaaactacgatagcccttatgaaacttaagggtcgaaggtggatttagcagtaaactgagagtagagtgcttagttgaacagggccctgaagcgcgtacacaccgcccgtcaccctcctcaagtatacttcaaaggacatttaactaaaacccctacgcatttatatagaggagacaagtcgtaacatggtaagtgtactggaaagtgcacttggacgaaccagagtgtagcttaacacaaagcacccaacttacacttaggagatttcaacttaacttgaccgctctgagctaaacctagccccaaacccactccaccttactaccagacaaccttagccaaaccatttacccaaataaagtataggcgatagaaattgaaacctggcgcaatagatatagtaccgcaagggaaagatgaaaaattataaccaagcataatatagcaaggactaacccctataccttctgcataatgaattaactagaaataactttgcaaggagagccaaagctaagacccccgaaaccagacgagctacctaagaacagctaaaagagcacacccgtctatgtagcaaaatagtgggaagatttataggtagaggcgacaaacctaccgagcctggtgatagctggttgtccaagatagaatcttagttcaactttaaatttgcccacagaaccctctaaatccccttgtaaatttaactgttagtccaaagaggaacagctctttggacactaggaaaaaaccttgtagagagagtaaaaaatttaacacccatagtaggcctaaaagcagccaccaattaagaaagcgttcaagctcaacacccactacctaaaaaatcccaaacatataactgaactcctcacacccaattggaccaatctatcaccctatagaagaactaatgttagtataagtaacatgaaaacattctcctccgcataagcctgcgtcagattaaaacactgaactgacaattaacagcccaatatctacaatcaaccaacaagtcattattaccctcactgtcaacccaacacaggcatgctcataaggaaaggttaaaaaaagtaaaaggaactcggcaaatcttaccccgcctgtttaccaaaaacatcacctctagcatcaccagtattagaggcaccgcctgcccagtgacacatgtttaacggccgcggtaccctaaccgtgcaaaggtagcataatcacttgttccttaaatagggacctgtatgaatggctccacgagggttcagctgtctcttacttttaaccagtgaaattgacctgcccgtgaagaggcgggcataacacagcaagacgagaagaccctatggagctttaatttattaatgcaaacagtacctaacaaacccacaggtcctaaactaccaaacctgcattaaaaatttcggttggggcgacctcggagcagaacccaacctccgagcagtacatgctaagacttcaccagtcaaagcgaactactatactcaattgatccaataacttgaccaacggaacaagttaccctagggataacagcgcaatcctattctagagtccatatcaacaatagggtttacgacctcgatgttggatcaggacatcccgatggtgcagccgctattaaaggttcgtttgttcaacgattaaagtcctacgtgatctgagttcagaccggagtaatccaggtcggtttctatctacnttcaaattcctccctgtacgaaaggacaagagaaataaggcctacttcacaaagcgccttcccccgtaaatgatatcatctcaacttagtattatacccacacccacccaagaacagggtttgttaagatggcagagcccggtaatcgcataaaacttaaaactttacagtcagaggttcaattcctcttcttaacaacatacccatggccaacctcctactcctcattgtacccattctaatcgcaatggcattcctaatgcttaccgaacgaaaaattctaggctatatacaactacgcaaaggccccaacgttgtaggcccctacgggctactacaacccttcgctgacgccataaaactcttcaccaaagagcccctaaaacccgccacatctaccatcaccctctacatcaccgccccgaccttagctctcaccatcgctcttctactatgaacccccctccccatacccaaccccctggtcaacctcaacctaggcctcctatttattctagccacctctagcctagccgtttactcaatcctctgatcagggtgagcatcaaactcaaactacgccctgatcggcgcactgcgagcagtagcccaaacaatctcatatgaagtcaccctagccatcattctactatcaacattactaataagtggctcctttaacctctccacccttatcacaacacaagaacacctctgattactcctgccatcatgacccttggccataatatgatttatctccacactagcagagaccaaccgaacccccttcgaccttgccgaaggggagtccgaactagtctcaggcttcaacatcgaatacgccgcaggccccttcgccctattcttcatagccgaatacacaaacattattataataaacaccctcaccactacaatcttcctaggaacaacatatgacgcactctcccctgaactctacacaacatattttgtcaccaagaccctacttctaacctccctgttcttatgaattcgaacagcatacccccgattccgctacgaccaactcatacacctcctatgaaaaaacttcctaccactcaccctagcattacttatatgatatgtctccatacccattacaatctccagcattccccctcaaacctaagaaatatgtctgataaaagagttactttgatagagtaaataataggagcttaaacccccttatttctaggaccatgagaatcgaacccatccctgagaatccaaaattctccgtgccacctatcacaccccatcctaaagtaaggtcagctaaataagctatcgggcccataccccgaaaatgttggttatacccttcccgtactaattaatcccctggcccaacccgtcatctactctaccatctttgcaggcacactcatcacagcgctaagctcgcactgattttttacctgagtaggcctagaaataaacatgctagcttttattccagttctaaccaaaaaaataaaccctcgttccacagaagctgccatcaagtatttcctcacgcaagcaaccgcatccataatccttctaatagctatcctcttcaacaatatactctccggacaatgaaccataaccaatactaccaatcaatactcatcattaataatcataatggctatagcaataaaactaggaatagccccctttcacttctgagtcccagaggttacccaaggcacccctctgacatccggcctgcttcttctcacatgacaaaaactagcccccatctcaatcatataccaaatctctccctcactaaacgtaagccttctcctcactctctcaatcttatccatcatagcaggcagttgaggtggattaaaccaaacccagctacgcaaaatcttagcatactcctcaattacccacataggatgaataatagcagttctaccgtacaaccctaacataaccattcttaatttaactatttatattatcctaactactaccgcattcctactactcaacttaaactccagcaccacgaccctactactatctcgcacctgaaacaagctaacatgactaacacccttaattccatccaccctcctctccctaggaggcctgcccccgctaaccggctttttgcccaaatgggccattatcgaagaattcacaaaaaacaatagcctcatcatccccaccatcatagccaccatcaccctccttaacctctacttctacctacgcctaatctactccacctcaatcacactactccccatatctaacaacgtaaaaataaaatgacagtttgaacatacaaaacccaccccattcctccccacactcatcgcccttaccacgctactcctacctatctccccttttatactaataatcttatagaaatttaggttaaatacagaccaagagccttcaaagccctcagtaagttgcaatacttaatttctgtaacagctaaggactgcaaaaccccactctgcatcaactgaacgcaaatcagccactttaattaagctaagcccttactagaccaatgggacttaaacccacaaacacttagttaacagctaagcaccctaatcaactggcttcaatctacttctcccgccgccgggaaaaaaggcgggagaagccccggcaggtttgaagctgcttcttcgaatttgcaattcaatatgaaaatcacctcggagctggtaaaaagaggcctaacccctgtctttagatttacagtccaatgcttcactcagccattttacctcacccccactgatgttcgccgaccgttgactattctctacaaaccacaaagacattggaacactatacctattattcggcgcatgagctggagtcctaggcacagctctaagcctccttattcgagccgagctgggccagccaggcaaccttctaggtaacgaccacatctacaacgttatcgtcacagcccatgcatttgtaataatcttcttcatagtaatacccatcataatcggaggctttggcaactgactagttcccctaataatcggtgcccccgatatggcgtttccccgcataaacaacataagcttctgactcttacctccctctctcctactcctgctcgcatctgctatagtggaggccggagcaggaacaggttgaacagtctaccctcccttagcagggaactactcccaccctggagcctccgtagacctaaccatcttctccttacacctagcaggtgtctcctctatcttaggggccatcaatttcatcacaacaattatcaatataaaaccccctgccataacccaataccaaacgcccctcttcgtctgatccgtcctaatcacagcagtcctacttctcctatctctcccagtcctagctgctggcatcactatactactaacagaccgcaacctcaacaccaccttcttcgaccccgccggaggaggagaccccattctataccaacacctattctgatttttcggtcaccctgaagtttatattcttatcctaccaggcttcggaataatctcccatattgtaacttactactccggaaaaaaagaaccatttggatacataggtatggtctgagctatgatatcaattggcttcctagggtttatcgtgtgagcacaccatatatttacagtaggaatagacgtagacacacgagcatatttcacctccgctaccataatcatcgctatccccaccggcgtcaaagtatttagctgactcgccacactccacggaagcaatatgaaatgatctgctgcagtgctctgagccctaggattcatctttcttttcaccgtaggtggcctgactggcattgtattagcaaactcatcactagacatcgtactacacgacacgtactacgttgtagcccacttccactatgtcctatcaataggagctgtatttgccatcataggaggcttcattcactgatttcccctattctcaggctacaccctagaccaaacctacgccaaaatccatttcactatcatattcatcggcgtaaatctaactttcttcccacaacactttctcggcctatccggaatgccccgacgttactcggactaccccgatgcatacaccacatgaaacatcctatcatctgtaggctcattcatttctctaacagcagtaatattaataattttcatgatttgagaagccttcgcttcgaagcgaaaagtcctaatagtagaagaaccctccataaacctggagtgactatatggatgccccccaccctaccacacattcgaagaacccgtatacataaaatctagacaaaaaaggaaggaatcgaaccccccaaagctggtttcaagccaaccccatggcctccatgactttttcaaaaaggtattagaaaaaccatttcataactttgtcaaagttaaattataggctaaatcctatatatcttaatggcacatgcagcgcaagtaggtctacaagacgctacttcccctatcatagaagagcttatcacctttcatgatcacgccctcataatcattttccttatctgcttcctagtcctgtatgcccttttcctaacactcacaacaaaactaactaatactaacatctcagacgctcaggaaatagaaaccgtctgaactatcctgcccgccatcatcctagtcctcatcgccctcccatccctacgcatcctttacataacagacgaggtcaacgatccctcccttaccatcaaatcaattggccaccaatggtactgaacctacgagtacaccgactacggcggactaatcttcaactcctacatacttcccccattattcctagaaccaggcgacctgcgactccttgacgttgacaatcgagtagtactcccgattgaagcccccattcgtataataattacatcacaagacgtcttgcactcatgagctgtccccacattaggcttaaaaacagatgcaattcccggacgtctaaaccaaaccactttcaccgctacacgaccgggggtatactacggtcaatgctctgaaatctgtggagcaaaccacagtttcatgcccatcgtcctagaattaattcccctaaaaatctttgaaatagggcccgtatttaccctatagcaccccctctaccccctctagagcccactgtaaagctaacttagcattaaccttttaagttaaagattaagagaaccaacacctctttacagtgaaatgccccaactaaatactaccgtatggcccaccataattacccccatactccttacactattcctcatcacccaactaaaaatattaaacacaaactaccacctacctccctcaccaaagcccataaaaataaaaaattataacaaaccctgagaaccaaaatgaacgaaaatctgttcgcttcattcattgcccccacaatcctaggcctacccgccgcagtactgatcattctatttccccctctattgatccccacctccaaatatctcatcaacaaccgactaatcaccacccaacaatgactaatcaaactaacctcaaaacaaatgataaccatacacaacactaaaggacgaacctgatctcttatactagtatccttaatcatttttattgccacaactaacctcctcggactcctgcctcactcatttacaccaaccacccaactatctataaacctagccatggccatccccttatgagcgggcgcagtgattataggctttcgctctaagattaaaaatgccctagcccacttcttaccacaaggcacacctacaccccttatccccatactagttattatcgaaaccatcagcctactcattcaaccaatagccctggccgtacgcctaaccgctaacattactgcaggccacctactcatgcacctaattggaagcgccaccctagcaatatcaaccattaaccttccctctacacttatcatcttcacaattctaattctactgactatcctagaaatcgctgtcgccttaatccaagcctacgttttcacacttctagtaagcctctacctgcacgacaacacataatgacccaccaatcacatgcctatcatatagtaaaacccagcccatgacccctaacaggggccctctcagccctcctaatgacctccggcctagccatgtgatttcacttccactccataacgctcctcatactaggcctactaaccaacacactaaccatataccaatgatggcgcgatgtaacacgagaaagcacataccaaggccaccacacaccacctgtccaaaaaggccttcgatacgggataatcctatttattacctcagaagtttttttcttcgcaggatttttctgagccttttaccactccagcctagcccctaccccccaattaggagggcactggcccccaacaggcatcaccccgctaaatcccctagaagtcccactcctaaacacatccgtattactcgcatcaggagtatcaatcacctgagctcaccatagtctaatagaaaacaaccgaaaccaaataattcaagcactgcttattacaattttactgggtctctattttaccctcctacaagcctcagagtacttcgagtctcccttcaccatttccgacggcatctacggctcaacattttttgtagccacaggcttccacggacttcacgtcattattggctcaactttcctcactatctgcttcatccgccaactaatatttcactttacatccaaacatcactttggcttcgaagccgccgcctgatactggcattttgtagatgtggtttgactatttctgtatgtctccatctattgatgagggtcttactcttttagtataaatagtaccgttaacttccaattaactagttttgacaacattcaaaaaagagtaataaacttcgccttaattttaataatcaacaccctcctagccttactactaataattattacattttgactaccacaactcaacggctacatagaaaaatccaccccttacgagtgcggcttcgaccctatatcccccgcccgcgtccctttctccataaaattcttcttagtagctattaccttcttattatttgatctagaaattgccctccttttacccctaccatgagccctacaaacaactaacctgccactaatagttatgtcatccctcttattaatcatcatcctagccctaagtctggcctatgagtgactacaaaaaggattagactgaaccgaattggtatatagtttaaacaaaacgaatgatttcgactcattaaattatgataatcatatttaccaaatgcccctcatttacataaatattatactagcatttaccatctcacttctaggaatactagtatatcgctcacacctcatatcctccctactatgcctagaaggaataatactatcgctgttcattatagctactctcataaccctcaacacccactccctcttagccaatattgtgcctattgccatactagtctttgccgcctgcgaagcagcggtgggcctagccctactagtctcaatctccaacacatatggcctagactacgtacataacctaaacctactccaatgctaaaactaatcgtcccaacaattatattactaccactgacatgactttccaaaaaacacataatttgaatcaacacaaccacccacagcctaattattagcatcatccctctactattttttaaccaaatcaacaacaacctatttagctgttccccaaccttttcctccgaccccctaacaacccccctcctaatactaactacctgactcctacccctcacaatcatggcaagccaacgccacttatccagtgaaccactatcacgaaaaaaactctacctctctatactaatctccctacaaatctccttaattataacattcacagccacagaactaatcatattttatatcttcttcgaaaccacacttatccccaccttggctatcatcacccgatgaggcaaccagccagaacgcctgaacgcaggcacatacttcctattctacaccctagtaggctcccttcccctactcatcgcactaatttacactcacaacaccctaggctcactaaacattctactactcactctcactgcccaagaactatcaaactcctgagccaacaacttaatatgactagcttacacaatagcttttatagtaaagatacctctttacggactccacttatgactccctaaagcccatgtcgaagcccccatcgctgggtcaatagtacttgccgcagtactcttaaaactaggcggctatggtataatacgcctcacactcattctcaaccccctgacaaaacacatagcctaccccttccttgtactatccctatgaggcataattataacaagctccatctgcctacgacaaacagacctaaaatcgctcattgcatactcttcaatcagccacatagccctcgtagtaacagccattctcatccaaaccccctgaagcttcaccggcgcagtcattctcataatcgcccacgggcttacatcctcattactattctgcctagcaaactcaaactacgaacgcactcacagtcgcatcataatcctctctcaaggacttcaaactctactcccactaatagctttttgatgacttctagcaagcctcgctaacctcgccttaccccccactattaacctactgggagaactctctgtgctagtaaccacgttctcctgatcaaatatcactctcctacttacaggactcaacatactagtcacagccctatactccctctacatatttaccacaacacaatggggctcactcacccaccacattaacaacataaaaccctcattcacacgagaaaacaccctcatgttcatacacctatcccccattctcctcctatccctcaaccccgacatcattaccgggttttcctcttgtaaatatagtttaaccaaaacatcagattgtgaatctgacaacagaggcttacgaccccttatttaccgagaaagctcacaagaactgctaactcatgcccccatgtctaacaacatggctttctcaacttttaaaggataacagctatccattggtcttaggccccaaaaattttggtgcaactccaaataaaagtaataaccatgcacactactataaccaccctaaccctgacttccctaattccccccatccttaccaccctcgttaaccctaacaaaaaaaactcatacccccattatgtaaaatccattgtcgcatccacctttattatcagtctcttccccacaacaatattcatgtgcctagaccaagaagttattatctcgaactgacactgagccacaacccaaacaacccagctctccctaagcttcaaactagactacttctccataatattcatccctgtagcattgttcgttacatggtccatcatagaattctcgctgtgatatataaactcagacccaaacattaatcagttcttcaaatatctactcatcttcctaattaccatactaatcttagttaccgctaacaacctattccaactgttcatcggctgagagggcgtaggaattatatccttcttgctcatcagttgatgatacgcccgagcagatgccaacacagcagccattcaagcaatcctatacaaccgtatcggcgatatcggtttcatcctcgccttagcatgatttatcctacactccaactcatgagacccacaacaaatagcccttctaaacgctaatccaagcctcaccccactactaggcctcctcctagcagcagcaggcaaatcagcccaattaggtctccacccctgactcccctcagccatagaaggccccaccccagtctcagccctactccactcaagcactatagttgtagcaggaatcttcttactcatccgcttccaccccctagcagaaaatagcccactaatccaaactctaacactatgcttaggcgctatcaccactctgttcgcagcagtctgcgcccttacacaaaatgacatcaaaaaaatcgtagccttctccacttcaagtcaactaggactcataatagttacaatcggcatcaaccaaccacacctagcattcctgcacatctgtacccacgccttcttcaaagccatactatttatgtgctccgggtccatcatccacaaccttaacaatgaacaagatattcgaaaaataggaggactactcaaaaccatacctctcacttcaacctccctcaccattggcagcctagcattagcaggaatacctttcctcacaggtttctactccaaagaccacatcatcgaaaccgcaaacatatcatacacaaacgcctgagccctatctattactctcatcgctacctccctgacaagcgcctatagcactcgaataattcttctcaccctaacaggtcaacctcgcttccccacccttactaacattaacgaaaataaccccaccctactaaaccccattaaacgcctggcagccggaagcctattcgcaggatttctcattactaacaacatttcccccgcatcccccttccaaacaacaatccccctctacctaaaactcacagccctcgctgtcactttcctaggacttctaacagccctagacctcaactacctaaccaacaaacttaaaataaaatccccactatgcacattttatttctccaacatactcggattctaccctagcatcacacaccgcacaatcccctatctaggccttcttacgagccaaaacctgcccctactcctcctagacctaacctgactagaaaagctattacctaaaacaatttcacagcaccaaatctccacctccatcatcacctcaacccaaaaaggcataattaaactttacttcctctctttcttcttcccactcatcctaaccctactcctaatcacataacctattcccccgagcaatctcaattacaatatatacaccaacaaacaatgttcaaccagtaactactactaatcaacgcccataatcatacaaagcccccgcaccaataggatcctcccgaatcaaccctgacccctctccttcataaattattcagcttcctacactattaaagtttaccacaaccaccaccccatcatactctttcacccacagcaccaatcctacctccatcgctaaccccactaaaacactcaccaagacctcaacccctgacccccatgcctcaggatactcctcaatagccatcgctgtagtatatccaaagacaaccatcattccccctaaataaattaaaaaaactattaaacccatataacctcccccaaaattcagaataataacacacccgaccacaccgctaacaatcaatactaaacccccataaataggagaaggcttagaagaaaaccccacaaaccccattactaaacccacactcaacagaaacaaagcatacatcattattctcgcacggactacaaccacgaccaatgatatgaaaaaccatcgttgtatttcaactacaagaacaccaatgaccccaatacgcaaaactaaccccctaataaaattaattaaccactcattcatcgacctccccaccccatccaacatctccgcatgatgaaacttcggctcactccttggcgcctgcctgatcctccaaatcaccacaggactattcctagccatgcactactcaccagacgcctcaaccgccttttcatcaatcgcccacatcactcgagacgtaaattatggctgaatcatccgctaccttcacgccaatggcgcctcaatattctttatctgcctcttcctacacatcgggcgaggcctatattacggatcatttctctactcagaaacctgaaacatcggcattatcctcctgcttgcaactatagcaacagccttcataggctatgtcctcccgtgaggccaaatatcattctgaggggccacagtaattacaaacttactatccgccatcccatacattgggacagacctagttcaatgaatctgaggaggctactcagtagacagtcccaccctcacacgattctttacctttcacttcatcttgcccttcattattgcagccctagcagcactccacctcctattcttgcacgaaacgggatcaaacaaccccctaggaatcacctcccattccgataaaatcaccttccacccttactacacaatcaaagacgccctcggcttacttctcttccttctctccttaatgacattaacactattctcaccagacctcctaggcgacccagacaattataccctagccaaccccttaaacacccctccccacatcaagcccgaatgatatttcctattcgcctacacaattctccgatccgtccctaacaaactaggaggcgtccttgccctattactatccatcctcatcctagcaataatccccatcctccatatatccaaacaacaaagcataatatttcgcccactaagccaatcactttattgactcctagccgcagacctcctcattctaacctgaatcggaggacaaccagtaagctacccttttaccatcattggacaagtagcatccgtactatacttcacaacaatcctaatcctaataccaactatctccctaattgaaaacaaaatactcaaatggacctgtccttgtagtataaactaatacaccagtcttgtaaaccggagatgaaaacctttttccaaggacaaatcagagaaaaagtctttaactccaccattagcacccaaagctaagattctaatttaaactattctctgttctttcatggggaagcagatttgggtaccacccaagtattgactcacccatcaacaaccgctatgtatttcgtacattactgccagccaccatgaatattgtacggtaccataaatacttgaccacctgtagtacataaaaacccaatccacatcaaaaccccctccccatgcttacaagcaagtacagcaatcaaccctcaactatcacacatcaactgcaactccaaagccacccctcacccactaggataccaacaaacctacccacccttaacagcacatagtacataaagccatttaccgtacatagcacattacagtcaaatcccttctcgtccccatggatgacccccctcagataggggtcccttgaccaccatcctccgtgaaatcaatatcccgcacaagagtgctactctcctcgctccgggcccataacacttgggggtagctaaagtgaactgtatccgacatctggttcctacttcagggtcataaagcctaaatagcccacacgttccccttaaataagacatcacgatg

SEQ ID NO: 255 - DNA, 16574 bp, Homo sapiens mitochondrial
  3112: "n" refers to a nucleotide at position 3107 of the Cambridge Reference Sequence (CRS, Anderson et al. 1981 Nature 290:457-465), later determined to be absent from the human mtDNA sequence according to the revised CRS (rCRS, Andrews et al. 1999 Nature Genetics 23:147); "n" therefore represents a single nucleotide deletion at a position corresponding to nucleotide 3107 of SEQ ID NO:1 as provided herein.
gatcacaggtctatcaccctattaaccactcacgggagctctccatgcatttggtattttcgtctggggggtgtgcacgcgatagcattgcgagacgctggagccggagcaccctatgtcgcagtatctgtctttgattcctgcctcatcccattatttatcgcacctacgttcaatattacaggcgaacatacttactaaagtgtgttaattaattaatgcttgtaggacataataataacaattgaatgtctgcacagccgctttccacacagacatcataacaaaaaatttccaccaaaccccccctccccccccgcttctggccacagcacttaaacacatctctgccaaaccccaaaaacaaagaaccctaacaccagcctaaccagatttcaaattttatcttttggcggtatgcacttttaacagtcaccccccaactaacacattattttcccctcccactcccatactactaatctcatcaatacaacccccgcccatcctacccagcacacacacaccacgctgctaaccccataccccgaaccaaccaaaccccaaagacaccccccacagtttatgtagcttacctcctcaaagcaatacactgaaaatgtttagacgggctcacatcaccccataaacaaataggtttggtcctagcctttctattagctcttagtaagattacacatgcaagcatccccattccagtgagttcaccctctaaatcaccacgatcaaaagggacaagcatcaagcacgcagcaatgcagctcaaaacgcttagcctagccacacccccacgggaaacagcagtgattaacctttagcaataaacgaaagtttaactaagctatactaaccccagggttggtcaatttcgtgccagccaccgcggtcacacgattaacccaagtcaatagaagccggcgtaaagagtgttttagatcaccccctccccaataaagctaaaactcacctgagttgtaaaaaactccagttgacacaaaatagactacgaaagtggctttaacatatctgaacacacaatagctaagacccaaactgggattagataccccactatgcttagccctaaacctcaacagttaaatcaacaaaactgctcgccagaacactacgagccacagcttaaaactcaaaggacctggcggtgcttcatatccctctagaggagcctgttctgtaatcgataaaccccgatcaacctcaccacctcttgctcagcctatataccgccatcttcagcaaaccctgatgaaggctacaaagtaagcgcaagtacccacgtaaagacgttaggtcaaggtgtagcccatgaggtggcaagaaatgggctacattttctaccccagaaaactacgatagcccttatgaaacttaagggtcgaaggtggatttagcagtaaactgagagtagagtgcttagttgaacagggccctgaagcgcgtacacaccgcccgtcaccctcctcaagtatacttcaaaggacatttaactaaaacccctacgcatttatatagaggagacaagtcgtaacatggtaagtgtactggaaagtgcacttggacgaaccagagtgtagcttaacacaaagcacccaacttacacttaggagatttcaacttaacttgaccgctctgagctaaacctagccccaaacccactccaccttactaccagacaaccttagccaaaccatttacccaaataaagtataggcgatagaaattgaaacctggcgcaatagatatagtaccgcaagggaaagatgaaaaattataaccaagcataatatagcaaggactaacccctataccttctgcataatgaattaactagaaataactttgcaaggagaaccaaagctaagacccccgaaaccagacgagctacctaagaacagctaaaagagcacacccgtctatgtagcaaaatagtgggaagatttataggtagaggcgacaaacctaccgagcctggtgatagctggttgtccaagatagaatcttagttcaactttaaatttgcccacagaaccctctaaatccccttgtaaatttaactgttagtccaaagaggaacagctctttggacactaggaaaaaaccttgtagagagagtaaaaaatttaacacccatagtaggcctaaaagcagccaccaattaagaaagcgttcaagctcaacacccactacctaaaaaatcccaaacatataactgaactcctcacacccaattggaccaatctatcaccctatagaagaactaatgttagtataagtaacatgaaaacattctcctccgcataagcctgcgtcagattaaaacactgaactgacaattaacagcccaatatctacaatcaaccaacaagtcattattaccctcactgtcaacccaacacaggcatgctcataaggaaaggttaaaaaaagtaaaaggaactcggcaaatcttaccccgcctgtttaccaaaaacatcacctctagcatcaccagtattagaggcaccgcctgcccagtgacacatgtttaacggccgcggtaccctaaccgtgcaaaggtagcataatcacttgttccttaaatagggacctgtatgaatggctccacgagggttcagctgtctcttacttttaaccagtgaaattgacctgcccgtgaagaggcgggcatgacacagcaagacgagaagaccctatggagctttaatttattaatgcaaacagtacctaacaaacccacaggtcctaaactaccaaacctgcattaaaaatttcggttggggcgacctcggagcagaacccaacctccgagcagtacatgctaagacttcaccagtcaaagcgaactactatactcaattgatccaataacttgaccaacggaacaagttaccctagggataacagcgcaatcctattctagagtccatatcaacaatagggtttacgacctcgatgttggatcaggacatcccgatggtgcagccgctattaaaggttcgtttgttcaacgattaaagtcctacgtgatctgagttcagaccggagtaatccaggtcggtttctatctacnttcaaattcctccctgtacgaaaggacaagagaaataaggcctacttcacaaagcgccttcccccgtaaatgatatcatctcaacttagtattatacccacacccacccaagaacagggtttgttaagatggcagagcccggtaatcgcataaaacttaaaactttacagtcagaggttcaattcctcttcttaacaacatacccatggccaacctcctactcctcattgtacccattctaatcgcaatggcattcctaatgcttaccgaacgaaaaattctaggctatatacaactacgcaaaggccccaacgttgtaggcccctacgggctactacaacccttcgctgacgccataaaactcttcaccaaagagcccctaaaacccgccacatctaccatcaccctctacatcaccgccccgaccttagctctcaccatcgctcttctactatgaacccccctccccatacccaaccccctggtcaacctcaacctaggcctcctatttattctagccacctctagcctagccgtttactcaatcctctgatcagggtgagcatcaaactcaaactacgccctgatcggcgcactgcgagcagtagcccaaacaatctcatatgaagtcaccctagccatcattctactatcaacattactaataagtggctcctttaacctctccacccttatcacaacacaagaacacctctgattactcctgccatcatgacccttggccataatatgatttatctccacactagcagagaccaaccgaacccccttcgaccttgccgaaggggagtccgaactagtctcaggcttcaacatcgaatacgccgcaggccccttcgccctattcttcatagccgaatacacaaacattattataataaacaccctcaccactacaatcttcctaggaacaacatatgacgcactctcccctgaactctacacaacatattttgtcaccaagaccctacttctaacctccctgttcttatgaattcgaacagcatacccccgattccgctacgaccaactcatacacctcctatgaaaaaacttcctaccactcaccctagcattacttatatgacatgtctccatacccattacaatctccagcattccccctcaaacctaagaaatatgtctgataaaagagttactttgatagagtaaataataggagcttaaacccccttatttctaggactatgagaatcgaacccatccctgagaatccaaaattctccgtgccacctatcacaccccatcctaaagtaaggtcagctaaataagctatcgggcccataccccgaaaatgttggttatacccttcccgtactaattaatcccctggcccaacccgtcatctactctaccatctttgcaggcacactcatcacagcgctaagctcgcactgattttttacctgagtaggcctagaaataaacatgctagcttttattccagttctaaccaaaaaaataaaccctcgttccacagaagctgccatcaagtatttcctcacgcaagcaaccgcatccataatccttctaatagctatcctcttcaacaatatactctccggacaatgaaccataaccaatactaccaatcaatactcatcattaataatcataatggctatagcaataaaactaggaatagccccctttcacttctgagtcccagaggttacccaaggcacccctctgacatccggcctgcttcttctcacatgacaaaaactagcccccatctcaatcatataccaaatctctccctcactagacgtaagccttctcctcactctctcaatcttatccatcatagcaggcagttgaggtggattaaaccaaacccagctacgcaaaatcttagcatactcctcaattacccacataggatgaataatagcagttctaccgtacaaccctaacataaccattcttaatttaactatttatattatcctaactactaccgcattcctactactcaacttaaactccagcaccacgaccctactactatctcgcacctgaaacaagctaacatgactaacacccttaattccatccaccctcctctccctaggaggcctgcccccgctaaccggctttttgcccaaatgggccattatcgaagaattcacaaaaaacaatagcctcatcatccccaccatcatagccaccatcaccctccttaacctctacttctacctacgcctaatctactccacctcaatcacactactccccatatctaacaacgtaaaaataaaatgacagtttgaacatacaaaacccaccccattcctccccacactcatcgcccttaccacgctactcctacctatctccccttttatactaataatcttatagaaatttaggttaaatacagaccaagagccttcaaagccctcagtaagttgcaatacttaatttctgtaacagctaaggactgcaaaaccccactctgcatcaactgaacgcaaatcagccactttaattaagctaagcccttactagaccaatgggacttaaacccacaaacacttagttaacagctaagcaccctaatcaactggcttcaatctacttctcccgccgccgggaaaaaaggcgggagaagccccggcaggtttgaagctgcttcttcgaatttgcaattcaatatgaaaatcacctcggagctggtaaaaagaggcctaacccctgtctttagatttacagtccaatgcttcactcagccattttacctcacccccactgatgttcgccgaccgttgactattctctacaaaccacaaagacattggaacactatacctattattcggcgcatgagctggagtcctaggcacagctctaagcctccttattcgagccgagctgggccagccaggcaaccttctaggtaacgaccacatctacaacgttatcgtcacagcccatgcatttgtaataatcttcttcatagtaatacccatcataatcggaggctttggcaactgactagttcccctaataatcggtgcccccgatatggcgtttccccgcataaacaacataagcttctgactcttacctccctctctcctactcctgctcgcatctgctatagtggaggccggagcaggaacaggttgaacagtctaccctcccttagcagggaactactcccaccctggagcctccgtagacctaaccatcttctccttacacctagcaggtgtctcctctatcttaggggccatcaatttcatcacaacaattatcaatataaaaccccctgccataacccaataccaaacgcccctcttcgtctgatccgtcctaatcacagcagtcctacttctcctatctctcccagtcctagctgctggcatcactatactactaacagaccgcaacctcaacaccaccttcttcgaccccgccggaggaggagaccccattctataccaacacctattctgatttttcggtcaccctgaagtttatattcttatcctaccaggcttcggaataatctcccatattgtaacttactactccggaaaaaaagaaccatttggatacataggtatggtctgagctatgatatcaattggcttcctagggtttatcgtgtgagcacaccatatatttacagtaggaatagacgtagacacacgagcatatttcacctccgctaccataatcatcgctatccccaccggcgtcaaagtatttagctgactcgccacactccacggaagcaatatgaaatgatctgctgcagtgctctgagccctaggattcatctttcttttcaccgtaggtggcctgactggcattgtattagcaaactcatcactagacatcgtactacacgacacgtactacgttgtagctcacttccactatgtcctatcaataggagctgtatttgccatcataggaggcttcattcactgatttcccctattctcaggctacaccctagaccaaacctacgccaaaatccatttcactatcatattcatcggcgtaaatctaactttcttcccacaacactttctcggcctatccggaatgccccgacgttactcggactaccccgatgcatacaccacatgaaacatcctatcatctgtaggctcattcatttctctaacagcagtaatattaataattttcatgatttgagaagccttcgcttcgaagcgaaaagtcctaatagtagaagaaccctccataaacctggagtgactatatggatgccccccaccctaccacacattcgaagaacccgtatacataaaatctagacaaaaaaggaaggaatcgaaccccccaaagctggtttcaagccaaccccatggcctccatgactttttcaaaaaggtattagaaaaaccatttcataactttgtcaaagttaaattataggctaaatcctatatatcttaatggcacatgcagcgcaagtaggtctacaagacgctacttcccctatcatagaagagcttatcacctttcatgatcacgccctcataatcattttccttatctgcttcctagtcctgtatgcccttttcctaacactcacaacaaaactaactaatactaacatctcagacgctcaggaaatagaaaccgtctgaactatcctgcccgccatcatcctagtcctcatcgccctcccatccctacgcatcctttacataacagacgaggtcaacgatccctcccttaccatcaaatcaattggccaccaatggtactgaacctacgagtacaccgactacggcggactaatcttcaactcctacatacttcccccattattcctagaaccaggcgacctgcgactccttgacgttgacaatcgagtagtactcccgattgaagcccccattcgtataataattacatcacaagacgtcttgcactcatgagctgtccccacattaggcttaaaaacagatgcaattcccggacgtctaaaccaaaccactttcaccgctacacgaccgggggtatactacggtcaatgctctgaaatctgtggagcaaaccacagtttcatgcccatcgtcctagaattaattcccctaaaaatctttgaaatagggcccgtatttaccctatagcaccccctctaccccctctagagcccactgtaaagctaacttagcattaaccttttaagttaaagattaagagaaccaacacctctttacagtgaaatgccccaactaaatactaccgtatggcccaccataattacccccatactccttacactattcctcatcacccaactaaaaatattaaacacaaactaccacctacctccctcaccaaagcccataaaaataaaaaattataacaaaccctgagaaccaaaatgaacgaaaatctgttcgcttcattcattgcccccacaatcctaggcctacccgccgcagtactgatcattctatttccccctctattgatccccacctccaaatatctcatcaacaaccgactaatcaccacccaacaatgactaatcaaactaacctcaaaacaaataataaccatacacaacactaaaggacgaacctgatctcttatactagtatccttaatcatttttattgccacaactaacctcctcggactcctgcctcactcatttacaccaaccacccaactatctataaacctagccatggccatccccttatgagcgggcgcagtgattataggctttcgctctaagattaaaaatgccctagcccacttcttaccacaaggcacacctacaccccttatccccatactagttattatcgaaaccatcagcctactcattcaaccaatagccctggccgtacgcctaaccgctaacattactgcaggccacctactcatgcacctaattggaagcgccaccctagcaatatcaaccattaaccttccctctacacttatcatcttcacaattctaattctactgactatcctagaaatcgctgtcgccttaatccaagcctacgttttcacacttctagtaagcctctacctgcacgacaacacataatgacccaccaatcacatgcctatcatatagtaaaacccagcccatgacccctaacaggggccctctcagccctcctaatgacctccggcctagccatgtgatttcacttccactccataacgctcctcatactaggcctactaaccaacacactaaccatataccaatgatggcgcgatgtaacacgagaaagcacataccaaggccaccacacaccacctgtccaaaaaggccttcgatacgggataatcctatttattacctcagaagtttttttcttcgcaggatttttctgagccttttaccactccagcctagcccctaccccccaattaggagggcactggcccccaacaggcatcaccccgctaaatcccctagaagtcccactcctaaacacatccgtattactcgcatcaggagtatcaatcacctgagctcaccatagtctaatagaaaacaaccgaaaccaaataattcaagcactgcttattacaattttactgggtctctattttaccctcctacaagcctcagagtacttcgagtctcccttcaccatttccgacggcatctacggctcaacattttttgtagccacaggcttccacggacttcacgtcattattggctcaactttcctcactatctgcttcatccgccaactaatatttcactttacatccaaacatcactttggcttcgaagccgccgcctgatactggcattttgtagatgtggtttgactatttctgtatgtctccatctattgatgagggtcttactcttttagtataaatagtaccgttaacttccaattaactagttttgacaacattcaaaaaagagtaataaacttcgccttaattttaataatcaacaccctcctagccttactactaataattattacattttgactaccacaactcaacggctacatagaaaaatccaccccttacgagtgcggcttcgaccctatatcccccgcccgcgtccctttctccataaaattcttcttagtagctattaccttcttattatttgatctagaaattgccctccttttacccctaccatgagccctacaaacaactaacctgccactaatagttatgtcatccctcttattaatcatcatcctagccctaagtctggcctatgagtgactacaaaaaggattagactgaaccgaattggtatatagtttaaacaaaacgaatgatttcgactcattaaattatgataatcatatctaccaaatgcccctcatttacataaatattatactagcatttaccatctcacttctaggaatactagtatatcgctcacacctcatatcctccctactatgcctagaaggaataatactatcgctgttcattatagctactctcataaccctcaacacccactccctcttagccaatattgtgcctattgccatactagtctttgccgcctgcgaagcagcggtgggcctagccctactagtctcaatctccaacacatatggcctagactacgtacataacctaaacctactccaatgctaaaactaatcgtcccaacaattatattactaccactgacatgactttccaaaaaacacataatttgaatcaacacaaccacccacagcctaattattagcatcatccctctactattttttaaccaaatcaacaacaacctatttagctgttccccaaccttttcctccgaccccctaacaacccccctcctaatactaactacctgactcctacccctcacaatcatggcaagccaacgccacttatccagtgaaccactatcacgaaaaaaactctacctctctatactaatctccctacaaatctccttaattataacattcacagccacagaactaatcatattttatatcttcttcgaaaccacacttatccccaccttggctatcatcacccgatgaggcaaccagccagaacgcctgaacgcaggcacatacttcctattctacaccctagtaggctcccttcccctactcatcgcactgatttacactcacaacaccctaggctcactaaacattctactactcactctcactgcccaagaactatcaaactcctgagccaacaacttaatatgactagcttacacaatagcttttatagtaaagatacctctttacggactccacttatgactccctaaagcccatgtcgaagcccccatcgctgggtcaatagtacttgccgcagtactcttaaaactaggcggctatggtataatacgcctcacactcattctcaaccccctgacaaaacacatagcctaccccttccttgtactatccctatgaggcataattataacaagctccatctgcctacgacaaacagacctaaaatcgctcattgcatactcttcaatcagccacatagccctcgtagtaacagccattctcatccaaaccccctgaagcttcaccggcgcagtcattctcataatcgcccacggacttacatcctcattactattctgcctagcaaactcaaactacgaacgcactcacagtcgcatcataatcctctctcaaggacttcaaactctactcccactaatagctttttgatgacttctagcaagcctcgctaacctcgccttaccccccactattaacctactgggagaactctctgtgctagtaaccacgttctcctgatcaaatatcactctcctacttacaggactcaacatactagtcacagccctatactccctctacatatttaccacaacacaatggggctcactcacccaccacattaacaacataaaaccctcattcacacgagaaaacaccctcatgttcatacacctatcccccattctcctcctatccctcaaccccgacatcattaccgggttttcctcttgtaaatatagtttaaccaaaacatcagattgtgaatctgacaacagaggcttacgaccccttatttaccgagaaagctcacaagaactgctaactcatgcccccatgtctaacaacatggctttctcaacttttaaaggataacagctatccattggtcttaggccccaaaaattttggtgcaactccaaataaaagtaataaccatgcacactactataaccaccctaaccctgacttccctaattccccccatccttaccaccctcgttaaccctaacaaaaaaaactcatacccccattatgtaaaatccattgtcgcatccacctttattatcagtctcttccccacaacaatattcatgtgcctagaccaagaagttattatctcgaactgacactgagccacaacccaaacaacccagctctccctaagcttcaaactagactacttctccataatattcatccctgtagcattgttcgttacatggtcaatcatagaattctcactgtgatatataaactcagacccaaacattaatcagttcttcaaatatctactcatcttcctaattaccatactaatcttagttaccgctaacaacctattccaactgttcatcggctgagagggcgtaggaattatatccttcttgctcatcagttgatgatacgcccgagcagatgccaacacagcagccattcaagcaatcctatacaaccgtatcggcgatatcggtttcatcctcgccttagcatgatttatcctacactccaactcatgagacccacaacaaatagcccttctaaacgctaatccaagcctcaccccactactaggcctcctcctagcagcagcaggcaaatcagcccaattaggtctccacccctgactcccctcagccatagaaggccccaccccagtctcagccctactccactcaagcactatagttgtagcaggaatcttcttactcatccgcttccaccccctagcagaaaatagcccactaatccaaactctaacactatgcttaggcgctatcaccactctgttcgcagcagtctgcgcccttacacaaaatgacatcaaaaaaatcgtagccttctccacttcaagtcaactaggactcataatagttacaatcggcatcaaccaaccacacctagcattcctgcacatctgtacccacgccttcttcaaagccatactatttatgtgctccggatccatcatccacaaccttaacaatgaacaagatattcgaaaaataggaggactactcaaaaccatacctctcacttcaacctccctcaccattggcagcctagcattagcaggaatacctttcctcacaggtttctactccaaagaccacatcatcgaaaccgcaaacatatcatacacaaacgcctgagccctatctattactctcatcgctacctccctgacaagcgcctatagcactcgaataattcttctcaccctaacaggtcaacctcgcttccccacccttactaacattaacgaaaataaccccaccctactaaaccccattaaacgcctggcagccggaagcctattcgcaggatttctcattactaacaacatttcccccgcatcccccttccaaacaacaatccccctctacctaaaactcacagccctcgctgtcactttcctaggacttctaacagccctagacctcaactacctaaccaacaaacttaaaataaaatccccactatgcacattttatttctccaacatactcggattctaccctagcatcacacaccgcacaatcccctatctaggccttcttacgagccaaaacctgcccctactcctcctagacctaacctgactagaaaagctattacctaaaacaatttcacagcaccaaatctccacctccatcatcacctcaacccaaaaaggcataattaaactttacttcctctctttcttcttcccactcatcctaaccctactcctaatcacataacctattcccccgagcaatctcaattacaatatatacaccaacaaacaatgttcaaccagtaactactactaatcaacgcccataatcatacaaagcccccgcaccaataggatcctcccgaatcaaccctgacccctctccttcataaattattcagcttcctacactattaaagtttaccacaaccaccaccccatcatactctttcacccacagcaccaatcctacctccatcgctaaccccactaaaacactcaccaagacctcaacccctgacccccatgcctcaggatactcctcaatagccatcgctgtagtatatccaaagacaaccatcattccccctaaataaattaaaaaaactattaaacccatataacctcccccaaaattcagaataataacacacccgaccacaccgctaacaatcaatactaaacccccataaataggagaaggcttagaagaaaaccccacaaaccccattactaaacccacactcaacagaaacaaagcatacatcattattctcgcacggactacaaccacgaccaatgatatgaaaaaccatcgttgtatttcaactacaagaacaccaatgaccccaatacgcaaaattaaccccctaataaaattaattaaccactcattcatcgacctccccaccccatccaacatctccgcatgatgaaacttcggctcactccttggcgcctgcctgatcctccaaatcaccacaggactattcctagccatacactactcaccagacgcctcaaccgccttttcatcaatcgcccacatcactcgagacgtaaattatggctgaatcatccgctaccttcacgccaatggcgcctcaatattctttatctgcctcttcctacacatcgggcgaggcctatattacggatcatttctctactcagaaacctgaaacatcggcattatcctcctgcttgcaactatagcaacagccttcataggctatgtcctcccgtgaggccaaatatcattctgaggggccacagtaattacaaacttactatccgccatcccatacattgggacagacctagttcaatgaatctgaggaggctactcagtagacagtcccaccctcacacgattctttacctttcacttcatcttgcccttcattattgcagccctagcagcactccacctcctattcttgcacgaaacgggatcaaacaaccccctaggaatcacctcccattccgataaaatcaccttccacccttactacacaatcaaagacgccctcggcttacttctcttcattctctccttaatgacattaacactattctcaccagacctcctaggcgacccagacaattataccctagccaaccccttaaacacccctccccacatcaagcccgaatgatatttcctattcgcctacacaattctccgatccgtccctaacaagctaggaggcgtccttgccctattactatccatcctcatcctagcaataatccccatcctccatatatccaaacaacaaagcataatatttcgcccactaagccaatcactttattgactcctagccgcagacctcctcattctaacctgaatcggaggacaaccagtaagctacccttttaccatcattggacaagtagcatccgtactatacttcacaacaatcctaatcctaataccaactatctccctaattgaaaacaaaatactcaaatgggcctgtccttgtagtataaactaatacaccagtcttgtaaaccgaagatgaaaacctttttccaaggacaaatcagagaaaaagtctttaactccaccattagcacccaaagctaagattctaatttaaactattctctgttctttcatggggaagcagatttgggtaccacccaagtattgactcacccatcaacaaccgctatgtatttcgtacattactgccagccaccatgaatattgcacggtaccataaatacttgaccacctgtagtacatgaaaacccaatccacatcaaacccccccccccatgcttacaagcaagtacagcaatcaaccctcaactatcacacatcaactgcaactccaaagccacccctcacccactaggataccaacaaacctacccatccttaacagtacatagtacataaagccatttaccgtacatagcacattacagtcaaatcccttctcgtccccatggatgacccccctcagataggggtcccttgaccaccatcctccgtgaaatcaatatcccgcacaagagtgctactctcctcgctccgggcccataacacttgggggtagctaaagtgaactgtatccgacatctggttcctacttcagggccataaagcctaaatagcccacacgttccccttaaataagacatcacgatg

SEQ ID NO: 256 - DNA, 16571 bp, Homo sapiens mitochondrial
  3109: "n" refers to a nucleotide at position 3107 of the Cambridge Reference Sequence (CRS, Anderson et al. 1981 Nature 290:457-465), later determined to be absent from the human mtDNA sequence according to the revised CRS (rCRS, Andrews et al. 1999 Nature Genetics 23:147); "n" therefore represents a single nucleotide deletion at a position corresponding to nucleotide 3107 of SEQ ID NO:1 as provided herein.
gatcacaggtctatcaccctattaaccactcacgggagctctccatgcatttggtattttcgtctggggggtatgcacgcgatagcattgcgagacgctggagccggagcaccctatgtcgcagtatctgtctttgattcctgcctcatcctattatttatcgcacctacgttcaatattacaggcgaacatacttactaaagtgtgttaattaattaatgcttgtaggacataataataacaattgaatgtctgcacagccgctttccacacagacatcataacaaaaaatttccaccaaaccccccctcccccccgcttctggccacagcacttaaacacatctctgccaaaccccaaaaacaaagaaccctaacaccagcctaaccagatttcaaattttatcttttggcggtatgcacttttaacagtcaccccccaactaacacattattttcccctcccactcccatactactaatctcatcaatacaacccccgcccatcctacccagcacacacacaccgctgctaaccccataccccgaaccaaccaaaccccaaagacaccccccacagtttatgtagcttacctcctcaaagcaatacactgaaaatgtttagacgggctcacatcaccccataaacaaataggtttggtcctagcctttctattagctcttagtaagattacacatgcaagcatccccgttccagtgagttcaccctctaaatcaccacgatcaaaagggacaagcatcaagcacgcagcaatgcagctcaaaacgcttagcctagccacacccccacgggaaacagcagtgattaacctttagcaataaacgaaagtttaactaagctatactaaccccagggttggtcaatttcgtgccagccaccgcggtcacacgattaacccaagtcaatagaagccggcgtaaagagtgttttagatcaccccctccccaataaagctaaaactcacctgagttgtaaaaaactccagttgacacaaaatagactacgaaagtggctttaacatatctgaacacacaatagctaagacccaaactgggattagataccccactatgcttagccctaaacctcaacagttaaatcaacaaaactgctcgccagaacactacgagccacagcttaaaactcaaaggacctggcggtgcttcatatccctctagaggagcctgttctgtaatcgataaaccccgatcaacctcaccacctcttgctcagcctatataccgccatcttcagcaaaccctgatgaaggctacaaagtaagcgcaagtacccacgtaaagacgttaggtcaaggtgtagcccatgaggtggcaagaaatgggctacattttctaccccagaaaactacgatagcccttatgaaacttaagggtcgaaggtggatttagcagtaaactgagagtagagtgcttagttgaacagggccctgaagcgcgtacacaccgcccgtcaccctcctcaagtatacttcaaaggacatttaactaaaacccctacgcatttatatagaggagacaagtcgtaacatggtaagtgtactggaaagtgcacttggacgaaccagagtgtagcttaacacaaagcacccaacttacacttaggagatttcaacttaacttgaccgctctgagctaaacctagccccaaacccactccaccttactaccagacaaccttagccaaaccatttacccaaataaagtataggcgatagaaattgaaacctggcgcaatagatatagtaccgcaagggaaagatgaaaaattataaccaagcataatatagcaaggactaacccctataccttctgcataatgaattaactagaaataactttgcaaggagagccaaagctaagacccccgaaaccagacgagctacctaagaacagctaaaagagcacacccgtctatgtagcaaaatagtgggaagatttataggtagaggcgacaaacctaccgagcctggtgatagctggttgtccaagatagaatcttagttcaactttaaatttgcccacagaaccctctaaatccccttgtaaatttaactgttagtccaaagaggaacagctctttggacactaggaaaaaaccttgtagagagagtaaaaaatttaacacccatagtaggcctaaaagcagccaccaattaagaaagcgttcaagctcaacacccactacctaaaaaatcccaaacatataactgaactcctcacacccaattggaccaatctatcaccctatagaagaactaatgttagtataagtaacatgaaaacattctcctccgcataagcctgcgtcagattaaaacactgaactgacaattaacagcccaatatctacaatcaaccaacaagtcattattaccctcactgtcaacccaacacaggcatgctcataaggaaaggttaaaaaaagtaaaaggaactcggcaaatcttaccccgcctgtttaccaaaaacatcacctctagcatcaccagtattagaggcaccgcctgcccagtgacacatgtttaacggccgcggtaccctaaccgtgcaaaggtagcataatcacttgttccttaaatagggacctgtatgaatggctccacgagggttcagctgtctcttacttttaaccagtgaaattgacctgcccgtgaagaggcgggcataacacagcaagacgagaagaccctatggagctttaatttattaatgcaaacagtacctaacaaacccacaggtcctaaactaccaaacctgcattaaaaatttcggttggggcgacctcggagcagaacccaacctccgagcagtacatgctaagacttcaccagtcaaagcgaactactatactcaattgatccaataacttgaccaacggaacaagttaccctagggataacagcgcaatcctattctagagtccatatcaacaatagggtttacgacctcgatgttggatcaggacatcccaatggtgcagccgctattaaaggttcgtttgttcaacgattaaagtcctacgtgatctgagttcagaccggagtaatccaggtcggtttctatctacnttcaaattcctccctgtacgaaaggacaagagaaataaggcctacttcacaaagcgccttcccccgtaaatgatatcatctcaacttagtattatacccacacccacccaagaacagggtttgttaagatggcagagcccggtaatcgcataaaacttaaaactttacagtcagaggttcaattcctcttcttaacaacatacccatggccaacctcctactcctcattgtacccattctaatcgcaatggcattcctaatgcttaccgaacgaaaaattctaggctatatacaactacgcaaaggccccaacgttgtaggcccctacgggctactacaacccttcgctgacgccataaaactcttcaccaaagagcccctaaaacccgccacatctaccatcaccctctacatcaccgccccgaccttagctctcaccatcgctcttctactatgaacccccctccccatacccaaccccctggtcaacctcaacctaggcctcctatttattctagccacctctagcctagccgtttactcaatcctctgatcagggtgagcatcaaactcaaactacgccctgatcggcgcactgcgagcagtagcccaaacaatctcatatgaagtcaccctagccatcattctactatcaacattactaataagtggctcctttaacctctccacccttatcacaacacaagaacacctctgattactcctgccatcatgacccttggccataatatgatttatctccacactagcagagaccaaccgaacccccttcgaccttgccgaaggggagtccgaactagtctcaggcttcaacatcgaatacgccgcaggccccttcgccctattcttcatagccgaatacacaaacattattataataaacaccctcaccactacaatcttcctaggaacaacatatgacgcactctcccctgaactctacacaacatattttgtcaccaagaccctacttctaacctccctgttcttatgaattcgaacagcatacccccgattccgctacgaccaactcatacacctcctatgaaaaaacttcctaccactcaccctagcattacttatatgatatgtctccatacccattacaatctccagcattccccctcaaacctaagaaatatgtctgataaaagagttactttgatagagtaaataataggagcttaaacccccttatttctaggactatgagaatcgaacccatccctgagaatccaaaattctccgtgccacctatcacaccccatcctaaagtaaggtcagctaaataagctatcgggcccataccccgaaaatgttggttatacccttcccgtactaattaatcccctggcccaacccgtcatctactctaccatctttgcaggcacactcatcacagcgctaagctcgcactgattttttacctgagtaggcctagaaataaacatgctagcttttattccagttctaaccaaaaaaataaaccctcgttccacagaagctgccatcaagtatttcctcacgcaagcaaccgcatccataatccttctaatagctatcctcttcaacaatatactctccggacaatgaaccataaccaatactaccaatcaatactcatcattaataatcataatggctatagcaataaaactaggaatagccccctttcacttctgagtcccagaggttacccaaggcacccctctgacatccggcctgcttcttctcacatgacaaaaactagcccccatctcaatcatataccaaatctctccctcactaaacgtaagccttctcctcactctctcaatcttatccatcatagcaggcagttgaggtggattaaaccaaacccagctacgcaaaatcttagcatactcctcaattacccacataggatgaataatagcagttctaccgtacaaccctaacataaccattcttaatttaactatttatattatcctaactactaccgcattcctactactcaacttaaactccagcaccacgaccctactactatctcgcacctgaaacaagctaacatgactaacacccttaattccatccaccctcctctccctaggaggcctgcccccgctaaccggctttttgcccaaatgggccattatcgaagaattcacaaaaaacaatagcctcatcatccccaccatcatagccaccatcaccctccttaacctctacttctacctacgcctaatctactccacctcaatcacactactccccatatctaacaacgtaaaaataaaatgacagtttgaacatacaaaacccaccccattcctccccacactcatcgcccttaccacgctactcctacctatctccccttttatactaataatcttatagaaatttaggttaaatacagaccaagagccttcaaagccctcagtaagttgcaatacttaatttctgtaacagctaaggactgcaaaaccccactctgcatcaactgaacgcaaatcagccactttaattaagctaagcccttactagaccaatgggacttaaacccacaaacacttagttaacagctaagcaccctaatcaactggcttcaatctacttctcccgccgccgggaaaaaaggcgggagaagccccggcaggtttgaagctgcttcttcgaatttgcaattcaatatgaaaatcacctcggagctggtaaaaagaggcctaacccctgtctttagatttacagtccaatgcttcactcagccattttacctcacccccactgatgttcgccgaccgttgactattctctacaaaccacaaagacattggaacactatacctattattcggcgcatgagctggagtcctaggcacagctctaagcctccttattcgagccgagctgggccagccaggcaaccttctaggtaacgaccacatctacaacgttatcgtcacagcccatgcatttgtaataatcttcttcatagtaatacccatcataatcggaggctttggcaactgactagttcccctaataatcggtgcccccgatatggcgtttccccgcataaacaacataagcttctgactcttacctccctctctcctactcctgctcgcatctgctatagtggaggccggagcaggaacaggttgaacagtctaccctcccttagcagggaactactcccaccctggagcctccgtagacctaaccatcttctccttacacctagcaggtgtctcctctatcttaggggccatcaatttcatcacaacaattatcaatataaaaccccctgccataacccaataccaaacgcccctcttcgtctgatccgtcctaatcacagcagtcctacttctcctatctctcccagtcctagctgctggcatcactatactactaacagaccgcaacctcaacaccaccttcttcgaccccgccggaggaggagaccccattctataccaacacctattctgatttttcggtcaccctgaagtttatattcttatcctaccaggcttcggaataatctcccatattgtaacttactactccggaaaaaaagaaccatttggatacataggtatggtctgagctatgatatcaattggcttcctagggtttatcgtgtgagcacaccatatatttacagtaggaatagacgtagacacacgagcatatttcacctccgctaccataatcatcgctatccccaccggcgtcaaagtatttagctgactcgccacactccacggaagcaatatgaaatgatctgctgcagtgctctgagccctaggattcatctttcttttcaccgtaggtggcctgactggcattgtattagcaaactcatcactagacatcgtactacacgacacgtactacgttgtagcccacttccactatgtcctatcaataggagctgtatttgccatcataggaggcttcattcactgatttcccctattctcaggctacaccctagaccaaacctacgccaaaatccatttcactatcatattcatcggcgtaaatctaactttcttcccacaacactttctcggcctatccggaatgccccgacgttactcggactaccccgatgcatacaccacatgaaacatcctatcatctgtaggctcattcatttctctaacagcagtaatattaataattttcatgatttgagaagccttcgcttcgaagcgaaaagtcctaatagtagaagaaccctccataaacctggagtgactatatggatgccccccaccctaccacacattcgaagaacccgtatacataaaatctagacaaaaaaggaaggaatcgaaccccccaaagctggtttcaagccaaccccatggcctccatgactttttcaaaaaggtattagaaaaaccatttcataactttgtcaaagttaaattataggctaaatcctatatatcttaatggcacatgcagcgcaagtaggtctacaagacgctacttcccctatcatagaagagcttatcacctttcatgatcacgccctcataatcattttccttatctgcttcctagtcctgtatgcccttttcctaacactcacaacaaaactaactaatactaacatctcagacgctcaggaaatagaaaccgtctgaactatcctgcccgccatcatcctagtcctcatcgccctcccatccctacgcatcctttacataacagacgaggtcaacgatccctcccttaccatcaaatcaattggccaccaatggtactgaacctacgagtacaccgactacggcggactaatcttcaactcctacatacttcccccattattcctagaaccaggcgacctgcgactccttgacgttgacaatcgagtagtactcccgattgaagcccccattcgtataataattacatcacaagacgtcttgcactcatgagctgtccccacattaggcttaaaaacagatgcaattcccggacgtctaaaccaaaccactttcaccgctacacgaccgggggtatactacggtcaatgctctgaaatctgtggagcaaaccacagtttcatgcccatcgtcctagaattaattcccctaaaaatctttgaaatagggcccgtatttaccctatagcaccccctctaccccctctagagcccactgtaaagctaacttagcattaaccttttaagttaaagattaagagaaccaacacctctttacagtgaaatgccccaactaaatactaccgtatggcccaccataattacccccatactccttacactattcctcatcacccaactaaaaatattaaacacaaactaccacctacctccctcaccaaagcccataaaaataaaaaattataacaaaccctgagaaccaaaatgaacgaaaatctgttcgcttcattcattgcccccacaatcctaggcctacccgccgcagtactgatcattctatttccccctctattgatccccacctccaaatatctcatcaacaaccgactaatcaccacccaacaatgactaatcaaactaacctcaaaacaaatgataaccatacacaacactaaaggacgaacctgatctcttatactagtatccttaatcatttttattgccacaactaacctcctcggactcctgcctcactcatttacaccaaccacccaactatctataaacctagccatggccatccccttatgagcgggcgcagtgattataggctttcgctctaagattaaaaatgccctagcccacttcttaccacaaggcacacctacaccccttatccccatactagttattatcgaaaccatcagcctactcattcaaccaatagccctggccgtacgcctaaccgctaacattactgcaggccacctactcatgcacctaattggaagcgccaccctagcaatatcaaccattaaccttccctctacacttatcatcttcacaattctaattctactgactatcctagaaatcgctgtcgccttaatccaagcctacgttttcacacttctagtaagcctctacctgcacgacaacacataatgacccaccaatcacatgcctatcatatagtaaaacccagcccatgacccctaacaggggccctctcagccctcctaatgacctccggcctagccatgtgatttcacttccactccataacgctcctcatactaggcctactaaccaacacactaaccatataccaatgatggcgcgatgtaacacgagaaagcacataccaaggccaccacacaccacctgtccaaaaaggccttcgatacgggataatcctatttattacctcagaagtttttttcttcgcaggatttttctgagccttttaccactccagcctagcccctaccccccaattaggagggcactggcccccaacaggcatcaccccgctaaatcccctagaagtcccactcctaaacacatccgtattactcgcatcaggagtatcaatcacctgagctcaccatagtctaatagaaaacaaccgaaaccaaataattcaagcactgcttattacaattttactgggtctctattttaccctcctacaagcctcagagtacttcgagtctcccttcaccatttccgacggcatctacggctcaacattttttgtagccacaggcttccacggacttcacgtcattattggctcaactttcctcactatctgcttcatccgccaactaatatttcactttacatccaaacatcactttggcttcgaagccgccgcctgatactggcattttgtagatgtggtttgactatttctgtatgtctccatctattgatgagggtcttactcttttagtataaatagtaccgttaacttccaattaactagttttgacaacattcaaaaaagagtaataaacttcgccttaattttaataatcaacaccctcctagccctactactaataattattacattttgactaccacaactcaacggctacatagaaaaatccaccccttacgagtgcggcttcgaccctatatcccccgcccgcgtccctttctccataaaattcttcttagtagctattaccttcttattatttgatctagaaattgccctccttttacccctaccatgagccctacaaacaactaacctgccactaatagttatgtcatccctcttattaatcatcatcctagccctaagtctggcctatgagtgactacaaaaaggattagactgaaccgaattggtatatagtttaaacaaaacgaatgatttcgactcattaaattatgataatcatatttaccaaatgcccctcatttacataaatattatactagcatttaccatctcacttctaggaatactagtatatcgctcacacctcatatcctccctactatgcctagaaggaataatactatcgctgttcattatagctactctcataaccctcaacacccactccctcttagccaatattgtgcctattgccatactagtctttgccgcctgcgaagcagcggtgggcctagccctactagtctcaatctccaacacatatggcctagactacgtacataacctaaacctactccaatgctaaaactaatcgtcccaacaattatattactaccactgacatgactttccaaaaaacacataatttgaatcaacacaaccacccacagcctaattattagcatcatccctctactattttttaaccaaatcaacaacaacctatttagctgttccccaaccttttcctccgaccccctaacaacccccctcctaatactaactacctgactcctacccctcacaatcatggcaagccaacgccacttatccagtgaaccactatcacgaaaaaaactctacctctctatactaatctccctacaaatctccttaattataacattcacagccacagaactaatcatattttatatcttcttcgaaaccacacttatccccaccttggctatcatcacccgatgaggcaaccagccagaacgcctgaacgcaggcacatacttcctattctacaccctagtaggctcccttcccctactcatcgcactaatttacactcacaacaccctaggctcactaaacattctactactcactctcactgcccaagaactatcaaactcctgagccaacaacttaatatgactagcttacacaatagcttttatagtaaagatacctctttacggactccacttatgactccctaaagcccatgtcgaagcccccatcgctgggtcaatagtacttgccgcagtactcttaaaactaggcggctatggtataatacgcctcacactcattctcaaccccctgacaaaacacatagcctaccccttccttgtactatccctatgaggcataattataacaagctccatctgcctacgacaaacagacctaaaatcgctcattgcatactcttcaatcagccacatagccctcgtagtaacagccattctcatccaaaccccctgaagcttcaccggcgcagtcattctcataatcgcccacgggcttacatcctcattactattctgcctagcaaactcaaactacgaacgcactcacagtcgcatcataatcctctctcaaggacttcaaactctactcccactaatagctttttgatgacttctagcaagcctcgctaacctcgccttaccccccactattaacctactgggagaactctctgtgctagtaaccacgttctcctgatcaaatatcactctcctacttacaggactcaacatactagtcacagccctatactccctctacatatttaccacaacacaatggggctcactcacccaccacattaacaacataaaaccctcattcacacgagaaaacaccctcatgttcatacacctatcccccattctcctcctatccctcaaccccgacatcattaccgggttttcctcttgtaaatatagtttaaccaaaacatcagattgtgaatctgacaacagaggcttacgaccccttatttaccgagaaagctcacaagaactgctaactcatgcccccatgtctaacaacatggctttctcaacttttaaaggataacagctatccattggtcttaggccccaaaaattttggtgcaactccaaataaaagtaataaccatgcacactactataaccaccctaaccctgacttccctaattccccccatccttaccaccctcgttaaccctaacaaaaaaaactcatacccccattatgtaaaatccattgtcgcatccacctttattatcagtctcttccccacaacaatattcatgtgcctagaccaagaagttattatctcgaactgacactgagccacaacccaaacaacccagctctccctaagcttcaaactagactacttctccataatattcatccctgtagcattgttcgttacatggtccatcatagaattctcactgtgatatataaactcagacccaaacattaatcagttcttcaaatatctactcatcttcctaattaccatactaatcttagttaccgctaacaacctattccaactgttcatcggctgagagggcgtaggaattatatccttcttgctcatcagttgatgatacgcccgagcagatgccaacacagcagccattcaagcaatcctatacaaccgtatcggcgatatcggtttcatcctcgccttagcatgatttatcctacactccaactcatgagacccacaacaaatagcccttctaaacgctaatccaagcctcaccccactactaggcctcctcctagcagcagcaggcaaatcagcccaattaggtctccacccctgactcccctcagccatagaaggccccaccccagtctcagccctactccactcaagcactatagttgtagcaggaatcttcttactcatccgcttccaccccctagcagaaaatagcccactaatccaaactctaacactatgcttaggcgctatcaccactctgttcgcagcagtctgcgcccttacacaaaatgacatcaaaaaaatcgtagccttctccacttcaagtcaactaggactcataatagttacaatcggcatcaaccaaccacacctagcattcctgcacatctgtacccacgccttcttcaaagccatactatttatgtgctccgggtccatcatccacaaccttaacaatgaacaagatattcgaaaaataggaggactactcaaaaccatacctctcacttcaacctccctcaccattggcagcctagcattagcaggaatacctttcctcacaggtttctactccaaagaccacatcatcgaaaccgcaaacatatcatacacaaacgcctgagccctatctattactctcatcgctacctccctgacaagcgcctatagcactcgaataattcttctcaccctaacaggtcaacctcgcttccccacccttactaacattaacgaaaataaccccaccctactaaaccccattaaacgcctggcagccggaagcctattcgcaggatttctcattactaacaacatttcccccgcatcccccttccaaacaacaatccccctctacctaaaactcacagccctcgctgtcactttcctaggacttctaacagccctagacctcaactacctaaccaacaaacttaaaataaaatccccactatgcacattttatttctccaacatactcggattctaccctagcatcacacaccgcacaatcccctatctaggccttcttacgagccaaaacctgcccctactcctcctagacctaacctgactagaaaagctattacctaaaacaatttcacagcaccaaatctccacctccatcatcacctcaacccaaaaaggcataattaaactttacttcctctctttcttcttcccactcatcctaaccctactcctaatcacataacctattcccccgagcaatctcaattacaatatatacaccaacaaacaatgttcaaccagtaactactactaatcaacgcccataatcatacaaagcccccgcaccaataggatcctcccgaatcaaccctgacccctctccttcataaattattcagcttcctacactattaaagtttaccacaaccaccaccccatcatactctttcacccacagcaccaatcctacctccatcgctaaccccactaaaacactcaccaagacctcaacccctgacccccatgcctcaggatactcctcaatagccatcgctgtagtatatccaaagacaaccatcattccccctaaataaattaaaaaaactattaaacccatataacctcccccaaaattcagaataataacacacccgaccacaccgctaacaatcaatactaaacccccataaataggagaaggcttagaagaaaaccccacaaaccccattactaaacccacactcaacagaaacaaagcatacatcattattctcgcacggactacaaccacgaccaatgatatgaaaaaccatcgttgtatttcaactacaagaacaccaatgaccccaatacgcaaaactaaccccctaataaaattaattaaccactcattcatcgacctccccaccccatccaacatctccgcatgatgaaacttcggctcactccttggcgcctgcctgatcctccaaatcaccacaggactattcctagccatgcactactcaccagacgcctcaaccgccttttcatcaatcgcccacatcactcgagacgtaaattatggctgaatcatccgctaccttcacgccaatggcgcctcaatattctttatctgcctcttcctacacatcgggcgaggcctatattacggatcatttctctactcagaaacctgaaacatcggcattatcctcctgcttgcaactatagcaacagccttcataggctatgtcctcccgtgaggccaaatatcattctgaggggccacagtaattacaaacttactatccgccatcccatacattgggacagacctagttcaatgaatctgaggaggctactcagtagacagtcccaccctcacacgattctttacctttcacttcatcttgcccttcattattgcagccctagcagcactccacctcctattcttgcacgaaacgggatcaaacaaccccctaggaatcacctcccattccgataaaatcaccttccacccttactacacaatcaaagacgccctcggcttacttctcttccttctctccttaatgacattaacactattctcaccagacctcctaggcgacccagacaattataccctagccaaccccttaaacacccctccccacatcaagcccgaatgatatttcctattcgcctacacaattctccgatccgtccctaacaaactaggaggcgtccttgccctattactatccatcctcatcctagcaataatccccatcctccatatatccaaacaacaaagcataatatttcgcccactaagccaatcactttattgactcctagccgcagacctcctcattctaacctgaatcggaggacaaccagtaagctacccttttaccatcattggacaagtagcatccgtactatacttcacaacaatcctaatcctaataccaactatctccctaattgaaaacaaaatactcaaatgggcctgtccttgtagtataaactaatacaccagtcttgtaaaccggagatgaaaacctttttccaaggacaaatcagagaaaaagtctttaactccaccattagcacccaaagctaagattctaatttaaactattctctgttctttcatggggaagcagatttgggtaccacccaagtattgactcacccatcaacaaccgctatgtatttcgtacattactgccagccaccatgaatattgtacggtaccataaatacttgaccacctgtagtacataaaaacccaatccacatcaaaaccccctccccatgcttacaagcaagtacagcaatcaaccctcaactatcacacatcaactgcaactccaaagccacccctcacccattaggataccaacaaacctactcacccttaacagtacatagtacataaagccatttaccgtacatagcacattacagtcaaatcccttctcgtccccatggatgacccccctcagataggggtcccttgaccaccatcctccgtgaaatcaatatcccgcacaagagtgctactctcctcgctccgggcccataacacttgggggtagctaaagtgaactgtatccgacatctggttcctacttcagggccataaagcctaaatagcccacacgttccccttaaataagacatcacgatg

SEQ ID NO: 257 - DNA, 16573 bp, Homo sapiens mitochondrial
  3111: "n" refers to a nucleotide at position 3107 of the Cambridge Reference Sequence (CRS, Anderson et al. 1981 Nature 290:457-465), later determined to be absent from the human mtDNA sequence according to the revised CRS (rCRS, Andrews et al. 1999 Nature Genetics 23:147); "n" therefore represents a single nucleotide deletion at a position corresponding to nucleotide 3107 of SEQ ID NO:1 as provided herein.
gatcacaggtctatcaccctattaaccactcacgggagctctccatgcatttggtattttcgtctggggggtatgcacgcgatagcattgcgagacgctggagccggagcaccctatgtcgcagtatctgtctttgattcctgcctcatcctattatttatcgcacctacgttcaatattacaggcgaacatacttactaaagtgtgttaattaattaatgcttgtaggacataataataacaattgaatgtctgcacagccgctttccacacagacatcataacaaaaaatttccaccaaaccccccctcccccccccgcttctggccacagcacttaaacacatctctgccaaaccccaaaaacaaagaaccctaacaccagcctaaccagatttcaaattttatcttttggcggtatgcacttttaacagtcaccccccaactaacacattattttcccctcccactcccatactactaatctcatcaatacaacccccgcccatcctacccagcacacacacaccgctgctaaccccataccccgaaccaaccaaaccccaaagacaccccccacagtttatgtagcttacctcctcaaagcaatacactgaaaatgtttagacgggctcacatcaccccataaacaaataggtttggtcctagcctttctattagctcttagtaagattacacatgcaagcatccccgttccagtgagttcaccctctaaatcaccacgatcaaaagggacaagcatcaagcacgcagcaatgcagctcaaaacgcttagcctagccacacccccacgggaaacagcagtgattaacctttagcaataaacgaaagtttaactaagctatactaaccccagggttggtcaatttcgtgccagccaccgcggtcacacgattaacccaagtcaatagaagccggcgtaaagagtgttttagatcaccccctccccaataaagctaaaactcacctgagttgtaaaaaactccagttgacacaaaatagactacgaaagtggctttaacatatctgaacacacaatagctaagacccaaactgggattagataccccactatgcttagccctaaacctcaacagttaaatcaacaaaactgctcgccagaacactacgagccacagcttaaaactcaaaggacctggcggtgcttcatatccctctagaggagcctgttctgtaatcgataaaccccgatcaacctcaccacctcttgctcagcctatataccgccatcttcagcaaaccctgatgaaggctacaaagtaagcgcaagtacccacgtaaagacgttaggtcaaggtgtagcccatgaggtggcaagaaatgggctacattttctaccccagaaaactacgatagcccttatgaaacttaagggtcgaaggtggatttagcagtaaactgagagtagagtgcttagttgaacagggccctgaagcgcgtacacaccgcccgtcaccctcctcaagtatacttcaaaggacatttaactaaaacccctacgcatttatatagaggagacaagtcgtaacatggtaagtgtactggaaagtgcacttggacgaaccagagtgtagcttaacacaaagcacccaacttacacttaggagatttcaacttaacttgaccgctctgagctaaacctagccccaaacccactccaccttactaccagacaaccttagccaaaccatttacccaaataaagtataggcgatagaaattgaaacctggcgcaatagatatagtaccgcaagggaaagatgaaaaattataaccaagcataatatagcaaggactaacccctataccttctgcataatgaattaactagaaataactttgcaaggagagccaaagctaagacccccgaaaccagacgagctacctaagaacagctaaaagagcacacccgtctatgtagcaaaatagtgggaagatttataggtagaggcgacaaacctaccgagcctggtgatagctggttgtccaagatagaatcttagttcaactttaaatttgcccacagaaccctctaaatccccttgtaaatttaactgttagtccaaagaggaacagctctttggacactaggaaaaaaccttgtagagagagtaaaaaatttaacacccatagtaggcctaaaagcagccaccaattaagaaagcgttcaagctcaacacccactacctaaaaaatcccaaacatataactgaactcctcacacccaattggaccaatctatcaccctatagaagaactaatgttagtataagtaacatgaaaacattctcctccgcataagcctgcgtcagattaaaacactgaactgacaattaacagcccaatatctacaatcaaccaacaagtcattattaccctcactgtcaacccaacacaggcatgctcataaggaaaggttaaaaaaagtaaaaggaactcggcaaatcttaccccgcctgtttaccaaaaacatcacctctagcatcaccagtattagaggcaccgcctgcccagtgacacatgtttaacggccgcggtaccctaaccgtgcaaaggtagcataatcacttgttccttaaatagggacctgtatgaatggctccacgagggttcagctgtctcttacttttaaccagtgaaattgacctgcccgtgaagaggcgggcataacacagcaagacgagaagaccctatggagctttaatttattaatgcaaacagtacctaacaaacccacaggtcctaaactaccaaacctgcattaaaaatttcggttggggcgacctcggagcagaacccaacctccgagcagtacatgctaagacttcaccagtcaaagcgaactactatactcaattgatccaataacttgaccaacggaacaagttaccctagggataacagcgcaatcctattctagagtccatatcaacaatagggtttacgacctcgatgttggatcaggacatcccgatggtgcagccgctattaaaggttcgtttgttcaacgattaaagtcctacgtgatctgagttcagaccggagtaatccaggtcggtttctatctacnttcaaattcctccctgtacgaaaggacaagagaaataaggcctacttcacaaagcgccttcccccgtaaatgatatcatctcaacttagtattatacccacacccacccaagaacagggtttgttaagatggcagagcccggtaatcgcataaaacttaaaactttacagtcagaggttcaattcctcttcttaacaacatacccatggccaacctcctactcctcattgtacccattctaatcgcaatggcattcctaatgcttaccgaacgaaaaattctaggctatatacaactacgcaaaggccccaacgttgtaggcccctacgggctactacaacccttcgctgacgccataaaactcttcaccaaagagcccctaaaacccgccacatctaccatcaccctctacatcaccgccccgaccttagctctcaccatcgctcttctactatgaacccccctccccatacccaaccccctggtcaacctcaacctaggcctcctatttattctagccacctctagcctagccgtttactcaatcctctgatcagggtgagcatcaaactcaaactacgccctgatcggcgcactgcgagcagtagcccaaacaatctcatatgaagtcaccctagccatcattctactatcaacattactaataagtggctcctttaacctctccacccttatcacaacacaagaacacctctgattactcctgccgtcatgacccttggccataatatgatttatctccacactagcagagaccaaccgaacccccttcgaccttgccgaaggggagtccgaactagtctcaggcttcaacatcgaatacgccgcaggccccttcgccctattcttcatagccgaatacacaaacattattataataaacaccctcaccactacaatcttcctaggaacaacatatgacgcactctcccctgaactctacacaacatattttgtcaccaagaccctacttctaacctccctgttcttatgaattcgaacagcatacccccgattccgctacgaccaactcatacacctcctatgaaaaaacttcctaccactcaccctagcattacttatatgatatgtctccatacccattacaatctccagcattccccctcaaacctaagaaatatgtctgataaaagagttactttgatagagtaaataataggagcttaaacccccttatttctaggactatgagaatcgaacccatccctgagaatccaaaattctccgtgccacctatcacaccccatcctaaagtaaggtcagctaaataagctatcgggcccataccccgaaaatgttggttatacccttcccgtactaattaatcccctggcccaacccgtcatctactctaccatctttgcaggcacactcatcacagcgctaagctcgcactgattttttacctgagtaggcctagaaataaacatgctagcttttattccagttctaaccaaaaaaataaaccctcgttccacagaagctgccatcaagtatttcctcacgcaagcaaccgcatccataatccttctaatagctatcctcttcaacaatatactctccggacaatgaaccataaccaatactaccaatcaatactcatcattaataatcataatggctatagcaataaaactaggaatagccccctttcacttctgagtcccagaggttacccaaggcacccctctgacatccggcctgcttcttctcacatgacaaaaactagcccccatctcaatcatataccaaatctctccctcactaaacgtaagccttctcctcactctctcaatcttatccatcatagcaggcagttgaggtggattaaaccaaacccagctacgcaaaatcttagcatactcctcaattacccacataggatgaataatagcagttctaccgtacaaccctaacataaccattcttaatttaactatttatattatcctaactactaccgcattcctactactcaacttaaactccagcaccacgaccctactactatctcgcacctgaaacaagctaacatgactaacacccttaattccatccaccctcctctccctaggaggcctgcccccgctaaccggctttttgcccaaatgggccattatcgaagaattcacaaaaaacaatagcctcatcatccccaccatcatagccaccatcaccctccttaacctctacttctacctacgcctaatctactccacctcaatcacactactccccatatctaacaacgtaaaaataaaatgacagtttgaacatacaaaacccaccccattcctccccacactcatcgcccttaccacgctactcctacctatctccccttttatactaataatcttatagaaatttaggttaaatacagaccaagagccttcaaagccctcagtaagttgcaatacttaatttctgtaacagctaaggactgcaaaaccccactctgcatcaactgaacgcaaatcagccactttaattaagctaagcccttactagaccaatgggacttaaacccacaaacacttagttaacagctaagcaccctaatcaactggcttcaatctacttctcccgccgccgggaaaaaaggcgggagaagccccggcaggtttgaagctgcttcttcgaatttgcaattcaatatgaaaatcacctcggagctggtaaaaagaggcctaacccctgtctttagatttacagtccaatgcttcactcagccattttacctcacccccactgatgttcgccgaccgttgactattctctacaaaccacaaagacattggaacactatacctattattcggcgcatgagctggagtcctaggcacagctctaagcctccttattcgagccgagctgggccagccaggcaaccttctaggtaacgaccacatctacaacgttatcgtcacagcccatgcatttgtaataatcttcttcatagtaatacccatcataatcggaggctttggcaactgactagttcccctaataatcggtgcccccgatatggcgtttccccgcataaacaacataagcttctgactcttacctccctctctcctactcctgctcgcatctgctatagtggaggccggagcaggaacaggttgaacagtctaccctcccttagcagggaactactcccaccctggagcctccgtagacctaaccatcttctccttacacctagcaggtgtctcctctatcttaggggccatcaatttcatcacaacaattatcaatataaaaccccctgccataacccaataccaaacgcccctcttcgtctgatccgtcctaatcacagcagtcctacttctcctatctctcccagtcctagctgctggcatcactatactactaacagaccgcaacctcaacaccaccttcttcgaccccgccggaggaggagaccccattctataccaacacctattctgatttttcggtcaccctgaagtttatattcttatcctaccaggcttcggaataatctcccatattgtaacttactactccggaaaaaaagaaccatttggatacataggtatggtctgagctatgatatcaattggcttcctagggtttatcgtgtgagcacaccatatatttacagtaggaatagacgtagacacacgagcatatttcacctccgctaccataatcatcgctatccccaccggcgtcaaagtatttagctgactcgccacactccacggaagcaatatgaaatgatctgctgcagtgctctgagccctaggattcatctttcttttcaccgtaggtggcctgactggcattgtattagcaaactcatcactagacatcgtactacacgacacgtactacgttgtagcccacttccactatgtcctatcaataggagctgtatttgccatcataggaggcttcattcactgatttcccctattctcaggctacaccctagaccaaacctacgccaaaatccatttcactatcatattcatcggcgtaaatctaactttcttcccacaacactttctcggcctatccggaatgccccgacgttactcggactaccccgatgcatacaccacatgaaacatcctatcatctgtaggctcattcatttctctaacagcagtaatattaataattttcatgatttgagaagccttcgcttcgaagcgaaaagtcctaatagtagaagaaccctccataaacctggagtgactatatggatgccccccaccctaccacacattcgaagaacccgtatacataaaatctagacaaaaaaggaaggaatcgaaccccccaaagctggtttcaagccaaccccatggcctccatgactttttcaaaaaggtattagaaaaaccatttcataactttgtcaaagttaaattataggctaaatcctatatatcttaatggcacatgcagcgcaagtaggtctacaagacgctacttcccctatcatagaagagcttatcacctttcatgatcacgccctcataatcattttccttatctgcttcctagtcctgtatgcccttttcctaacactcacaacaaaactaactaatactaacatctcagacgctcaggaaatagaaaccgtctgaactatcctgcccgccatcatcctagtcctcatcgccctcccatccctacgcatcctttacataacagacgaggtcaacgatccctcccttaccatcaaatcaattggccaccaatggtactgaacctacgagtacaccgactacggcggactaatcttcaactcctacatacttcccccattattcctagaaccaggcgacctgcgactccttgacgttgacaatcgagtagtactcccgattgaagcccccattcgtataataattacatcacaagacgtcttgcactcatgagctgtccccacattaggcttaaaaacagatgcaattcccggacgtctaaaccaaaccactttcaccgctacacgaccgggggtatactacggtcaatgctctgaaatctgtggagcaaaccacagtttcatgcccatcgtcctagaattaattcccctaaaaatctttgaaatagggcccgtatttaccctatagcaccccctctaccccctctagagcccactgtaaagctaacttagcattaaccttttaagttaaagattaagagaaccaacacctctttacagtgaaatgccccaactaaatactaccgtatggcccaccataattacccccatactccttacactattcctcatcacccaactaaaaatattaaacacaaactaccacctacctccctcaccaaagcccataaaaataaaaaattataacaaaccctgagaaccaaaatgaacgaaaatctgttcgcttcattcattgcccccacaatcctaggcctacccgccgcagtactgatcattctatttccccctctattgatccccacctccaaatatctcatcaacaaccgactaatcaccacccaacaatgactaatcaaactaacctcaaaacaaatgataaccatacacaacactaaaggacgaacctgatctcttatactagtatccttaatcatttttattgccacaactaacctcctcggactcctgcctcactcatttacaccaaccacccaactatctataaacctagccatggccatccccttatgagcgggcgcagtgattataggctttcgctctaagattaaaaatgccctagcccacttcttaccacaaggcacacctacaccccttatccccatactagttattatcgaaaccatcagcctactcattcaaccaatagccctggccgtacgcctaaccgctaacattactgcaggccacctactcatgcacctaattggaagcgccaccctagcaatatcaaccattaaccttccctctacacttatcatcttcacaattctaattctactgactatcctagaaatcgctgtcgccttaatccaagcctacgttttcacacttctagtaagcctctacctgcacgacaacacataatgacccaccaatcacatgcctatcatatagtaaaacccagcccatgacccctaacaggggccctctcagccctcctaatgacctccggcctagccatgtgatttcacttccactccataacgctcctcatactaggcctactaaccaacacactaaccatataccaatgatggcgcgatgtaacacgagaaagcacataccaaggccaccacacaccacctgtccaaaaaggccttcgatacgggataatcctatttattacctcagaagtttttttcttcgcaggatttttctgagccttttaccactccagcctagcccctaccccccaattaggagggcactggcccccaacaggcatcaccccgctaaatcccctagaagtcccactcctaaacacatccgtattactcgcatcaggagtatcaatcacctgagctcaccatagtctaatagaaaacaaccgaaaccaaataattcaagcactgcttattacaattttactgggtctctattttaccctcctacaagcctcagagtacttcgagtctcccttcaccatttccgacggcatctacggctcaacattttttgtagccacaggcttccacggacttcacgtcattattggctcaactttcctcactatctgcttcatccgccaactaatatttcactttacatccaaacatcactttggcttcgaagccgccgcctgatactggcattttgtagatgtggtttgactatttctgtatgtctccatctattgatgagggtcttactcttttagtataaatagtaccgttaacttccaattaactagttttgacaacattcaaaaaagagtaataaacttcgccttaattttaataatcaacaccctcctagccttactactaataattattacattttgactaccacaactcaacggctacatagaaaaatccaccccttacgagtgcggcttcgaccctatatcccccgcccgcgtccctttctccataaaattcttcttagtagctattaccttcttattatttgatctagaaattgccctccttttacccctgccatgagccctacaaacaactaacctgccactaatagttatgtcatccctcttattaatcatcatcctagccctaagtctggcctatgagtgactacaaaaaggattagactgaaccgaattggtatatagtttaaacaaaacgaatgatttcgactcattaaattatgataatcatatttaccaaatgcccctcatttacataaatattatactagcatttaccatctcacttctaggaatactagtatatcgctcacacctcatatcctccctactatgcctagaaggaataatactatcgctgttcattatagctactctcataaccctcaacacccactccctcttagccaatattgtgcctattgccatactagtctttgccgcctgcgaagcagcggtgggcctagccctactagtctcaatctccaacacatatggcctagactacgtacataacctaaacctactccaatgctaaaactaatcgtcccaacaattatattactaccactgacatgactttccaaaaaacacataatttgaatcaacacaaccacccacagcctaattattagcatcatccctctactattttttaaccaaatcaacaacaacctacttagctgttccccaaccttttcctccgaccccctaacaacccccctcctaatactaactacctgactcctacccctcacaatcatggcaagccaacgccacttatccagtgaaccactatcacgaaaaaaactctacctctctatactaatctccctacaaatctccttaattataacattcacagccacagaactaatcatattttatatcttcttcgaaaccacacttatccccaccttggctatcatcacccgatgaggcaaccagccagaacgcctgaacgcaggcacatacttcctattctacaccctagtaggctcccttcccctactcatcgcactaatttacactcacaacaccctaggctcactaaacattctactactcactctcactgcccaagaactatcaaactcctgagccaacaacttaatatgactagcttacacaatagcttttatagtaaagatacctctttacggactccacttatgactccctaaagcccatgtcgaagcccccatcgctgggtcaatagtacttgccgcagtactcttaaaactaggcggctatggtataatacgcctcacactcattctcaaccccctgacaaaacacatagcctaccccttccttgtactatccctatgaggcataattataacaagctccatctgcctacgacaaacagacctaaaatcgctcattgcatactcttcaatcagccacatagccctcgtagtaacagccattctcatccaaaccccctgaagcttcaccggcgcagtcattctcataatcgcccacgggcttacatcctcattactattctgcctagcaaactcaaactacgaacgcactcacagtcgcatcataatcctctctcaaggacttcaaactctactcccactaatagctttttgatgacttctagcaagcctcgctaacctcgccttaccccccactattaacctactgggagaactctctgtgctagtaaccacgttctcctgatcaaatatcactctcctacttacaggactcaacatactagtcacagccctatactccctctacatatttaccacaacacaatggggctcactcacccaccacattaacaacataaaaccctcattcacacgagaaaacaccctcatgttcatacacctatcccccattctcctcctatccctcaaccccgacatcattaccgggttttcctcttgtaaatatagtttaaccaaaacatcagattgtgaatctgacaacagaggcttacgaccccttatttaccgagaaagctcacaagaactgctaactcatgcccccatgtctaacaacatggctttctcaacttttaaaggataacagctatccattggtcttaggccccaaaaattttggtgcaactccaaataaaagtaataaccatgcacactactataaccaccctaaccctgacttccctaattccccccatccttaccaccctcgttaaccctaacaaaaaaaactcatacccccattatgtaaaatccattgtcgcatccacctttattatcagtctcttccccacaacaatattcatgtgcctagaccaagaagttattatctcgaactgacactgagccacaacccaaacaacccagctctccctaagcttcaaactagactacttctccataatattcatccctgtagcattgttcgttacatggtccatcatagaattctcactgtgatatataaactcagacccaaacattaatcagttcttcaaatatctactcatcttcctaattaccatactaatcttagttaccgctaacaacctattccaactgttcatcggctgagagggcgtaggaattatatccttcttgctcatcagttgatgatacgcccgagcagatgccaacacagcagccattcaagcaatcctatacaaccgtatcggcgatatcggtttcatcctcgccttagcatgatttatcctacactccaactcatgagacccacaacaaatagcccttctaaacgctaatccaagcctcaccccactactaggcctcctcctagcagcagcaggcaaatcagcccaattaggtctccacccctgactcccctcagccatagaaggccccaccccagtctcagccctactccactcaagcactatagttgtagcaggaatcttcttactcatccgcttccaccccctagcagaaaatagcccactaatccaaactctaacactatgcttaggcgctatcaccactctgttcgcagcagtctgcgcccttacacaaaatgacatcaaaaaaatcgtagccttctccacttcaagtcaactaggactcataatagttacaatcggcatcaaccaaccacacctagcattcctgcacatctgtacccacgccttcttcaaagccatactatttatgtgctccgggtccatcatccacaaccttaacaatgaacaagatattcgaaaaataggaggactactcaaaaccatacctctcacttcaacctccctcaccattggcagcctagcattagcaggaatacctttcctcacaggtttctactccaaagaccacatcatcgaaaccgcaaacatatcatacacaaacgcctgagccctatctattactctcatcgctacctccctgacaagcgcctatagcactcgaataattcttctcaccctaacaggtcaacctcgcttccccacccttactaacattaacgaaaataaccccaccctactaaaccccattaaacgcctggcagccggaagcctattcgcaggatttctcattactaacaacatttcccccgcatcccccttccaaacaacaatccccctctacctaaaactcacagccctcgctgtcactttcctaggacttctaacagccctagacctcaactacctaaccaacaaacttaaaataaaatccccactatgcacattttatttctccaacatactcggattctaccctagcatcacacaccgcacaatcccctatctaggccttcttacgagccaaaacctgcccctactcctcctagacctaacctgactagaaaagctattacctaaaacaatttcacagcaccaaatctccacctccatcatcacctcaacccaaaaaggcataattaaactttacttcctctctttcttcttcccactcatcctaaccctactcctaatcacataacctattcccccgagcaatctcaattacaatatatacaccaacaaacaatgttcaaccagtaactactactaatcaacgcccataatcatacaaagcccccgcaccaataggatcctcccgaatcaaccctgacccctctccttcataaattattcagcttcctacactattaaagtttaccacaaccaccaccccatcatactctttcacccacagcaccaatcctacctccatcgctaaccccactaaaacactcaccaagacctcaacccctgacccccatgcctcaggatactcctcaatagccatcgctgtagtatatccaaagacaaccatcattccccctaaataaattaaaaaaactattaaacccatataacctcccccaaaattcagaataataacacacccgaccacaccgctaacaatcaatactaaacccccataaataggagaaggcttagaagaaaaccccacaaaccccattactaaacccacactcaacagaaacaaagcatacatcattattctcgcacggactacaaccacgaccaatgatatgaaaaaccatcgttgtatttcaactacaagaacaccaatgaccccaatacgcaaaactaaccccctaataaaattaattaaccactcattcatcgacctccccaccccatccaacatctccgcatgatgaaacttcggctcactccttggcgcctgcctgatcctccaaatcaccacaggactattcctagccatgcactactcaccagacgcctcaaccgccttttcatcaatcgcccacatcactcgagacgtaaattatggctgaatcatccgctaccttcacgccaatggcgcctcaatattctttatctgcctcttcctacacatcgggcgaggcctatattacggatcatttctctactcagaaacctgaaacatcggcattatcctcctgcttgcaactatagcaacagccttcataggctatgtcctcccgtgaggccaaatatcattctgaggggccacagtaattacaaacttactatccgccatcccatacattgggacagacctagttcaatgaatctgaggaggctactcagtagacagtcccaccctcacacgattctttacctttcacttcatcttgcccttcattattgcagccctagcagcactccacctcctattcttgcacgaaacgggatcaaacaaccccctaggaatcacctcccattccgataaaatcaccttccacccttactacacaatcaaagacgccctcggcttacttctcttccttctctccttaataacattaacactattctcaccagacctcctaggcgacccagacaattataccctagccaaccccttaaacacccctccccacatcaagcccgaatgatatttcctattcgcctacacaattctccgatccgtccctaacaaactaggaggcgtccttgccctattactatccatcctcatcctagcaataatccccatcctccatatatccaaacaacaaagcataatatttcgcccactaagccaatcactttattgactcctagccgcagacctcctcattctaacctgaatcggaggacaaccagtaagctacccttttaccatcattggacaagtagcatccgtactatacttcacaacaatcctaatcctaataccaactatctccctaattgaaaacaaaatactcaaatgggcctgtccttgtagtataaactaatacaccagtcttgtaaaccggagatgaaaacctttttccaaggacaaatcagagaaaaagtctttaactccaccattagcacccaaagctaagattctaatttaaactattctctgttctttcatggggaagcagatttgggtaccacccaagtattgactcacccatcaacaaccgctatgtatttcgtacattactgccagccaccatgaatattgtacggtaccataaatacttgaccacctgtagtacataaaaacccaatccacatcaaacccccccccccatgcttacaagcaagtacagcaatcaaccctcaactatcacacatcaactgcaactccaaagccacccctcacccactaggataccaacaaacctacccacccttaacagtacatagtacataaagccatttaccgtacatagcacattacagtcaaatcccttctcgtccccatggatgacccccctcagataggggtcccttgaccaccatcctccgtgaaatcaatatcccgcacaagagtgctactctcctcgctccgggcccataacacttgggggtagctaaagtgaactgtatccgacatctggttcctacttcagggccataaagcctaaatagcccacacgttccccttaaataagacatcacgatg

SEQ ID NO: 258 - DNA, 16574 bp, Homo sapiens mitochondrial
  3111: "n" refers to a nucleotide at position 3107 of the Cambridge Reference Sequence (CRS, Anderson et al. 1981 Nature 290:457-465), later determined to be absent from the human mtDNA sequence according to the revised CRS (rCRS, Andrews et al. 1999 Nature Genetics 23:147); "n" therefore represents a single nucleotide deletion at a position corresponding to nucleotide 3107 of SEQ ID NO:1 as provided herein.
gatcacaggtctatcaccctattaaccactcacgggagctctccatgcatttggtattttcgtctggggggtatgcacgcgatagcattgcgagacgctggagccggagcaccctatgtcgcagtatctgtctttgattcctgcctcatcctattatttatcgcacctacgttcaatattacaggcgaacatacttactaaagtgtgttaattaattaatgcttgtaggacataataataacaattgaatgtctgcacagccgctttccacacagacatcataacaaaaaatttccaccaaaccccccctcccccccgcttctggccacagcacttaaacacatctctgccaaaccccaaaaacaaagaaccctaacaccagcctaaccagatttcaaattttatcttttggcggtatgcacttttaacagtcaccccccaactaacacattattttcccctcccactcccatactaccaatctcatcaatacaacccccgcccatcctacccagcacacacacaccacgctgctaaccccataccccgaaccaaccaaaccccaaagacaccccccacagtttatgtagcttacctcctcaaagcaatacactgaaaatgtttagacgggctcacatcaccccataaacaaataggtttggtcctagcctttctattagctcttagtaagattacacatgcaagcatccccgttccagtgagttcaccctctaaatcaccacgatcaaaagggacaagcatcaagcacgcagcaatgcagctcaaaacgcttagcctagccacacccccacgggaaacagcagtgattaacctttagcaataaacgaaagtttaactaagctatactaaccccagggttggtcaatttcgtgccagccaccgcggtcacacgattaacccaagtcaatagaagccggcgtaaagagtgttttagatcaccccctccccaataaagctaaaactcacctgagttgtaaaaaactccagttgacacaaaatagactacgaaagtggctttaacatatctgaacacacaatagctaagacccaaactgggattagataccccactatgcttagccctaaacctcaacagttaaatcaacaaaactgctcgccagaacactacgagccacagcttaaaactcaaaggacctggcggtgcttcatatccctctagaggagcctgttctgtaatcgataaaccccgatcaacctcaccacctcttgctcagcctatataccgccatcttcagcaaaccctgatgaaggctacaaagtaagcgcaagtacccacgtaaagacgttaggtcaaggtgtagcccatgaggtggcaagaaatgggctacattttctaccccagaaaactacgatagcccttatgaaacttaagggtcgaaggtggatttagcagtaaactgagagtagagtgcttagttgaacagggccctgaagcgcgtacacaccgcccgtcaccctcctcaagtatacttcaaaggacatttaactaaaacccctacgcatttatatagaggagacaagtcgtaacatggtaagtgtactggaaagtgcacttggacgaaccagagtgtagcttaacacaaagcacccaacttacacttaggagatttcaacttaacttgaccgctctgagctaaacctagccccaaacccactccaccttactaccagacaaccttagccaaaccatttacccaaataaagtataggcgatagaaattgaaacctggcgcaatagatatagtaccgcaagggaaagatgaaaaattataaccaagcataatatagcaaggactaacccctataccttctgcataatgaattaactagaaataactttgcaaggagagccaaagctaagacccccgaaaccagacgagctacctaagaacagctaaaagagcacacccgtctatgtagcaaaatagtgggaagatttataggtagaggcgacaaacctaccgagcctggtgatagctggttgtccaagatagaatcttagttcaactttaaatttgcccacagaaccctctaaatccccttgtaaatttaactgttagtccaaagaggaacagctctttggacactaggaaaaaaccttgtagagagagtaaaaaatttaacacccatagtaggcctaaaagcagccaccaattaagaaagcgttcaagctcaacacccactacctaaaaaatcccaaacatataactgaactcctcacacccaattggaccaatctatcaccctatagaagaactaatgttagtataagtaacatgaaaacattctcctccgcataagcctgcgtcagattaaaacactgaactgacaattaacagcccaatatctacaatcaaccaacaagtcattattaccctcactgtcaacccaacacaggcatgctcataaggaaaggttaaaaaaagtaaaaggaactcggcaaatcttaccccgcctgtttaccaaaaacatcacctctagcatcaccagtattagaggcaccgcctgcccagtgacacatgtttaacggccgcggtaccctaaccgtgcaaaggtagcataatcacttgttccttaaatagggacctgtatgaatggctccacgagggttcagctgtctcttacttttaaccagtgaaattgacctgcccgtgaagaggcgggcataacacagcaagacgagaagaccctatggagctttaatttattaatgcaaacagtacctaacaaacccacaggtcctaaactaccaaacctgcattaaaaatttcggttggggcgacctcggagcagaacccaacctccgagcagtacatgctaagacttcaccagtcaaagcgaactactatactcaattgatccaataacttgaccaacggaacaagttaccctagggataacagcgcaatcctattctagagtccatatcaacaatagggtttacgacctcgatgttggatcaggacatcccaatggtgcagccgctattaaaggttcgtttgttcaacgattaaagtcctacgtgatctgagttcagaccggagtaatccaggtcggtttctatctacnttcaaattcctccctgtacgaaaggacaagagaaataaggcctacttcacaaagcgccttcccccgtaaatgatatcatctcaacttagtattatacccacacccacccaagaacagggtttgttaagatggcagagcccggtaatcgcataaaacttaaaactttacagtcagaggttcaattcctcttcttaacaacatacccatggccaacctcctactcctcattgtacccattctaatcgcaatggcattcctaatgcttaccgaacgaaaaattctaggctatatacaactacgcaaaggccccaacgttgtaggcccctacgggctactacaacccttcgctgacgccataaaactcttcaccaaagagcccctaaaacccgccacatctaccatcaccctctacatcaccgccccgaccttagctctcaccatcgctcttctactatgaacccccctccccatacccaaccccctggtcaacctcaacctaggcctcctatttattctagccacctctagcctagccgtttactcaatcctctgatcagggtgagcatcaaactcaaactacgccctgatcggcgcactgcgagcagtagcccaaacaatctcatatgaagtcaccctagccatcattctactatcaacattactaataagtggctcctttaacctctccacccttatcacaacacaagaacacctctgattactcctgccatcatgacccttggccataatatgatttatctccacactagcagagaccaaccgaacccccttcgaccttgccgaaggggagtccgaactagtctcaggcttcaacatcgaatacgccgcaggccccttcgccctattcttcatagccgaatacacaaacattattataataaacaccctcaccactacaatcttcctaggaacaacatatgacgcactctcccctgaactctacacaacatattttgtcaccaagaccctacttctaacctccctgttcttatgaattcgaacagcatacccccgattccgctacgaccaactcatacacctcctatgaaaaaacttcctaccactcaccctagcattacttatatgatatgtctccatacccattacaatctccagcattccccctcaaacctaagaaatatgtctgataaaagagttactttgatagagtaaataataggagcttaaacccccttatttctaggactatgagaatcgaacccatccctgagaatccaaaattctccgtgccacctatcacaccccatcctaaagtaaggtcagctaaataagctatcgggcccataccccgaaaatgttggttatacccttcccgtactaattaatcccctggcccaacccgtcatctactctaccatctttgcaggcacactcatcacagcgctaagctcgcactgattttttacctgagtaggcctagaaataaacatgctagcttttattccagttctaaccaaaaaaataaaccctcgttccacagaagctgccatcaagtatttcctcacgcaagcaaccgcatccataatccttctaatagctatcctcttcaacaatatactctccggacaatgaaccataaccaatactaccaatcaatactcatcattaataatcataatggctatagcaataaaactaggaatagccccctttcacttctgagtcccagaggttacccaaggcacccctctgacatccggcctgcttcttctcacatgacaaaaactagcccccatctcaatcatataccaaatctctccctcactaaacgtaagccttctcctcactctctcaatcttatccatcatagcaggcagttgaggtggattaaaccaaacccagctacgcaaaatcttagcatactcctcaattacccacataggatgaataatagcagttctaccgtacaaccctaacataaccattcttaatttaactatttatattatcctaactactaccgcattcctactactcaacttaaactccagcaccacgaccctactactatctcgcacctgaaacaagctaacatgactaacacccttaattccatccaccctcctctccctaggaggcctgcccccgctaaccggctttttgcccaaatgggccattatcgaagaattcacaaaaaacaatagcctcatcatccccaccatcatagccaccatcaccctccttaacctctacttctacctacgcctaatctactccacctcaatcacactactccccatatctaacaacgtaaaaataaaatgacagtttgaacatacaaaacccaccccattcctccccacactcatcgcccttaccacgctactcctacctatctccccttttatactaataatcttatagaaatttaggttaaatacagaccaagagccttcaaagccctcagtaagttgcaatacttaatttctgtaacagctaaggactgcaaaaccccactctgcatcaactgaacgcaaatcagccactttaattaagctaagcccttactagaccaatgggacttaaacccacaaacacttagttaacagctaagcaccctaatcaactggcttcaatctacttctcccgccgccgggaaaaaaggcgggagaagccccggcaggtttgaagctgcttcttcgaatttgcaattcaatatgaaaatcacctcggagctggtaaaaagaggcctaacccctgtctttagatttacagtccaatgcttcactcagccattttacctcacccccactgatgttcgccgaccgttgactattctctacaaaccacaaagacattggaacactatacctattattcggcgcatgagctggagtcctaggcacagctctaagcctccttattcgagccgagctgggccagccaggcaaccttctaggtaacgaccacatctacaacgttatcgtcacagcccatgcatttgtaataatcttcttcatagtaatacccatcataatcggaggctttggcaactgactagttcccctaataatcggtgcccccgatatggcgtttccccgcataaacaacataagcttctgactcttacctccctctctcctactcctgctcgcatctgctatagtggaggccggagcaggaacaggttgaacagtctaccctcccttagcagggaactactcccaccctggagcctccgtagacctaaccatcttctccttacacctagcaggtgtctcctctatcttaggggccatcaatttcatcacaacaattatcaatataaaaccccctgccataacccaataccaaacgcccctcttcgtctgatccgtcctaatcacagcagtcctacttctcctatctctcccagtcctagctgctggcatcactatactactaacagaccgcaacctcaacaccaccttcttcgaccccgccggaggaggagaccccattctataccaacacctattctgatttttcggtcaccctgaagtttatattcttatcctaccaggcttcggaataatctcccatattgtaacttactactccggaaaaaaagaaccatttggatacataggtatggtctgagctatgatatcaattggcttcctagggtttatcgtgtgagcacaccatatatttacagtaggaatagacgtagacacacgagcatatttcacctccgctaccataatcatcgctatccccaccggcgtcaaagtatttagctgactcgccacactccacggaagcaatatgaaatgatctgctgcagtgctctgagccctaggattcatctttcttttcaccgtaggtggcctgactggcattgtattagcaaactcatcactagacatcgtactacacgacacgtactacgttgtagcccacttccactatgtcctatcaataggagctgtatttgccatcataggaggcttcattcactgatttcccctattctcaggctacaccctagaccaaacctacgccaaaatccatttcactatcatattcatcggcgtaaatctaactttcttcccacaacactttctcggcctatccggaatgccccgacgttactcggactaccccgatgcatacaccacatgaaacatcctatcatctgtaggctcattcatttctctaacagcagtaatattaataattttcatgatttgagaagccttcgcttcgaagcgaaaagtcctaatagtagaagaaccctccataaacctggagtgactatatggatgccccccaccctaccacacattcgaagaacccgtatacataaaatctagacaaaaaaggaaggaatcgaaccccccaaagctggtttcaagccaaccccatggcctccatgactttttcaaaaaggtattagaaaaaccatttcataactttgtcaaagttaaattataggctaaatcctatatatcttaatggcacatgcagcgcaagtaggtctacaagacgctacttcccctatcatagaagagcttatcacctttcatgatcacgccctcataatcattttccttatctgcttcctagtcctgtatgcccttttcctaacactcacaacaaaactaactaatactaacatctcagacgctcaggaaatagaaaccgtctgaactatcctgcccgccatcatcctagtcctcatcgccctcccatccctacgcatcctttacataacagacgaggtcaacgatccctcccttaccatcaaatcaattggccaccaatggtactgaacctacgagtacaccgactacggcggactaatcttcaactcctacatacttcccccattattcctagaaccaggcgacctgcgactccttgacgttgacaatcgagtagtactcccgattgaagcccccattcgtataataattacatcacaagacgtcttgcactcatgagctgtccccacattaggcttaaaaacagatgcaattcccggacgtctaaaccaaaccactttcaccgctacacgaccgggggtatactacggtcaatgctctgaaatctgtggagcaaaccacagtttcatgcccatcgtcctagaattaattcccctaaaaatctttgaaatagggcccgtatttaccctatagcaccccctctaccccctctagagcccactgtaaagctaacttagcattaaccttttaagttaaagattaagagaaccaacacctctttacagtgaaatgccccaactaaatactaccgtatggcccaccataattacccccatactccttacactattcctcatcacccaactaaaaatattaaacacaaactaccacctacctccctcaccaaagcccataaaaataaaaaattataacaaaccctgagaaccaaaatgaacgaaaatctgttcgcttcattcattgcccccacaatcctaggcctacccgccgcagtactgatcattctatttccccctctattgatccccacctccaaatatctcatcaacaaccgactaatcaccacccaacaatgactaatcaaactaacctcaaaacaaatgataaccatacacaacactaaaggacgaacctgatctcttatactagtatccttaatcatttttattgccacaactaacctcctcggactcctgcctcactcatttacaccaaccacccaactatctataaacctagccatggccatccccttatgagcgggcgcagtgattataggctttcgctctaagattaaaaatgccctagcccacttcttaccacaaggcacacctacaccccttatccccatactagttattatcgaaaccatcagcctactcattcaaccaatagccctggccgtacgcctaaccgctaacattactgcaggccacctactcatgcacctaattggaagcgccaccctagcaatatcaaccattaaccttccctctacacttatcatcttcacaattctaattctactgactatcctagaaatcgctgtcgccttaatccaagcctacgttttcacacttctagtaagcctctacctgcacgacaacacataatgacccaccaatcacatgcctatcatatagtaaaacccagcccatgacccctaacaggggccctctcagccctcctaatgacctccggcctagccatgtgatttcacttccactccataacgctcctcatactaggcctactaaccaacacactaaccatataccaatgatggcgcgatgtaacacgagaaagcacataccaaggccaccacacaccacctgtccaaaaaggccttcgatacgggataatcctatttattacctcagaagtttttttcttcgcaggatttttctgagccttttaccactccagcctagcccctaccccccaattaggagggcactggcccccaacaggcatcaccccgctaaatcccctagaagtcccactcctaaacacatccgtattactcgcatcaggagtatcaatcacctgagctcaccatagtctaatagaaaacaaccgaaaccaaataattcaagcactgcttattacaattttactgggtctctattttaccctcctacaagcctcagagtacttcgagtctcccttcaccatttccgacggcatctacggctcaacattttttgtagccacaggcttccacggacttcacgtcattattggctcaactttcctcactatctgcttcatccgccaactaatatttcactttacatccaaacatcactttggcttcgaagccgccgcctgatactggcattttgtagatgtggtttgactatttctgtatgtctccatctattgatgagggtcttactcttttagtataaatagtaccgttaacttccaattaactagttttgacaacattcaaaaaagagtaataaacttcgccttaattttaataatcaacaccctcctagccttactactaataattattacattttgactaccacaactcaacggctacatagaaaaatccaccccttacgagtgcggcttcgaccctatatcccccgcccgcgtccctttctccataaaattcttcttagtagctattaccttcttattatttgatctagaaattgccctccttttacccctaccatgagccctacaaacaactaacctgccactaatagttatgtcatccctcttattaatcatcatcctagccctaagtctggcctatgagtgactacaaaaaggattagactgaaccgaattggtatatagtttaaacaaaacgaatgatttcgactcattaaattatgataatcatatttaccaaatgcccctcatttacataaatattatactagcatttaccatctcacttctaggaatactagtatatcgctcacacctcatatcctccctactatgcctagaaggaataatactatcgctgttcattatagctactctcataaccctcaacacccactccctcttagccaatattgtgcctattgccatactagtctttgccgcctgcgaagcagcggtgggcctagccctactagtctcaatctccaacacatatggcctagactacgtacataacctaaacctactccaatgctaaaactaatcgtcccaacaattatattactaccactgacatgactttccaaaaaacacataatttgaatcaacacaaccacccacagcctaattattagcatcatccctctactattttttaaccaaatcaacaacaacctatttagctgttccccaaccttttcctccgaccccctaacaacccccctcctaatactaactacctgactcctacccctcacaatcatggcaagccaacgccacttatccagtgaaccactatcacgaaaaaaactctacctctctatactaatctccctacaaatctccttaattataacattcacagccacagaactaatcatattttatatcttcttcgaaaccacacttatccccaccttggctatcatcacccgatgaggcaaccagccagaacgcctgaacgcaggcacatacttcctattctacaccctagtaggctcccttcccctactcatcgcactaatttacactcacaacaccctaggctcactaaacattctactactcactctcactgcccaagaactatcaaactcctgagccaacaacttaatatgactagcttacacaatagcttttatagtaaagatacctctttacggactccacttatgactccctaaagcccatgtcgaagcccccatcgctgggtcaatagtacttgccgcagtactcttaaaactaggcggctatggtataatacgcctcacactcattctcaaccccctgacaaaacacatagcctaccccttccttgtactatccctatgaggcataattataacaagctccatctgcctacgacaaacagacctaaaatcgctcattgcatactcttcaatcagccacatagccctcgtagtaacagccattctcatccaaaccccctgaagcttcaccggcgcagtcattctcataatcgcccacgggcttacatcctcattactattctgcctagcaaactcaaactacgaacgcactcacagtcgcatcataatcctctctcaaggacttcaaactctactcccactaatagctttttgatgacttctagcaagcctcgctaacctcgccttaccccccactattaacctactgggagaactctctgtgctagtaaccacgttctcctgatcaaatatcactctcctacttacaggactcaacatactagtcacagccctatactccctctacatatttaccacaacacaatggggctcactcacccaccacattaacaacataaaaccctcattcacacgagaaaacaccctcatgttcatacacctatcccccattctcctcctatccctcaaccccgacatcattaccgggttttcctcttgtaaatatagtttaaccaaaacatcagattgtgaatctgacaacagaggcttacgaccccttatttaccgagaaagctcacaagaactgctaactcatgcccccatgtctaacaacatggctttctcaacttttaaaggataacagctatccattggtcttaggccccaaaaatatttggtgcaactccaaataaaagtaataaccatgcacactactataaccaccctaaccctgacttccctaattccccccatccttaccaccctcgttaaccctaacaaaaaaaactcatacccccattatgtaaaatccattgtcgcatccacctttattatcagtctcttccccacaacaatattcatgtgcctagaccaagaagttattatctcgaactgacactgagccacaacccaaacaacccagctctccctaagcttcaaactagactacttctccataatattcatccctgtagcattgttcgttacatggtccatcatagaattctcactgtgatatataaactcagacccaaacattaatcagttcttcaaatatctactcatcttcctaattaccatactaatcttagttaccgctaacaacctattccaactgttcatcggctgagagggcgtaggaattatatccttcttgctcatcagttgatgatacgcccgagcagatgccaacacagcagccattcaagcaatcctatacaaccgtatcggcgatatcggtttcatcctcgccttagcatgatttatcctacactccaactcatgagacccacaacaaatagcccttctaaacgctaatccaagcctcaccccactactaggcctcctcctagcagcagcaggcaaatcagcccaattaggtctccacccctgactcccctcagccatagaaggccccaccccagtctcagccctactccactcaagcactatagttgtagcaggaatcttcttactcatccgcttccaccccctagcagaaaatagcccactaatccaaactctaacactatgcttaggcgctatcaccactctgttcgcagcagtctgcgcccttacacaaaatgacatcaaaaaaatcgtagccttctccacttcaagtcaactaggactcataatagttacaatcggcatcaaccaaccacacctagcattcctgcacatctgtacccacgccttcttcaaagccatactatttatgtgctccgggtccatcatccacaaccttaacaatgaacaagatattcgaaaaataggaggactactcaaaaccatacctctcacttcaacctccctcaccattggcagcctagcattagcaggaatacctttcctcacaggtttctactccaaagaccacatcatcgaaaccgcaaacatatcatacacaaacgcctgagccctatctattactctcatcgctacctccctgacaagcgcctatagcactcgaataattcttctcaccctaacaggtcaacctcgcttccccacccttactaacattaacgaaaataaccccaccctactaaaccccattaaacgcctggcagccggaagcctattcgcaggatttctcattactaacaacatttcccccgcatcccccttccaaacaacaatccccctctacctaaaactcacagccctcgctgtcactttcctaggacttctaacagccctagacctcaactacctaaccaacaaacttaaaataaaatccccactatgcacattttatttctccaacatactcggattctaccctagcatcacacaccgcacaatcccctatctaggccttcttacgagccaaaacctgcccctactcctcctagacctaacctgactagaaaagctattacctaaaacaatttcacagcaccaaatctccacctccatcatcacctcaacccaaaaaggcataattaaactttacttcctctctttcttcttcccactcatcctaaccctactcctaatcacataacctattcccccgagcaatctcaattacaatatatacaccaacaaacaatgttcaaccagtaactactactaatcaacgcccataatcatacaaagcccccgcaccaataggatcctcccgaatcaaccctgacccctctccttcataaattattcagcttcctacactattaaagtttaccacaaccaccaccccatcatactctttcacccacagcaccaatcctacctccatcgctaaccccactaaaacactcaccaagacctcaacccctgacccccatgcctcaggatactcctcaatagccatcgctgtagtatatccaaagacaaccatcattccccctaaataaattaaaaaaactattaaacccatataacctcccccaaaattcagaataataacacacccgaccacaccgctaacaatcaatactaaacccccataaataggagaaggcttagaagaaaaccccacaaaccccattactaaacccacactcaacagaaacaaagcatacatcattattctcgcacggactacaaccacgaccaatgatatgaaaaaccatcgttgtatttcaactacaagaacaccaatgaccccaatacgcaaaactaaccccctaataaaattaattaaccactcattcatcgacctccccaccccatccaacatctccgcatgatgaaacttcggctcactccttggcgcctgcctgatcctccaaatcaccacaggactattcctagccatgcactactcaccagacgcctcaaccgccttttcatcaatcgcccacatcactcgagacgtaaattatgggtgaatcatccgctaccttcacgccaatggcgcctcaatattctttatctgcctcttcctacacatcgggcgaggcctatattacggatcatttctctactcagaaacctgaaacatcggcattatcctcctgcttgcaactatagcaacagccttcataggctatgtcctcccgtgaggccaaatatcattctgaggggccacagtaattacaaacttactatccgccatcccatacattgggacagacctagttcaatgaatctgaggaggctactcagtagacagtcccaccctcacacgattctttacctttcacttcatcttgcccttcattattgcagccctagcagcactccacctcctattcttgcacgaaacgggatcaaacaaccccctaggaatcacctcccattccgataaaatcaccttccacccttactacacaatcaaagacgccctcggcttacttctcttccttctctccttaatgacattaacactattctcaccagacctcctaggcgacccagacaattataccctagccaaccccttaaacacccctccccacatcaagcccgaatgatatttcctattcgcctacacaattctccgatccgtccctaacaaactaggaggcgtccttgccctattactatccatcctcatcctagcaataatccccatcctccatatatccaaacaacaaagcataatatttcgcccactaagccaatcactttattgactcctagccgcagacctcctcattctaacctgaatcggaggacaaccagtaagctacccttttaccatcattggacaagtagcatccgtactatacttcacaacaatcctaatcctaataccaactatctccctaattgaaaacaaaatactcaaatgggcctgtccttgtagtataaactaatacaccagtcttgtaaaccggagatgaaaacctttttccaaggacaaatcagagaaaaagtctttaactccaccattagcacccaaagctaagattctaatttaaactattctctgttctttcatggggaagcagatttgggtaccacccaagtattgactcacccatcaacaaccgctatgtatttcgtacattactgccagccaccatgaatattgtacggtaccataaatacttgaccacctgtagtacataaaaacccaatccacatcaaaaccccctccccatgcttacaagcaagtacagcaatcaaccctcaactatcacacatcaactgcaactccaaagccacccctcacccactaggataccaacaaacctacccacccttaacagtacatagtacataaagccatttaccgtacatagcacattacagtcaaatcccttctcgtccccatggatgacccccctcagataggggtcccttgaccaccatcctccgtgaaatcaatatcccgcacaagagtgctactctcctcgctccgggcccataacacttgggggtagctaaagtgaactgtatccgacatctggttcctacttcagggccataaagcctaaatagcccacacgttccccttaaataagacatcacgatg

SEQ ID NO: 259 - DNA, 16573 bp, Homo sapiens mitochondrial
  3111: "n" refers to a nucleotide at position 3107 of the Cambridge Reference Sequence (CRS, Anderson et al. 1981 Nature 290:457-465), later determined to be absent from the human mtDNA sequence according to the revised CRS (rCRS, Andrews et al. 1999 Nature Genetics 23:147); "n" therefore represents a single nucleotide deletion at a position corresponding to nucleotide 3107 of SEQ ID NO:1 as provided herein.
gatcacaggtctatcaccctattaaccactcacgggagctctccatgcatttggtattcttcgtttggggggtatgcacgcgatagcattgcgagacgctggagccggagcaccctatgtcgcagtatctgtctttgattcctgcctcattctattatttatcgcacctacgttcaatattacaggcgaacatacttactaaagtgtgttaattaattaatgcttgtaggacataataataacaattgaatgtctgcacagccgctttccacacagacatcataacaaaaaatttccaccaaaccccccctccccccccgcttctggccacagcacttaaacacatctctgccaaaccccaaaaacaaagaaccctaacaccagcctaaccagatttcaaattttatcttttggcggtatgcacttttaacagtcaccccccaactaacacattattttcccctcccactcccatactactaatctcatcaatacaacccccgcccatcctacccagcacacacacaccgctgctaaccccataccccgaaccaaccaaaccccaaagacaccccccacagtttatgtagcttacctcctcaaagcaatacactgaaaatgtttagacgggctcacatcaccccataaacaaataggtttggtcctagcctttctattagctcttagtaagattacacatgcaagcatccccgttccagtgagttcaccctctaaatcaccacgatcaaaagggacaagcatcaagcacgcagcaatgcagctcaaaacgcttagcctagccacacccccacgggaaacagcagtgattaacctttagcaataaacgaaagtttaactaagctatactaaccccagggttggtcaatttcgtgccagccaccgcggtcacacgattaacccaagtcaatagaagccggcgtaaagagtgttttagatcaccccctccccaataaagctaaaactcacctgagttgtaaaaaactccagttgacacaaaatagactacgaaagtggctttaacatatctgaacacacaatagctaagacccaaactgggattagataccccactatgcttagccctaaacctcaacagttaaatcaacaaaactgctcgccagaacactacgagccacagcttaaaactcaaaggacctggcggtgcttcatatccctctagaggagcctgttctgtaatcgataaaccccgatcaacctcaccacctcttgctcagcctatataccgccatcttcagcaaaccctgatgaaggctacaaagtaagcgcaagtacccacgtaaagacgttaggtcaaggtgtagcccatgaggtggcaagaaatgggctacattttctaccccagaaaactacgatagcccttatgaaacttaagggtcgaaggtggatttagcagtaaactgagagtagagtgcttagttgaacagggccctgaagcgcgtacacaccgcccgtcaccctcctcaagtatacttcaaaggacatttaactaaaacccctacgcatttatatagaggagacaagtcgtaacatggtaagtgtactggaaagtgcacttggacgaaccagagtgtagcttaacacaaagcacccaacttacacttaggagatttcaacttaacttgaccgctctgagctaaacctagccccaaacccactccaccttactaccagacaaccttagccaaaccatttacccaaataaagtataggcgatagaaattgaaacctggcgcaatagatatagtaccgcaagggaaagatgaaaaattataaccaagcataatatagcaaggactaacccctataccttctgcataatgaattaactagaaataactttgcaaggagagccaaagctaagacccccgaaaccagacgagctacctaagaacagctaaaagagcacacccgtctatgtagcaaaatagtgggaagatttataggtagaggcgacaaacctaccgagcctggtgatagctggttgtccaagatagaatcttagttcaactttaaatttgcccacagaaccctctaaatccccttgtaaatttaactgttagtccaaagaggaacagctctttggacactaggaaaaaaccttgtagagagagtaaaaaatttaacacccatagtaggcctaaaagcagccaccaattaagaaagcgttcaagctcaacacccactacctaaaaaatcccaaacatataactgaactcctcacacccaattggaccaatctatcaccctatagaagaactaatgttagtataagtaacatgaaaacattctcctccgcataagcctgcgtcagactaaaacactgaactgacaattaacagcccaatatctacaatcaaccaacaagtcattattaccctcactgtcaacccaacacaggcatgcccataaggaaaggttaaaaaaagtaaaaggaactcggcaaatcttaccccgcctgtttaccaaaaacatcacctctagcatcaccagtattagaggcaccgcctgcccagtgacacatgtttaacggccgcggtaccctaaccgtgcaaaggtagcataatcacttgttccttaaatagggacctgtatgaatggctccacgagggttcagctgtctcttacttttaaccagtgaaattgacctgcccgtgaagaggcgggcatgacacagcaagacgagaagaccctatggagctttaatttattaatgcaaacagtacctaacaaacccacaggtcctaaactaccaaacctgcattaaaaatttcggttggggcgacctcggagcagaacccaacctccgagcagtacatgctaagacttcaccagtcaaagcgaactactatactcaattgatccaataacttgaccaacggaacaagttaccctagggataacagcgcaatcctattctagagtccatatcaacaatagggtttacgacctcgatgttggatcaggacatcccgatggtgcagccgctattaaaggttcgtttgttcaacgattaaagtcctacgtgatctgagttcagaccggagtaatccaggtcggtttctatctacnttcaaattcctccctgtacgaaaggacaagagaaataaggcctacttcacaaagcgccttcccccgtaaatgatatcatctcaacttagtattatacccacacccacccaagaacagggtttgttaagatggcagagcccggtaatcgcataaaacttaaaactttacagtcagaggttcaattcctcttcttaacaacatacccatggccaacctcctactcctcattgtacccattctaatcgcaatggcattcctaatgcttaccgaacgaaaaattctaggctatatacaactacgcaaaggccccaacgttgtaggcccctacgggctactacaacccttcgctgacgccataaaactcttcaccaaagagcccctaaaacccgccacatctaccatcaccctctacatcaccgccccgaccttagctctcaccatcgctcttctactatgaacccccctccccatacccaaccccctggtcaacctcaacctaggcctcctatttattctagccacctctagcctagccgtttactcaatcctctgatcagggtgagcatcaaactcaaactacgccctgatcggcgcactgcgagcagtagcccaaacaatctcatatgaagtcaccctagccatcattctactatcaacattactaataagtggctcctttaacctctccacccttatcacaacacaagaacacctctgattactcctgccatcatgacccctggccataatatgatttatctccacactagcagagaccaaccgaacccccttcgaccttgccgaaggggagtccgaactagtctcaggcttcaacatcgaatacgccgcaggccccttcgccctattcttcatagccgaatacacaaacattattataataaacaccctcaccactacaatcttcctaggaacaacatatgacgcactctcccctgaactctacacaacatattttgtcaccaagaccctacttctaacctccctgttcttatgaattcgaacagcatacccccgattccgctacgaccaactcatacacctcctatgaaaaaacttcctaccactcaccctagcattacttatatgatatgtctccatacccattacaatctccagcattccccctcaaacctaagaaatatgtctgataaaagagttactttgatagagtaaataataggagcttaaacccccttatttctaggactatgagaatcgaacccatccctgagaatccaaaattctccgtgccacctatcacaccccatcctaaagtaaggtcagctaaataagctatcgggcccataccccgaaaatgttggttatacccttcccgtactaattaatcccctggcccaacccgtcatctactctaccatctttgcaggcacactcatcacagcgctaagctcgcactgattttttacctgagtaggcctagaaataaacatgctagcttttattccagttctaaccaaaaaaataaaccctcgttccacagaagctgccatcaagtatttcctcacgcaagcaaccgcatccataatccttctaatagctatcctcttcaacaatatactctccggacaatgaaccataaccaatactaccaatcaatactcatcattaataatcataatggctatagcaataaaactaggaatagccccctttcacttctgagtcccagaggttacccaaggcacccctctgacatccggcctgcttcttctcacatgacaaaaactagcccccatctcaatcatataccaaatctctccctcactaaacgtaagccttctcctcactctctcaatcttatccatcatagcaggcagttgaggtggattaaaccaaacccagctacgcaaaatcttagcatactcctcaattacccacataggatgaataatagcagttctaccgtacaaccctaacataaccattcttaatttaactatttatattatcctaactactaccgcattcctactactcaacttaaactccagcaccacgaccctactactatctcgcacctgaaacaagctaacatgactaacacccttaattccatccaccctcctctccctaggaggcctgcccccgctaaccggctttttgcccaaatgggccattatcgaagaattcacaaaaaacaatagcctcatcatccccaccatcatagccaccatcaccctccttaacctctacttctacctacgcctaatctactccacctcaatcacactactccccatatctaacaacgtaaaaataaaatgacagtttgaacatacaaaacccaccccattcctccccacactcatcgcccttaccacgctactcctacctatctccccttttatactaataatcttatagaaatttaggttaaatacagaccaagagccttcaaagccctcagtaagttgcaatacttaatttctgtaacagctaaggactgcaaaaccccactctgcatcaactgaacgcaaatcagccactttaattaagctaagcccttactagaccaatgggacttaaacccacaaacacttagttaacagctaagcaccctaatcaactggcttcaatctacttctcccgccgccgggaaaaaaggcgggagaagccccggcaggtttgaagctgcttcttcgaatttgcaattcaatatgaaaatcacctcggagctggtaaaaagaggcctaacccctgtctttagatttacagtccaatgcttcactcagccattttacctcacccccactgatgttcgccgaccgttgactattctctacaaaccacaaagacattggaacactatacctattattcggcgcatgagctggagtcctaggcacagctctaagcctccttattcgagccgagctgggccagccaggcaaccttctaggtaacgaccacatctacaacgttatcgtcacagcccatgcatttgtaataatcttcttcatagtaatacccatcataatcggaggctttggcaactgactagttcccctaataatcggtgcccccgatatggcgtttccccgcataaacaacataagcttctgactcttacctccctctctcctactcctgctcgcatctgctatagtggaggccggagcaggaacaggttgaacagtctaccctcccttagcagggaactactcccaccctggagcctccgtagacctaaccatcttctccttacacctagcaggtgtctcctctatcttaggggccatcaatttcatcacaacaattatcaatataaaaccccctgccataacccaataccaaacgcccctcttcgtctgatccgtcctaatcacagcagtcctacttctcctatctctcccagtcctagctgctggcatcactatactactaacagaccgcaacctcaacaccaccttcttcgaccccgccggaggaggagaccccattctataccaacacctattctgatttttcggtcaccctgaagtttatattcttatcctaccaggcttcggaataatctcccatattgtaacttactactccggaaaaaaagaaccatttggatacataggtatggtctgagctatgatatcaattggcttcctagggtttatcgtgtgagcacaccatatatttacagtaggaatagacgtagacacacgagcatatttcacctccgctaccataatcatcgctatccccaccggcgtcaaagtatttagctgactcgccacactccacggaagcaatatgaaatgatctgctgcagtgctctgagccctaggattcatctttcttttcaccgtaggtggcctgactggcattgtattagcaaactcatcactagacatcgtactacacgacacgtactacgttgtagctcacttccactatgtcctatcaataggagctgtatttgccatcataggaggcttcattcactgatttcccctattctcaggctacaccctagaccaaacctacgccaaaatccatttcactatcatattcatcggcgtaaatctaactttcttcccacaacactttctcggcctatccggaatgccccgacgttactcggactaccccgatgcatacaccacatgaaacatcctatcatctgtaggctcattcatttctctaacagcagtaatattaataattttcatgatttgagaagccttcgcttcgaagcgaaaagtcctaatagtagaagaaccctccataaacctggagtgactatatggatgccccccaccctaccacacattcgaagaacccgtatacataaaatctagacaaaaaaggaaggaatcgaaccccccaaagctggtttcaagccaaccccatggcctccatgactttttcaaaaaggtattagaaaaaccatttcataactttgtcaaagttaaattataggctaaatcctatatatcttaatggcacatgcagcgcaagtaggtctacaagacgctacttcccctatcatagaagagcttatcacctttcatgatcacgccctcataatcattttccttatctgcttcctagtcctgtatgcccttttcctaacactcacaacaaaactaactaatactaacatctcagacgctcaggaaatagaaaccgtctgaactatcctgcccgccatcatcctagtcctcatcgccctcccatccctacgcatcctttacataacagacgaggtcaacgatccctcccttaccatcaaatcaattggccaccaatggtactgaacctacgagtacaccgactacggcggactaatcttcaactcctacatacttcccccattattcctagaaccaggcgacctgcgactccttgacgttgacaatcgagtagtactcccgattgaagcccccattcgtataataattacatcacaagacgtcttgcactcatgagctgtccccacattaggcttaaaaacagatgcaattcccggacgtctaaaccaaaccactttcaccgctacacgaccgggggtatactacggtcaatgctctgaaatctgtggagcaaaccacagtttcatgcccatcgtcctagaattaattcccctaaaaatctttgaaatagggcccgtatttaccctatagcaccccctctaccccctctagagcccactgtaaagctaacttagcattaaccttttaagttaaagattaagagaaccaacacctctttacagtgaaatgccccaactaaatactaccgtatggcccaccataattacccccatactccttacactattcctcatcacccaactaaaaatattaaacacaaactaccacctacctccctcaccaaagcccataaaaataaaaaattataacaaaccctgagaaccaaaatgaacgaaaatctgttcgcttcattcattgcccccacaatcctaggcctacccgccgcagtactgatcattctatttccccctctattgatccccacctccaaatatctcatcaacaaccgactaatcaccacccaacaatgactaatcaaactaacctcaaaacaaatgataaccatacacaacactaaaggacgaacctgatctcttatactagtatccttaatcatttttattgccacaactaacctcctcggactcctgcctcactcatttacaccaaccacccaactatctataaacctagccatggccatccccttatgagcgggcgcagtgattataggctttcgctctaagattaaaaatgccctagcccacttcttaccacaaggcacacctacaccccttatccccatactagttattatcgaaaccatcagcctactcattcaaccaatagccctggccgtacgcctaaccgctaacattactgcaggccacctactcatgcacctaattggaagcgccaccctagcaatatcaaccattaaccttccctctacacttatcatcttcacaattctaattctactgactatcctagaaatcgctgtcgccttaatccaagcctacgttttcacacttctagtaagcctctacctgcacgacaacacataatgacccaccaatcacatgcctatcatatagtaaaacccagcccatgacccctaacaggggccctctcagccctcctaatgacctccggcctagccatgtgatttcacttccactccataacgctcctcatactaggcctactaaccaacacactaaccatataccaatgatggcgcgatgtaacacgagaaagcacataccaaggccaccacacaccacctgtccaaaaaggccttcgatacgggataatcctatttattacctcagaagtttttttcttcgcaggatttttctgagccttttaccactccagcctagcccctgccccccaattaggagggcactggcccccaacaggcatcaccccgctaaatcccctagaagtcccactcctaaacacatccgtattactcgcatcaggagtatcaatcacctgagctcaccatagtctaatagaaaacaaccgaaaccaaataattcaagcactgcttattacaattttactgggtctctattttaccctcctacaagcctcagagtacttcgagtctcccttcaccatttccgacggcatctacggctcaacattttttgtagccacaggcttccacggacttcacgtcattattggctcaactttcctcactatctgcttcatccgccaactaatatttcactttacatccaaacatcactttggcttcgaagccgccgcctgatactggcattttgtagatgtggtttgactatttctgtatgtctccatctattgatgagggtcttactcttttagtataaatagtaccgttaacttccaattaactagttttgacaacattcaaaaaagagtaataaacttcgccttaattttaataatcaacaccctcctagccttactactaataattattacattttgactaccacaactcaacggctacatagaaaaatccaccccttacgagtgcggcttcgaccctatatcccccgcccgcgtccctttctccataaaattcttcttagtagctattaccttcttattatttgatctagaaattgccctccttttacccctaccatgagccctacaaacaactaacctgccactaatagttatgtcatccctcttattaatcatcatcctagccctaagtctggcctatgagtgactacaaaaaggattagactgaaccgaattggtatatagtttaaacaaaacgaatgatttcgactcattaaattatgataatcatatttaccaaatgcccctcatttacataaatattatactagcatttaccatctcacttctaggaatactagtatatcgctcacacctcatatcctccctactatgcctagaaggaataatactatcgctgttcattatagctactctcataaccctcaacacccactccctcttagccaatattgtgcctattgccatactagtctttgccgcctgcgaagcagcggtgggcctagccctactagtctcaatctccaacacatatggcctagactacgtacataacctaaacctactccaatgctaaaactaatcgtcccaacaattatattactaccactgacatgactttccaaaaaacacataatttgaatcaacacaaccacccacagcctaattattagcatcatccctctactattttttaaccaaatcaacaacaacctatttagctgttccccaaccttttcctccgaccccctaacaacccccctcctaatactaactacctgactcctacccctcacaatcatggcaagccaacgccacttatccagtgaaccactatcacgaaaaaaactctacctctctatactaatctccctacaaatctccttaattataacattcacagccacagaactaatcatattttatatcttcttcgaaaccacacttatccccaccttggctatcatcacccgatgaggcaaccagccagaacgcctgaacgcaggcacatacttcctattctacaccctagtaggctcccttcccctactcatcgcactaatttacactcacaacaccctaggctcactaaacattctactactcactctcactgcccaagaactatcaaactcctgagccaacaacttaatatgactagcttacacaatagcttttatagtaaagatacctctttacggactccacttatgactccctaaagcccatgtcgaagcccccatcgctgggtcaatagtacttgccgcagtactcttaaaactaggcggctatggtataatacgcctcacactcattctcaaccccctgacaaaacacatagcctaccccttccttgtactatccctatgaggcataattataacaagctccatctgcctacgacaaacagacctaaaatcgctcattgcatactcttcaatcagccacatagccctcgtagtaacagccattctcatccaaaccccctgaagcttcaccggcgcagtcattctcataatcgcccacgggcttacatcctcattactattctgcctagcaaactcaaactacgaacgcactcacagtcgcatcataatcctctctcaaggacttcaaactctactcccactaatagctttttgatgacttctagcaagcctcgctaacctcgccttaccccccactattaacctactgggagaactctctgtgctagtaaccacgttctcctgatcaaatatcactctcctacttacaggactcaacatactagtcacagccctatactccctctacatatttaccacaacacaatggggctcactcacccaccacattaacaacataaaaccctcattcacacgagaaaacaccctcatgttcatacacctatcccccattctcctcctatccctcaaccccgacatcattaccgggttttcctcttgtaaatatagtttaaccaaaacatcagattgtgaatctgacaacagaggcttacgaccccttatttaccgagaaagctcacaagaactgctaactcatgcccccatgtctaacaacatggctttctcaacttttaaaggataacagctatccattggtcttaggccccaaaaattttggtgcaactccaaataaaagtaataaccatgcacactactataaccaccctaaccctgacttccctaattccccccatccttaccaccctcgttaaccctaacaaaaaaaactcatacccccattatgtaaaatccattgtcgcatccacctttattatcagtctcttccccacaacaatattcatgtgcctagaccaagaagttattatctcgaactgacactgagccacaacccaaacaacccagctctccctaagcttcaaactagactacttctccataatattcatccctgtagcattgttcgttacatggtccatcatagaattctcactgtgatatataaactcagacccaaacattaatcagttcttcaaatatctactcatcttcctaattaccatactaatcttagttaccgctaacaacctattccaactgttcatcggctgagagggcgtaggaattatatccttcttgctcatcagttgatgatacgcccgagcagatgccaacacagcagccattcaagcaatcctatacaaccgtatcggcgatatcggtttcatcctcgccttagcatgatttatcctacactccaactcatgagacccacaacaaatagcccttctaaacgctaatccaagcctcaccccactactaggcctcctcctagcagcagcaggcaaatcagcccaattaggtctccacccctgactcccctcagccatagaaggccccaccccagtctcagccctactccactcaagcactatagttgtagcaggaatcttcttactcatccgcttccaccccctagcagaaaatagcccactaatccaaactctaacactatgcttaggcgctatcactactctgttcgcagcagtctgcgcccttacacaaaatgacatcaaaaaaatcgtagccttctccacttcaagtcaactaggactcataatagttacaatcggcatcaaccaaccacacctagcattcctgcacatctgtacccacgccttcttcaaagccatactatttatgtgctccgggtccatcatccacaaccttaacaatgaacaagatattcgaaaaataggaggactactcaaaaccatacctctcacttcaacctccctcaccattggcagcctagcattagcaggaatacctttcctcacaggtttctactccaaagaccacatcatcgaaaccgcaaacatatcatacacaaacgcctgagccctatctattactctcatcgctacctccctgacaagcgcctatagcactcgaataattcttctcaccctaacaggtcaacctcgcttccccacccttactaacattaacgaaaataaccccaccctactaaaccccattaaacgcctggcagccggaagcctattcgcaggatttctcattactaacaacatttcccccgcatcccccttccaaacaacaatccccctctacctaaaactcacagccctcgctgtcactttcctaggacttctaacagccctagacctcaactacctaaccaacaaacttaaaataaaatccccactatgcacattttatttctccaacatactcggattctaccctagcatcacacaccgcacaatcccctatctaggccttcttacgagccaaaacctgcccctactcctcctagacctaacctgactagaaaagctattacctaaaacaatttcacagcaccaaatctccacctccatcatcacctcaacccaaaaaggcataattaaactttacttcctctctttcttcttcccactcatcctaaccctactcctaatcacataacctattcccccgagcaatctcaattacaatatatacaccaacaaacaatgttcaaccagtaactactactaatcaacgcccataatcatacaaagcccccgcaccaataggatcctcccgaatcaaccctgacccctctccttcataaattattcagcttcctacactattaaagtttaccacaaccaccaccccatcatactctttcacccacagcaccaatcctacctccatcgctaaccccactaaaacactcaccaagacctcaacccctgacccccatgcctcaggatactcctcaatagccatcgctgtagtatatccaaagacaaccatcattccccctaaataaattaaaaaaactattaaacccatataacctcccccaaaattcagaataataacacacccgaccacaccgctaacaatcaatactaaacccccataaataggagaaggcttagaagaaaaccccacaaaccccattactaaacccacactcaacagaaacaaagcatacatcattattctcgcacggactacaaccacgaccaatgatatgaaaaaccatcgttgtatttcaactacaagaacaccaatgaccccaatacgcaaaattaaccccctaataaaattaattaaccactcattcatcgacctccccaccccatccaacatctccgcatgatgaaacttcggctcactccttggcgcctgcctgatcctccaaatcaccacaggactattcctagccatgcactactcaccagacgcctcaaccgccttttcatcaatcgcccacatcactcgagacgtaaattatggctgaatcatccgctaccttcacgccaatggcgcctcaatattctttatctgcctcttcctacacatcgggcgaggcctatattacggatcatttctctactcagaaacctgaaacatcggcattatcctcctgcttgcaactatagcaacagccttcataggctatgtcctcccgtgaggccaaatatcattctgaggggccacagtaattacaaacttactatccgccatcccatacattgggacagacctagttcaatgaatctgaggaggctactcagtagacagtcccaccctcacacgattctttacctttcacttcatcttgcccttcattattgcagccctagcagcactccacctcctattcttgcacgaaacgggatcaaacaaccccctaggaatcacctcccattccgataaaatcaccttccacccttactacacaatcaaagacgccctcggcttacttctcttccttctctccttaatgacattaacactattctcaccagacctcctaggcgacccagacaattataccctagccaaccccttaaacacccctccccacatcaagcccgaatgatatttcctattcgcctacacaattctccgatccgtccctaacaaactaggaggcgtccttgccctattactatccatcctcatcctagcaataatccccatcctccatatatccaaacaacaaagcataatatttcgcccactaagccaatcactttattgactcctagccgcagacctcctcattctaacctgaatcggaggacaaccagtaagctacccttttaccatcattggacaagtagcatccgtactatacttcacaacaatcctaatcctaataccaactatctccctaattgaaaacaaaatactcaaatgggcctgtccttgtagtataaactaatacaccagtcttgtaaaccggagatgaaaacctttttccaaggacaaatcagagaaaaagtctttaactccaccattagcacccaaagctaagattctaatttaaactattctctgttctttcatggggaagcagatttgggtaccacccaagtattgactcacccatcaacaaccgctatgtatttcgtacattactgccagccaccatgaatattgcacggtaccataaatacttgaccacctgtagtacataaaaacccaatccacatcaaaaccccctccccatgcttacaagcaagtacagcaatcaaccctcaactatcacacatcaactgcaactccaaagccacccctcacccactaggataccaacaaacctacccacccttaacagtacatagtacataaagccatttaccgtacatagcacattacagtcaaatcccttctcgcccccatggatgacccccctcagataggggtcccttgaccaccatcctccgtgaaatcaatatcccgcacaagagtgctactctcctcgctccgggcccataacacttgggggtagctaaagtgaactgtatccgacatctggttcctacttcagggtcataaagcctaaatagcccacacgttccccttaaataagacatcacgatg

SEQ ID NO: 260 - DNA, 16569 bp, Homo sapiens mitochondrial
  3107: "n" refers to a nucleotide at position 3107 of the Cambridge Reference Sequence (CRS, Anderson et al. 1981 Nature 290:457-465), later determined to be absent from the human mtDNA sequence according to the revised CRS (rCRS, Andrews et al. 1999 Nature Genetics 23:147); "n" therefore represents a single nucleotide deletion at a position corresponding to nucleotide 3107 of SEQ ID NO:1 as provided herein.
gatcacaggtctatcaccctattaaccactcacgggagctctccatgcatttggtattttcgtctggggggtatgcacgcgatagcattgcgagacgctggagccggagcaccctatgtcgcagtatctgtctttgattcctgcctcatcctattatttatcgcacctacgttcaatattacaggcgaacatacttactaaagtgtgttaattaattaatgcttgtaggacataataataacaattgaatgtctgcacagccactttccacacagacatcataacaaaaaatttccaccaaaccccccctcccccgcttctggccacagcacttaaacacatctctgccaaaccccaaaaacaaagaaccctaacaccagcctaaccagatttcaaattttatcttttggcggtatgcacttttaacagtcaccccccaactaacacattattttcccctcccactcccatactactaatctcatcaatacaacccccgcccatcctacccagcacacacacaccgctgctaaccccataccccgaaccaaccaaaccccaaagacaccccccacagtttatgtagcttacctcctcaaagcaatacactgaaaatgtttagacgggctcacatcaccccataaacaaataggtttggtcctagcctttctattagctcttagtaagattacacatgcaagcatccccgttccagtgagttcaccctctaaatcaccacgatcaaaagggacaagcatcaagcacgcagcaatgcagctcaaaacgcttagcctagccacacccccacgggaaacagcagtgattaacctttagcaataaacgaaagtttaactaagctatactaaccccagggttggtcaatttcgtgccagccaccgcggtcacacgattaacccaagtcaatagaagccggcgtaaagagtgttttagatcaccccctccccaataaagctaaaactcacctgagttgtaaaaaactccagttgacacaaaatagactacgaaagtggctttaacatatctgaacacacaatagctaagacccaaactgggattagataccccactatgcttagccctaaacctcaacagttaaatcaacaaaactgctcgccagaacactacgagccacagcttaaaactcaaaggacctggcggtgcttcatatccctctagaggagcctgttctgtaatcgataaaccccgatcaacctcaccacctcttgctcagcctatataccgccatcttcagcaaaccctgatgaaggctacaaagtaagcgcaagtacccacgtaaagacgttaggtcaaggtgtagcccatgaggtggcaagaaatgggctacattttctaccccagaaaactacgatagcccttatgaaacttaagggtcgaaggtggatttagcagtaaactgagagtagagtgcttagttgaacagggccctgaagcgcgtacacaccgcccgtcaccctcctcaagtatacttcaaaggacatttaactaaaacccctacgcatttatatagaggagacaagtcgtaacatggtaagtgtactggaaagtgcacttggacgaaccagagtgtagcttaacacaaagcacccaacttacacttaggagatttcaacttaacttgaccgctctgagctaaacctagccccaaacccactccaccttactaccagacaaccttagccaaaccatttacccaaataaagtataggcgatagaaattgaaacctggcgcaatagatatagtaccgcaagggaaagatgaaaaattataaccaagcataatatagcaaggactaacccctataccttctgcataatgaattaactagaaataactttgcaaggagagccaaagctaagacccccgaaaccagacgagctacctaagaacagctaaaagagcacacccgtctatgtagcaaaatagtgggaagatttataggtagaggcgacaaacctaccgagcctggtgatagctggttgtccaagatagaatcttagttcaactttaaatttgcccacagaaccctctaaatccccttgtaaatttaactgttagtccaaagaggaacagctctttggacactaggaaaaaaccttgtagagagagtaaaaaatttaacacccatagtaggcctaaaagcagccaccaattaagaaagcgttcaagctcaacacccactacctaaaaaatcccaaacatataactgaactcctcacacccaattggaccaatctatcaccctatagaagaactaatgttagtataagtaacatgaaaacattctcctccgcataagcctgcgtcagattaaaacactgaactgacaattaacagcccaatatctacaatcaaccaacaagtcattattaccctcactgtcaacccaacacaggcatgctcataaggaaaggttaaaaaaagtaaaaggaactcggcaaatcttaccccgcctgtttaccaaaaacatcacctctagcatcaccagtattagaggcaccgcctgcccagtgacacatgtttaacggccgcggtaccctaaccgtgcaaaggtagcataatcacttgttccttaaatagggacctgtatgaatggctccacgagggttcagctgtctcttacttttaaccagtgaaattgacctgcccgtgaagaggcgggcataacacagcaagacgagaagaccctatggagctttaatttattaatgcaaacagtacctaacaaacccacaggtcctaaactaccaaacctgcattaaaaatttcggttggggcgacctcggagcagaacccaacctccgagcagtacatgctaagacttcaccagtcaaagcgaactactatactcaattgatccaataacttgaccaacggaacaagttaccctagggataacagcgcaatcctattctagagtccatatcaacaatagggtttacgacctcgatgttggatcaggacatcccgatggtgcagccgctattaaaggttcgtttgttcaacgattaaagtcctacgtgatctgagttcagaccggagtaatccaggtcggtttctatctacnttcaaattcctccctgtacgaaaggacaagagaaataaggcctacttcacaaagcgccttcccccgtaaatgatatcatctcaacttagtattatacccacacccacccaagaacagggtttgttaagatggcagagcccggtaatcgcataaaacttaaaactttacagtcagaggttcaattcctcttcttaacaacatacccatggccaacctcctactcctcattgtacccattctaatcgcaatggcattcctaatgcttaccgaacgaaaaattctaggctatatacaactacgcaaaggccccaacgttgtaggcccctacgggctactacaacccttcgctgacgccataaaactcttcaccaaagagcccctaaaacccgccacatctaccatcaccctctacatcaccgccccgaccttagctctcaccatcgctcttctactatgaacccccctccccatacccaaccccctggtcaacctcaacctaggcctcctatttattctagccacctctagcctagccgtttactcaatcctctgatcagggtgagcatcaaactcaaactacgccctgatcggcgcactgcgagcagtagcccaaacaatctcatatgaagtcaccctagccatcattctactatcaacattactaataagtggctcctttaacctctccacccttatcacaacacaagaacacctctgattactcctgccatcatgacccttggccataatatgatttatctccacactagcagagaccaaccgaacccccttcgaccttgccgaaggggagtccgaactagtctcaggcttcaacatcgaatacgccgcaggccccttcgccctattcttcatagccgaatacacaaacattattataataaacaccctcaccactacaatcttcctaggaacaacatatgacgcactctcccctgaactctacacaacatattttgtcaccaagaccctacttctaacctccctgttcttatgaattcgaacagcatacccccgattccgctacgaccaactcatacacctcctatgaaaaaacttcctaccactcaccctagcattacttatatgatatgtctccatacccattacaatctccagcattccccctcaaacctaagaaatatgtctgataaaagagttactttgatagagtaaataataggagcttaaacccccttatttctaggactatgagaatcgaacccatccctgagaatccaaaattctccgtgccacctatcacaccccatcctaaagtaaggtcagctaaataagctatcgggcccataccccgaaaatgttggttatacccttcccgtactaattaatcccctggcccaacccgtcatctactctaccatctttgcaggcacactcatcacagcgctaagctcgcactgattttttacctgagtaggcctagaaataaacatgctagcttttattccagttctaaccaaaaaaataaaccctcgttccacagaagctgccatcaagtatttcctcacgcaagcaaccgcatccataatccttctaatagctatcctcttcaacaatatactctccggacaatgaaccataaccaatactaccaatcaatactcatcattaataatcataatggctatagcaataaaactaggaatagccccctttcacttctgagtcccagaggttacccaaggcacccctctgacatccggcctgcttcttctcacatgacaaaaactagcccccatctcaatcatataccaaatctctccctcactaaacgtaagccttctcctcactctctcaatcttatccatcatagcaggcagttgaggtggattaaaccaaacccagctacgcaaaatcttagcatactcctcaattacccacataggatgaataatagcagttctaccgtacaaccctaacataaccattcttaatttaactatttatattatcctaactactaccgcattcctactactcaacttaaactccagcaccacgaccctactactatctcgcacctgaaacaagctaacatgactaacacccttaattccatccaccctcctctccctaggaggcctgcccccgctaaccggctttttgcccaaatgggccattatcgaagaattcacaaaaaacaatagcctcatcatccccaccatcatagccaccatcaccctccttaacctctacttctacctacgcctaatctactccacctcaatcacactactccccatatctaacaacgtaaaaataaaatgacagtttgaacatacaaaacccaccccattcctccccacactcatcgcccttaccacgctactcctacctatctccccttttatactaataatcttatagaaatttaggttaaatacagaccaagagccttcaaagccctcagtaagttgcaatacttaatttctgtaacagctaaggactgcaaaaccccactctgcatcaactgaacgcaaatcagccactttaattaagctaagcccttactagaccaatgggacttaaacccacaaacacttagttaacagctaagcaccctaatcaactggcttcaatctacttctcccgccgccgggaaaaaaggcgggagaagccccggcaggtttgaagctgcttcttcgaatttgcaattcaatatgaaaatcacctcggagctggtaaaaagaggcctaacccctgtctttagatttacagtccaatgcttcactcagccattttacctcacccccactgatgttcgccgaccgttgactattctctacaaaccacaaagacattggaacactatacctattattcggcgcatgagctggagtcctaggcacagctctaagcctccttattcgagccgagctgggccagccaggcaaccttctaggtaacgaccacatctacaacgttatcgtcacagcccatgcatttgtaataatcttcttcatagtaatacccatcataatcggaggctttggcaactgactagttcccctaataatcggtgcccccgatatggcgtttccccgcataaacaacataagcttctgactcttacctccctctctcctactcctgctcgcatctgctatagtggaggccggagcaggaacaggttgaacagtctaccctcccttagcagggaactactcccaccctggagcctccgtagacctaaccatcttctccttacacctagcaggtgtctcctctatcttaggggccatcaatttcatcacaacaattatcaatataaaaccccctgccataacccaataccaaacgcccctcttcgtctgatccgtcctaatcacagcagtcctacttctcctatctctcccagtcctagctgctggcatcactatactactaacagaccgcaacctcaacaccaccttcttcgaccccgccggaggaggagaccccattctataccaacacctattctgatttttcggtcaccctgaagtttatattcttatcctaccaggcttcggaataatctcccatattgtaacttactactccggaaaaaaagaaccatttggatacataggtatggtctgagctatgatatcaattggcttcctagggtttatcgtgtgagcacaccatatatttacagtaggaatagacgtagacacacgagcatatttcacctccgctaccataatcatcgctatccccaccggcgtcaaagtatttagctgactcgccacactccacggaagcaatatgaaatgatctgctgcagtgctctgagccctaggattcatctttcttttcaccgtaggtggcctgactggcattgtattagcaaactcatcactagacatcgtactacacgacacgtactacgttgtagcccacttccactatgtcctatcaataggagctgtatttgccatcataggaggcttcattcactgatttcccctattctcaggctacaccctagaccaaacctacgccaaaatccatttcactatcatattcatcggcgtaaatctaactttcttcccacaacactttctcggcctatccggaatgccccgacgttactcggactaccccgatgcatacaccacatgaaacatcctatcatctgtaggctcattcatttctctaacagcagtaatattaataattttcatgatttgagaagccttcgcttcgaagcgaaaagtcctaatagtagaagaaccctccataaacctggagtgactatatggatgccccccaccctaccacacattcgaagaacccgtatacataaaatctagacaaaaaaggaaggaatcgaaccccccaaagctggtttcaagccaaccccatggcctccatgactttttcaaaaaggtattagaaaaaccatttcataactttgtcaaagttaaattataggctaaatcctatatatcttaatggcacatgcagcgcaagtaggtctacaagacgctacttcccctatcatagaagagcttatcacctttcatgatcacgccctcataatcattttccttatctgcttcctagtcctgtatgcccttttcctaacactcacaacaaaactaactaatactaacatctcagacgctcaggaaatagaaaccgtctgaactatcctgcccgccatcatcctagtcctcatcgccctcccatccctacgcatcctttacataacagacgaggtcaacgatccctcccttaccatcaaatcaattggccaccaatggtactgaacctacgagtacaccgactacggcggactaatcttcaactcctacatacttcccccattattcctagaaccaggcgacctgcgactccttgacgttgacaatcgagtagtactcccgattgaagcccccattcgtataataattacatcacaagacgtcttgcactcatgagctgtccccacattaggcttaaaaacagatgcaattcccggacgtctaaaccaaaccactttcaccgctacacgaccgggggtatactacggtcaatgctctgaaatctgtggagcaaaccacagtttcatgcccatcgtcctagaattaattcccctaaaaatctttgaaatagggcccgtatttaccctatagcaccccctctaccccctctagagcccactgtaaagctaacttagcattaaccttttaagttaaagattaagagaaccaacacctctttacagtgaaatgccccaactaaatactaccgtatggcccaccataattacccccatactccttacactattcctcatcacccaactaaaaatattaaacacaaactaccacctacctccctcaccaaagcccataaaaataaaaaattataacaaaccctgagaaccaaaatgaacgaaaatctgttcgcttcattcattgcccccacaatcctaggcctacccgccgcagtactgatcattctatttccccctctattgatccccacctccaaatatctcatcaacaaccgactaatcaccacccaacaatgactaatcaaactaacctcaaaacaaatgataaccatacacaacactaaaggacgaacctgatctcttatactagtatccttaatcatttttattgccacaactaacctcctcggactcctgcctcactcatttacaccaaccacccaactatctataaacctagccatggccatccccttatgagcgggcgcagtgattataggctttcgctctaagattaaaaatgccctagcccacttcttaccacaaggcacacctacaccccttatccccatactagttattatcgaaaccatcagcctactcattcaaccaatagccctggccgtacgcctaaccgctaacattactgcaggccacctactcatgcacctaattggaagcgccaccctagcaatatcaaccattaaccttccctctacacttatcatcttcacaattctaattctactgactatcctagaaatcgctgtcgccttaatccaagcctacgttttcacacttctagtaagcctctacctgcacgacaacacataatgacccaccaatcacatgcctatcatatagtaaaacccagcccatgacccctaacaggggccctctcagccctcctaatgacctccggcctagccatgtgatttcacttccactccataacgctcctcatactaggcctactaaccaacacactaaccatataccaatgatggcgcgatgtaacacgagaaagcacataccaaggccaccacacaccacctgtccaaaaaggccttcgatacgggataatcctatttattacctcagaagtttttttcttcgcaggatttttctgagccttttaccactccagcctagcccctaccccccaattaggagggcactggcccccaacaggcatcaccccgctaaatcccctagaagtcccactcctaaacacatccgtattacttgcatcaggagtatcaatcacctgagctcaccatagtctaatagaaaacaaccgaaaccaaataattcaagcactgcttattacaattttactgggtctctattttaccctcctacaagcctcagagtacttcgagtctcccttcaccatttccgacggcatctacggctcaacattttttgtagccacaggcttccacggacttcacgtcattattggctcaactttcctcactatctgcttcatccgccaactaatatttcactttacatccaaacatcactttggcttcgaagccgccgcctgatactggcattttgtagatgtggtttgactatttctgtatgtctccatctattgatgagggtcttactcttttagtataaatagtaccgttaacttccaattaactagttttgacaacattcaaaaaagagtaataaacttcgccttaattttaataatcaacaccctcctagccttactactaataattattacattttgactaccacaactcaacggctacatagaaaaatccaccccttacgagtgcggcttcgaccctatatcccccgcccgcgtccctttctccataaaattcttcttagtagctattaccttcttattatttgatctagaaattgccctccttttacccctaccatgagccctacaaacaactaacctgccactaatagttatgtcatccctcttattaatcatcatcctagccctaagtctggcctatgagtgactacaaaaaggattagactgaaccgaattggtatatagtttaaacaaaacgaatgatttcgactcattaaattatgataatcatatttaccaaatgcccctcatttacataaatattatactagcatttaccatctcacttctaggaatactagtatatcgctcacacctcatatcctccctactatgcctagaaggaataatactatcgctgttcattatagctactctcataaccctcaacacccactccctcttagccaatattgtgcctattgccatactagtctttgccgcctgcgaagcagcggtgggcctagccctactagtctcaatctccaacacatatggcctagactacgtacataacctaaacctactccaatgctaaaactaatcgtcccaacaattatattactaccactgacatgactttccaaaaaacacataatttgaatcaacacaaccacccacagcctaattattagcatcatccctctactattttttaaccaaatcaacaacaacctatttagctgttccccaaccttttcctccgaccccctaacaacccccctcctaatactaactacctgactcctacccctcacaatcatggcaagccaacgccacttatccagtgaaccactatcacgaaaaaaactctacctctctatactaatctccctacaaatctccttaattataacattcacagccacagaactaatcatattttatatcttcttcgaaaccacacttatccccaccttggctatcatcacccgatgaggcaaccagccagaacgcctgaacgcaggcacatacttcctattctacaccctagtaggctcccttcccctactcatcgcactaatttacactcacaacaccctaggctcactaaacattctactactcactctcactgcccaagaactatcaaactcctgagccaacaacttaatatgactagcttacacaatagcttttatagtaaagatacctctttacggactccacttatgactccctaaagcccatgtcgaagcccccatcgctgggtcaatagtacttgccgcagtactcttaaaactaggcggctatggtataatacgcctcacactcattctcaaccccctgacaaaacacatagcctaccccttccttgtactatccctatgaggcataattataacaagctccatctgcctacgacaaacagacctaaaatcgctcattgcatactcttcaatcagccacatagccctcgtagtaacagccattctcatccaaaccccctgaagcttcaccggcgcagtcattctcataatcgcccacgggcttacatcctcattactattctgcctagcaaactcaaactacgaacgcactcacagtcgcatcataatcctctctcaaggacttcaaactctactcccactaatagctttttgatgacttctagcaagcctcgctaacctcgccttaccccccactattaacctactgggagaactctctgtgctagtaaccacgttctcctgatcaaatatcactctcctacttacaggactcaacatactagtcacagccctatactccctctacatatttaccacaacacaatggggctcactcacccaccacattaacaacataaaaccctcattcacacgagaaaacaccctcatgttcatacacctatcccccattctcctcctatccctcaaccccgacatcattaccgggttttcctcttgtaaatatagtttaaccaaaacatcagattgtgaatctgacaacagaggcttacgaccccttatttaccgagaaagctcacaagaactgctaactcatgcccccatgtctaacaacatggctttctcaacttttaaaggataacagctatccattggtcttaggccccaaaaattttggtgcaactccaaataaaagtaataaccatgcacactactataaccaccctaaccctgacttccctaattccccccatccttaccaccctcgttaaccctaacaaaaaaaactcatacccccattatgtaaaatccattgtcgcatccacctttattatcagtctcttccccacaacaatattcatgtgcctagaccaagaagttattatctcgaactgacactgagccacaacccaaacaacccagctctccctaagcttcaaactagactacttctccataatattcatccctgtagcattgttcgttacatggtccatcatagaattctcactgtgatatataaactcagacccaaacattaatcagttcttcaaatatctactcatcttcctaattaccatactaatcttagttaccgctaacaacctattccaactgttcatcggctgagagggcgtaggaattatatccttcttgctcatcagttgatgatacgcccgagcagatgccaacacagcagccattcaagcaatcctatacaaccgtatcggcgatatcggtttcatcctcgccttagcatgatttatcctacactccaactcatgagacccacaacaaatagcccttctaaacgctaatccaagcctcaccccactactaggcctcctcctagcagcagcaggcaaatcagcccaattaggtctccacccctgactcccctcagccatagaaggccccaccccagtctcagccctactccactcaagcactatagttgtagcaggaatcttcttactcatccgcttccaccccctagcagaaaatagcccactaatccaaactctaacactatgcttaggcgctatcaccactctgttcgcagcagtctgcgcccttacacaaaatgacatcaaaaaaatcgtagccttctccacttcaagtcaactaggactcataatagttacaatcggcatcaaccaaccacacctagcattcctgcacatctgtacccacgccttcttcaaagccatactatttatgtgctccgggtccatcatccacaaccttaacaatgaacaagatattcgaaaaataggaggactactcaaaaccatacctctcacttcaacctccctcaccattggcagcctagcattagcaggaatacctttcctcacaggtttctactccaaagaccacatcatcgaaaccgcaaacatatcatacacaaacgcctgagccctatctattactctcatcgctacctccctgacaagcgcctatagcactcgaataattcttctcaccctaacaggtcaacctcgcttccccacccttactaacattaacgaaaataaccccaccctactaaaccccattaaacgcctggcagccggaagcctattcgcaggatttctcattactaacaacatttcccccgcatcccccttccaaacaacaatccccctctacctaaaactcacagccctcgctgtcactttcctaggacttctaacagccctagacctcaactacctaaccaacaaacttaaaataaaatccccactatgcacattttatttctccaacatactcggattctaccctagcatcacacaccgcacaatcccctatctaggccttcttacgagccaaaacctgcccctactcctcctagacctaacctgactagaaaagctattacctaaaacaatttcacagcaccaaatctccacctccatcatcacctcaacccaaaaaggcataattaaactttacttcctctctttcttcttcccactcatcctaaccctactcctaatcacataacctattcccccgagcaatctcaattacaatatatacaccaacaaacaatgttcaaccagtaactactactaatcaacgcccataatcatacaaagcccccgcaccaataggatcctcccgaatcaaccctgacccctctccttcataaattattcagcttcctacactattaaagtttaccacaaccaccaccccatcatactctttcacccacagcaccaatcctacctccatcgctaaccccactaaaacactcaccaagacctcaacccctgacccccatgcctcaggatactcctcaatagccatcgctgtagtatatccaaagacaaccatcattccccctaaataaattaaaaaaactattaaacccatataacctcccccaaaattcagaataataacacacccgaccacaccgctaacaatcaatactaaacccccataaataggagaaggcttagaagaaaaccccacaaaccccattactaaacccacactcaacagaaacaaagcatacatcattattctcgcacggactacaaccacgaccaatgatatgaaaaaccatcgttgtatttcaactacaagaacaccaatgaccccaatacgcaaaactaaccccctaataaaattaattaaccactcattcatcgacctccccaccccatccaacatctccgcatgatgaaacttcggctcactccttggcgcctgcctgatcctccaaatcaccacaggactattcctagccatgcactactcaccagacgcctcaaccgccttttcatcaatcgcccacatcactcgagacgtaaattatggctgaatcatccgctaccttcacgccaatggcgcctcaatattctttatctgcctcttcctacacatcgggcgaggcctatattacggatcatttctctactcagaaacctgaaacatcggcattatcctcctgcttgcaactatagcaacagccttcataggctatgtcctcccgtgaggccaaatatcattctgaggggccacagtaattacaaacttactatccgccatcccatacattgggacagacctagttcaatgaatctgaggaggctactcagtagacagtcccaccctcacacgattctttacctttcacttcatcttgcccttcattattgcagccctagcagcactccacctcctattcttgcacgaaacgggatcaaacaaccccctaggaatcacctcccattccgataaaatcaccttccacccttactacacaatcaaagacgccctcggcttacttctcttccttctctccttaatgacattaacactattctcaccagacctcctaggcgacccagacaattataccctagccaaccccttaaacacccctccccacatcaagcccgaatgatatttcctattcgcctacacaattctccgatccgtccctaacaaactaggaggcgtccttgccctattactatccatcctcatcctagcaataatccccatcctccatatatccaaacaacaaagcataatatttcgcccactaagccaatcactttattgactcctagccgcagacctcctcattctaacctgaatcggaggacaaccagtaagctacccttttaccatcattggacaagtagcatccgtactatacttcacaacaatcctaatcctaataccaactatctccctaattgaaaacaaaatactcaaatgggcctgtccttgtagtataaactaatacaccagtcttgtaaaccggagatgaaaacctttttccaaggacaaatcagagaaaaagtctttaactccaccattagcacccaaagctaagattctaatttaaactattctctgttctttcatggggaagcagatttgggtaccacccaagtattgactcacccatcaacaaccgctatgtatttcgtacattactgccagccaccatgaatattgtacggtaccataaatacttgaccacctgtagtacataaaaacccaatccacatcaaaaccccctccccatgcttacaagcaagtacagcaatcaaccctcaactatcacacatcaactgcaactccaaagccacccctcacccactaggataccaacaaacctacccacccttaacagtacatagtacataaagccatttaccgtacatagcacattacagtcaaatcccttctcgtccccatggatgacccccctcagataggggtcccttgaccaccatcctccgtgaaatcaatatcccgcacaagagtgctactctcctcgctccgggcccataacacttgggggtagctaaagtgaactgtatccgacatctggttcctacttcagggccataaagcctaaatagcccacacgttccccttaaataagacatcacgatg

SEQ ID NO: 261 - DNA, 16570 bp, Homo sapiens mitochondrial
  3108: "n" refers to a nucleotide at position 3107 of the Cambridge Reference Sequence (CRS, Anderson et al. 1981 Nature 290:457-465), later determined to be absent from the human mtDNA sequence according to the revised CRS (rCRS, Andrews et al. 1999 Nature Genetics 23:147); "n" therefore represents a single nucleotide deletion at a position corresponding to nucleotide 3107 of SEQ ID NO:1 as provided herein.
gatcacaggtctatcaccctattaaccactcacgggagctctccatgcatttggtattttcgtctggggggtgtgcacgcgatagcattgcgagacgctggagccggagcaccctatgtcgcagtatctgtctttgattcctgcctcatcctgttatttatcgcacctacgttcaatattacaggcgaacatacctactaaagtgtgttaattaattaatgcttacaggacataataataacaattgaatgtctgcacagccgctttccacacagacatcataacaaaaaatttccaccaaaccccccctcccccgccttctggccacagcacttaaacacatctctgccaaaccccaaaaacaaagaaccctaacaccagcctaaccagatttcaaattttatcttttggcggtatgcacttttaacagtcaccccccaactaacacattattttcccctcccactcccatactactaatctcatcaatacaacccccgcccatcctacccagcacacacacaccgctgctaaccccataccccgaaccaaccaaaccccaaagacaccccccacagtttatgtagcttacctcctcaaagcaatacactgaaaatgtttagacgggctcacatcaccccataaacaaataggtttggtcctagcctttctattagctcttagtaagattacacatgcaagcatccccgttccagtgagttcaccctctaaatcaccacgatcaaaagggacaagcatcaagcacgcagcaatgcagctcaaaacgcttagcctagccacacccccacgggaaacagcagtgattaacctttagcaataaacgaaagtttaactaagctatactaaccccagggttggtcaatttcgtgccagccaccgcggtcacacgattaacccaagtcaatagaagccggcgtaaagagtgttttagatcaccccctccccaataaagctaaaactcacctgagttgtaaaaaactccagttgacacaaaatagactacgaaagtggctttaacatatctgaacacacaatagctaagacccaaactgggattagataccccactatgcttagccctaaacctcaacagttaaatcaacaaaactgctcgccagaacactacgagccacagcttaaaactcaaaggacctggcggtgcttcatatccctctagaggagcctgttctgtaatcgataaaccccgatcaacctcaccacctcttgctcagcctatataccgccatcttcagcaaaccctgatgaaggctacaaagtaagcgcaagtacccacgtaaagacgttaggtcaaggtgtagcccatgaggtggcaagaaatgggctacattttctaccccagaaaactacgatagcccttatgaaacttaagggtcgaaggtggatttagcagtaaactgagagtagagtgcttagttgaacagggccctgaagcgcgtacacaccgcccgtcaccctcctcaagtatacttcaaaggacatttaactaaaacccctacgcatttatatagaggagacaagtcgtaacatggtaagtgtactggaaagtgcacttggacgaaccagagtgtagcttaacacaaagcacccaacttacacttaggagatttcaacttaacttgaccgctctgagctaaacctagccccaaacccactccaccttactaccagacaaccttaaccaaaccatttacccaaataaagtataggcgatagaaattgaaacctggcgcaatagatatagtaccgcaagggaaagatgaaaaattataaccaagcataatatagcaaggactaacccctataccttctgcataatgaattaactagaaataactttgcaaggagagccaaagctaagacccccgaaaccagacgagctacctaagaacagctaaaagagcacacccgtctatgtagcaaaatagtgggaagatttataggtagaggcgacaaacctaccgagcctggtgatagctggttgtccaagatagaatcttagttcaactttaaatttgcccacagaaccctctaaatccccttgtaaatttaactgttagtccaaagaggaacagctctttggacactaggaaaaaaccttgtagagagagtaaaaaatttaacacccatagtaggcctaaaagcagccaccaattaagaaagcgttcaagctcaacacccactacctaaaaaatcccaaacatataactgaactcctcacacccaattggaccaatctatcaccctatagaagaactaatgttagtataagtaacatgaaaacattctcctccgcataagcctgcgtcagattaaaacactgaactgacaattaacagcccaatatctacaatcaaccaacaagtcattattaccctcactgtcaacccaacacaggcatgctcataaggaaaggttaaaaaaagtaaaaggaactcggcaaatcttaccccgcctgtttaccaaaaacatcacctctagcatcaccagtattagaggcaccgcctgcccagtgacacatgtttaacggccgcggtaccctaaccgtgcaaaggtagcataatcacttgttccttaaatagggacctgtatgaatggctccacgagggttcagctgtctcttacttttaaccagtgaaattgacctgcccgtgaagaggcgggcatgacacagcaagacgagaagaccctatggagctttaatttattaatgcaaacagtacctaacaaacccacaggtcctaaactaccaaacctgcattaaaaatttcggttggggcgacctcggagcagaacccaacctccgagcagtacatgctaagacttcaccagtcaaagcgaactactatactcaattgatccaataacttgaccaacggaacaagttaccctagggataacagcgcaatcctattctagagtccatatcaacaatagggtttacgacctcgatgttggatcaggacatcccgatggtgcagccgctattaaaggttcgtttgttcaacgattaaagtcctacgtgatctgagttcagaccggagtaatccaggtcggtttctatctacnttcaaattcctccctgtacgaaaggacaagagaaataaggcctacttcacaaagcgccttcccccgtaaatgatatcatctcaacttagtattatacccacacccacccaagaacagggtttgttaagatggcagagcccggtaatcgcataaaacttaaaactttacagtcagaggttcaattcctcttcttaacaacatacccatggccaacctcctactcctcattgtacccattctaatcgcaatggcattcctaatgcttaccgaacgaaaaattctaggctatatacaactacgcaaaggccccaacgttgtaggcccctacgggctactacaacccttcgctgacgccataaaactcttcaccaaagagcccctaaaacccgccacatctaccatcaccctctacatcaccgccccgaccttagctctcaccatcgctcttctactatgaacccccctccccatacccaaccccctggtcaacctcaacctaggcctcctatttattctagccacctctagcctagccgtttactcaatcctctgatcagggtgagcatcaaactcaaactacgccctgatcggcgcactgcgagcagtagcccaaacaatctcatatgaagtcaccctagccatcattctactatcaacattactaataagtggctcctttaacctctccacccttatcacaacacaagaacacctctgattactcctgccatcatgacccttggccataatatgatttatctccacactagcagagaccaaccgaacccccttcgaccttgccgaaggggagtccgaactagtctcaggcttcaacatcgaatacgccgcaggccccttcgccctattcttcatagccgaatacacaaacattattataataaacaccctcaccactacaatcttcctaggaacaacatatgacgcactctcccctgaactctacacaacatattttgtcaccaagaccctacttctaacctccctgttcttatgaattcgaacagcatacccccgattccgctacgaccaactcatacacctcctatgaaaaaacttcctaccactcaccctagcattacttatatgatatgtctccatacccattacaatctccagcattccccctcaaacctaagaaatatgtctgataaaagagttactttgatagagtaaataataggagcttaaacccccttatttctaggactatgagaatcgaacccatccctgagaatccaaaattctccgtgccacctatcacaccccatcctaaagtaaggtcagctaaataagctatcgggcccataccccgaaaatgttggttatacccttcccgtactaattaatcccctggcccaacccgtcatctactctaccatctttgcaggcacactcatcacagcgctaagctcgcactgattttttacctgagtaggcctagaaataaacatgctagcttttattccagttctaaccaaaaaaataaaccctcgttccacagaagctgccatcaagtatttcctcacgcaagcaaccgcatccataatccttctaatagctatcctcttcaacaatatactctccggacaatgaaccataaccaatactaccaatcaatactcatcattaataatcataatggctatagcaataaaactaggaatagccccctttcacttctgagtcccagaggttacccaaggcacccctctgacatccggcctgcttcttctcacatgacaaaaactagcccccatctcaatcatataccaaatctctccctcactaaacgtaagccttctcctcactctctcaatcttatccatcatagcaggcagttgaggtggattaaaccaaacccagctacgcaaaatcttagcatactcctcaattacccacataggatgaataatagcagttctaccgtacaaccctaacataaccattcttaatttaactatttatattatcctaactactaccgcattcctactactcaacttaaactccagcaccacgaccctactactatctcgcacctgaaacaagctaacatgactaacacccttaattccatccaccctcctctccctaggaggcctgcccccgctaaccggctttttgcccaaatgggccattatcgaagaattcacaaaaaacaatagcctcatcatccccaccatcatagccaccatcaccctccttaacctctacttctacctacgcctaatctactccacctcaatcacactactccccatatctaacaacgtaaaaataaaatgacagtttgaacatacaaaacccaccccattcctccccacactcatcgcccttaccacgctactcctacctatctccccttttatactaataatcttatagaaatttaggttaaatacagaccaagagccttcaaagccctcagtaagttgcaatacttaatttctgtaacagctaaggactgcaaaaccccactctgcatcaactgaacgcaaatcagccactttaattaagctaagcccttactagaccaatgggacttaaacccacaaacacttagttaacagctaagcaccctaatcaactggcttcaatctacttctcccgccgccgggaaaaaaggcgggagaagccccggcaggtttgaagctgcttcttcgaatttgcaattcaatatgaaaatcacctcggagctggtaaaaagaggcctaacccctgtctttagatttacagtccaatgcttcactcagccattttacctcacccccactgatgttcgccgaccgttgactattctctacaaaccacaaagacattggaacactatacctattattcggcgcatgagctggagtcctaggcacagctctaagcctccttattcgagccgagctgggccagccaggcaaccttctaggtaacgaccacatctacaacgttatcgtcacagcccatgcatttgtaataatcttcttcatagtaatacccatcataatcggaggctttggcaactgactagttcccctaataatcggtgcccccgatatggcgtttccccgcataaacaacataagcttctgactcttacccccctctctcctactcctgctcgcatctgctatagtggaggccggagcaggaacaggttgaacagtctaccctcccttagcagggaactactcccaccctggagcctccgtagacctaaccatcttctccttacacctagcaggtgtctcttctatcttaggggccatcaatttcatcacaacaattatcaatataaaaccccctgccataacccaataccaaacgcccctcttcgtctgatccgtcctaatcacagcagtcctacttctcctatctctcccagtcctagctgctggcatcactatactactaacagaccgcaacctcaacaccaccttcttcgaccccgccggaggaggagaccccattctataccaacacctattctgatttttcggtcaccctgaagtttatattcttatcctaccaggcttcggaataatctcccatattgtaacttactactccggaaaaaaagaaccatttggatacataggtatggtctgagctatgatatcaattggcttcctagggtttatcgtgtgagcacaccatatatttacagtaggaatagacgtagacacacgagcatatttcacctccgctaccataatcatcgctatccccaccggcgtcaaagtatttagctgactcgccacactccacggaagcaatatgaaatgatctgctgcagtgctctgagccctaggattcatctttcttttcaccgtaggtggcctgactggcattgtattagcaaactcatcactagacatcgtactacacgacacgtactacgttgtagctcacttccactatgtcctatcaataggagctgtatttgccatcataggaggcttcattcactgatttcccctattctcaggctacaccctagaccaaacctacgccaaaatccatttcactatcatattcatcggcgtaaatctaactttcttcccacaacactttctcggcctatccggaatgccccgacgttactcggactaccccgatgcatacaccacatgaaacatcctatcatctgtaggctcattcatttctctaacagcagtaatattaataattttcatgatttgagaagccttcgcttcgaagcgaaaagtcctaatagtagaagaaccctccataaacctggagtgactatatggatgccccccaccctaccacacattcgaagaacccgtatacataaaatctagacaaaaaaggaaggaatcgaaccccccaaagctggtttcaagccaaccccatggcctccatgactttttcaaaaaggtattagaaaaaccatttcataactttgtcaaagttaaattataggctaaatcctatatatcttaatggcacatgcagcgcaagtaggtctacaagacgctacttcccctatcatagaagagcttatcacctttcatgatcacgccctcataatcattttccttatctgcttcctagtcctgtatgcccttttcctaacactcacaacaaaactaactaatactaacatctcagacgctcaggaaatagaaaccgtctgaactatcctgcccgccatcatcctagtcctcatcgccctcccatccctacgcatcctttacataacagacgaggtcaacgatccctcccttaccatcaaatcaattggccaccaatggtactgaacctacgagtacaccgactacggcggactaatcttcaactcctacatacttcccccattattcctagaaccaggcgacctgcgactccttgacgttgacaatcgagtagtactcccgattgaagcccccattcgtataataattacatcacaagacgtcttgcactcatgagctgtccccacattaggcttaaaaacagatgcaattcccggacgtctaaaccaaaccactttcaccgctacacgaccgggggtatactacggtcaatgctctgaaatctgtggagcaaaccacagtttcatgcccatcgtcctagaattaattcccctaaaaatctttgaaatagggcccgtatttaccctatagcaccccctctaccccctctagagcccactgtaaagctaacttagcattaaccttttaagttaaagattaagagaaccaacacctctttacagtgaaatgccccaactaaatactaccgtatggtccaccataattacccccatactccttacactattcctcatcacccaactaaaaatattaaacacaaactaccacctacctccctcaccaaagcccataaaaataaaaaattataacaaaccctgagaaccaaaatgaacgaaaatctgttcgcttcattcattgcccccacaatcctaggcctacccgccgcagtactgatcattctatttccccctctattgatccccacctccaaatatctcatcaacaaccgactaatcaccacccaacaatgactaatcaaactaacctcaaaacaaatgataaccatacacaacactaaaggacgaacctgatctcttatactagtatccttaatcatttttattgccacaactaacctcctcggactcctgcctcactcatttacaccaaccacccaactatctataaacctagccatggccatccccttatgagcgggcgcagtgattataggctttcgctctaagattaaaaatgccctagcccacttcttaccacaaggcacacctacaccccttatccccatactagttattatcgaaaccatcagcctactcattcaaccaatagccctggccgtacgcctaaccgctaacattactgcaggccacctactcatgcacctaattggaagcgccaccctagcaatatcaaccattaaccttccctctacacttatcatcttcacaattctaattctactgactatcctagaaatcgctgtcgccttaatccaagcctacgttttcacacttctagtaagcctctacctgcacgacaacacataatgacccaccaatcacatgcctatcatatagtaaaacccagcccatgacccctaacaggggccctctcagccctcctaatgacctccggcctagccatgtgatttcacttccactccataacgctcctcatactaggcctactaaccaacacactaaccatataccaatgatggcgcgatgtaacacgagaaagcacataccaaggccaccacacaccacctgtccaaaaaggccttcgatacgggataatcctatttattacctcagaagtttttttcttcgcaggatttttctgagccttttaccactccagcctagcccctaccccccaattaggagggcactggcccccaacaggcatcaccccgctaaatcccctagaagtcccactcctaaacacatccgtattactcgcatcaggagtatcaatcacctgagctcaccatagtctaatagaaaacaaccgaaaccaaataattcaagcactgcttattacaattttactgggtctctattttaccctcctacaagcctcagagtacttcgagtctcccttcaccatttccgacggcatctacggctcaacattttttgtagccacaggcttccacggacttcacgtcattattggctcaactttcctcactatctgcttcatccgccaactaatatttcactttacatccaaacatcactttggcttcgaagccgccgcctgatactggcattttgtagatgtggtttgactatttctgtatgtctccatctattgatgagggtcttactcttttagtataaatagtaccgttaacttccaattaactagttttgacaacattcaaaaaagagtaataaacttcgccttaattttaataatcaacaccctcctagccttactactaataattattacattttgactaccacaactcaacggctacatagaaaaatccaccccttacgagtgcggcttcgaccctatatcccccgcccgcgtccctttctccataaaattcttcttagtagctattaccttcttattatttgatctagaaattgccctccttttacccctaccatgagccctacaaacaactaacctgccactaatagttatgtcatccctcttattaatcatcatcctagccctaagtctggcctatgagtgactacaaaaaggattagactgaaccgaattggtatatagtttaaacaaaacgaatgatttcgactcattaaattatgataatcatatttaccaaatgcccctcatttacataaatattatactagcatttaccatctcacttctaggaatactagtatatcgctcacacctcatatcctccctactatgcctagaaggaataatactatcgctgttcattatagctactctcataaccctcaacacccactccctcttagccaatattgtgcctattgccatactagtctttgccgcctgcgaagcagcggtgggcctagccctactagtctcaatctccaacacatatggcctagactacgtacataacctaaacctactccaatgctaaaactaatcgtcccaacaattatattactaccactgacatgactttccaaaaaacacataatttgaatcaacacaaccacccacagcctaattattagcatcatccctctactattttttaaccaaatcaacaacaacctatttagctgttccccaaccttttcctccgaccccctaacaacccccctcctaatactaactacctgactcctacccctcacaatcatggcaagccaacgccacttatccagtgaaccactatcacgaaaaaaactctacctctctatactaatctccctacaaatctccttaattataacattcacagccacagaactaatcatattttatatcttcttcgaaaccacacttatccccaccttggctatcatcacccgatgaggcaaccagccagaacgcctgaacgcaggcacatacttcctattctacaccctagtaggctcccttcccctactcatcgcactaatttacactcacaacaccctaggctcactaaacattctactactcactctcactgcccaagaactatcaaactcctgagccaacaacttaatatgactagcttacacaatagcttttatagtaaagatacctctttacggactccacttatgactccctaaagcccatgtcgaagcccccatcgctgggtcaatagtacttgccgcagtactcttaaaactaggcggctatggtataatacgcctcacactcattctcaaccccctgacaaaacacatagcctaccccttccttgtactatccctatgaggcataattataacaagctccatctgcctacgacaaacagacctaaaatcgctcattgcatactcttcaatcagccacatagccctcgtagtaacagccattctcatccaaaccccctgaagcttcaccggcgcagtcattctcataatcgcccacggacttacatcctcattactattctgcctagcaaactcaaactacgaacgcactcacagtcgcatcataatcctctctcaaggacttcaaactctactcccactaatagctttttgatgacttctagcaagcctcgctaacctcgccttaccccccactattaacctactgggagaactctctgtgctagtaaccacgttctcctgatcaaatatcactctcctacttacaggactcaacatactagtcacagccctatactccctctacatatttaccacaacacaatggggctcactcacccaccacattaacaacataaaaccctcattcacacgagaaaacaccctcatgttcatacacctatcccccattctcctcctatccctcaaccccgacatcattaccgggttttcctcttgtaaatatagtttaaccaaaacatcagattgtgaatctgacaacagaggcttacgaccccttatttaccgagaaagctcacaagaactgctaactcatgcccccatgtctaacaacatggctttctcaacttttaaaggataacagctatccattggtcttaggccccaaaaattttggtgcaactccaaataaaagtaataaccatgcacactactataaccaccctaaccctgacttccctaattccccccatccttaccaccctcgttaaccctaacaaaaaaaactcatacccccattatgtaaaatccattgtcgcatccacctttattatcagtctcttccccacaacaatattcatgtgcctagaccaagaagttattatctcgaactgacactgagccacaacccaaacaacccagctctccctaagcttcaaactagactacttctccataatattcatccctgtagcattgttcgttacatggtccatcatagaattctcactgtgatatataaactcagacccaaacattaatcagttcttcaaatatctactcattttcctaattaccatactaatcttagttaccgctaacaacctattccaactgttcatcggctgagagggcgtaggaattatatccttcttgctcatcagttgatgatacgcccgagcagatgccaacacagcagccattcaagcaatcctatacaaccgtatcggcgatatcggtttcatcctcgccttagcatgatttatcctacactccaactcatgagacccacaacaaatagcccttctaaacgctaatccaagcctcaccccactactaggcctcctcctagcagcagcaggcaaatcagcccaattaggtctccacccctgactcccctcagccatagaaggccccaccccagtctcagccctactccactcaagcactatagttgtagcaggaatcttcttactcatccgcttccaccccctagcagaaaatagcccactaatccaaactctaacactatgcttaggcgctatcaccactctgttcgcagcagtctgcgcccttacacaaaatgacatcaaaaaaatcgtagccttctccacttcaagtcaactaggactcataatagttacaatcggcatcaaccaaccacacctagcattcctgcacatctgtacccacgccttcttcaaagccatactatttatgtgctccgggtccatcatccacaaccttaacaatgaacaagatattcgaaaaataggaggactactcaaaaccatacctctcacttcaacctccctcaccattggcagcctagcattagcaggaatacctttcctcacaggtttctactccaaagaccacatcatcgaaaccgcaaacatatcatacacaaacgcctgagccctatctattactctcatcgctacctccctgacaagcgcctatagcactcgaataattcttctcaccctaacaggtcaacctcgcttccccacccttactaacattaacgaaaataaccccaccctactaaaccccattaaacgcctgacagccggaagcctattcgcaggatttctcattactaacaacatttcccccgcatcccccttccaaacaacaatccccctctacctaaaactcacagccctcgctgtcactttcctaggacttctaacagccctagacctcaactacctaaccaacaaacttaaaataaaatccccactatgcacattttatttctccaacatactcggattctaccctagcatcacacaccgcacaatcccctatctaggccttcttgcgagccaaaacctgcccctactcctcctagacctaacctgactagaaaagctattacctaaaacaatttcacagcaccaaatctccacctccatcatcacctcaacccaaaaaggcataattaaactttacttcctctctttcttcttcccactcatcctaaccctactcctaatcacataacctattcccccgagcaatctcaattacaatatatacaccaacaaacaatgttcaaccagtaactactactaatcaacgcccataatcatacaaagcccccgcaccaataggatcctcccgaatcaaccctgacccctctccttcataaattattcagcttcctacactattaaagtttaccacaaccaccaccccatcatactctttcacccacagcaccaatcctacctccatcgctaaccccactaaaacactcaccaagacctcaacccctgaccctcatgcctcaggatactcctcaatagccatcgctgtagtatacccaaagacaaccatcattccccctaaataaattaaaaaaactattaaacccatataacctcccccaaaattcagaataataacacacccgaccacaccgctaacaatcaatactaaacccccataaataggagaaggcttagaagaaaaccccacaaaccccattactaaacccacactcaacagaaacaaagcatacatcattattctcgcacggactacaaccacgaccaatgatatgaaaaaccatcgttgtatttcaactacaagaacaccaatgaccccaatacgcaaaattaaccccctaataaaattaattaaccactcattcatcgacctccccaccccatccaacatctccgcatgatgaaacttcggctcactccttggcgcctgcctgatcctccaaatcaccacaggactattcctagccatgcactactcaccagacgcctcaaccgccttttcatcaatcgcccacatcactcgagacgtaaattatggctgaatcatccgctaccttcacgccaatggcgcctcaatattctttatctgcctcttcctacacatcgggcgaggcctatattacggatcatttctctactcagaaacctgaaacatcggcattatcctcctgcttgcaactatagcaacagccttcataggctatgtcctcccgtgaggccaaatatcattctgaggggccacagtaattacaaacttactatccgccatcccatacattgggacagacctagttcaatgaatctgaggaggctactcagtagacagtcccaccctcacacgattctttacctttcacttcatcttgcccttcattattgcagccctagcagcactccacctcctattcttgcacgaaacgggatcaaacaaccccctaggaatcacctcccattccgataaaatcaccttccacccttactacacaatcaaagacgccctcggcttacttctcttccttctctccttaatgacattaacactattctcaccagacctcctagccgacccagacaattataccctagccaaccccttaaacacccctccccacatcaagcccgaatgatatttcctattcgcctacacaattctccgatccgtccctaacaaactaggaggcgtccttgccctattactatccatcctcatcctagcaataatccccatcctccatatatccaaacaacaaagcataatatttcgcccactaagccaatcactttattgactcctagccgcagacctcctcattctaacctgaatcggaggacaaccagtaagctacccttttaccatcattggacaagtagcatccgtactatacttcacaacaatcctaatcctaataccaactatctccctaattgaaaacaaaatactcaaatgggcctgtccttgtagtataaactaatacaccagtcttgtaaaccagagatgaaaacctttttccaaggacaaatcagagaaaaagtctttaactccaccattagcacccaaagctaagattctaatttaaactattctctgttctttcatggggaagcagatttgggtaccacccaagtattgactcacccatcaacaaccgctatgtatttcgtacattactgccagccaccatgaatattgtacggtaccataaatacttgaccacctgtagtacataaaaacccaatctacatcaaaaccccccccccatgcttacaagcaagtacagcaatcaaccttcaactatcacacatcaactgcaactccaaagccacccctcacccactaggatatcaacaaacctacccacccttaacagtacatagtacataaagccatttaccgtacatagcacattacagtcaaatcccttctcgtccccatggatgacccccctcagataggggtcccttgaccaccatcctccgtgaaatcaatatcccgcacaagagtgctactctcctcgctccgggcccataacacttgggggtagctaaagtgaactgtatccgacatctggttcctacttcagggtcataaagcctaaatagcccacacgttccccttaaataagacatcacgatg

SEQ ID NO: 262 - DNA, 16571 bp, Homo sapiens mitochondrial
  3109: "n" refers to a nucleotide at position 3107 of the Cambridge Reference Sequence (CRS, Anderson et al. 1981 Nature 290:457-465), later determined to be absent from the human mtDNA sequence according to the revised CRS (rCRS, Andrews et al. 1999 Nature Genetics 23:147); "n" therefore represents a single nucleotide deletion at a position corresponding to nucleotide 3107 of SEQ ID NO:1 as provided herein.
gatcacaggtctatcaccctattaaccactcacgggagctctccatgcatttggtattttcgtctggggggtatgcacgcgatagcattgcgggacgctggagccggagcaccctatgtcgcagtatctgtctttgattcctgcctcatcctattatttatcgcacctacgttcaatattacaggcgaacatacttactaaagtgtgttaattaattaatgcttgtaggacataataataacaattgaatgtctgcacagccgctttccacacagacatcataacaaaaaatttccaccaaaccccccctcccccgcccttctggccacagcacttaaacacatctctgccaaaccccaaaaacaaagaaccctaacaccagcctaaccagatttcaaattttatcttttggcggtatgcacttttaacagtcaccccccaactaacacattattttcccctcccactcccatactactaatctcatcaatacaacccccgcccatcctacccagcacacacacaccgctgctaaccccataccccgaaccaaccaaaccccaaagacaccccccacagtttatgtagcttacctcctcaaagcaatacactgaaaatgtttagacgggctcacatcaccccataaacaaataggtttggtcctagcctttctattagctcttagtaagattacacatgcaagcatccccgttccagtgagttcaccctctaaatcaccacgatcaaaagggacaagcatcaagcacgcagcaatgcagctcaaaacgcttagcctagccacacccccacgggaaacagcagtgattaacctttagcaataaacgaaagtttaactaagctatactaaccccagggttggtcaatttcgtgccagccaccgcggtcacacgattaacccaagtcaatagaagccggcgtaaagagtgttttagatcaccccctccccaataaagctaaaactcacctgagttgtaaaaaactccagttgacacaaaatagactacgaaagtggctttaacatatctgaacacacaatagctaagacccaaactgggattagataccccactatgcttagccctaaacctcaacagttaaatcaacaaaactgctcgccagaacactacgagccacagcttaaaactcaaaggacctggcggtgcttcatatccctctagaggagcctgttctgtaatcgataaaccccgatcaacctcaccacctcttgctcagcctatataccgccatcttcagcaaaccctgatgaaggctacaaagtaagcgcaagtacccacgtaaagacgttaggtcaaggtgtagcccatgaggtggcaagaaatgggctacattttctaccccagaaaactacgatagcccttatgaaacttaagggtcgaaggtggatttagcagtaaactgagagtagagtgcttagttgaacagggccctgaagcgcgtacacaccgcccgtcaccctcctcaagtatacttcaaaggacatttaactaaaacccctacgcatttatatagaggagacaagtcgtaacatggtaagtgtactggaaagtgcacttggacgaaccagagtgtagcttaacacaaagcacccaacttacacttaggagatttcaacttaacttgaccgctctgagctaaacctagccccaaacccactccaccttactaccagacaaccttagccaaaccatttacccaaataaagtataggcgatagaaattgaaacctggcgcaatagatatagtaccgcaagggaaagatgaaaaattataaccaagcataatatagcaaggactaacccctataccttctgcataatgaattaactagaaataactttgcaaggagagccaaagctaagacccccgaaaccagacgagctacctaagaacagctaaaagagcacacccgtctatgtagcaaaatagtgggaagatttataggtagaggcgacaaacctaccgagcctggtgatagctggttgtccaagatagaatcttagttcaactttaaatttgcccacagaaccctctaaatccccttgtaaatttaactgttagtccaaagaggaacagctctttggacactaggaaaaaaccttgtagagagagtaaaaaatttaacacccatagtaggcctaaaagcagccaccaattaagaaagcgttcaagctcaacacccactacctaaaaaatcccaaacatataactgaactcctcacacccaattggaccaatctatcaccctatagaagaactaatgttagtataagtaacatgaaaacattctcctccgcataagcctgcgtcagattaaaacactgaactgacaattaacagcccaatatctacaatcaaccaacaagtcattattaccctcactgtcaacccaacacaggcatgctcataaggaaaggttaaaaaaagtaaaaggaactcggcaaatcttaccccgcctgtttaccaaaaacatcacctctagcatcaccagtattagaggcaccgcctgcccagtgacacatgtttaacggccgcggtaccctaaccgtgcaaaggtagcataatcacttgttccttaaatagggacctgtatgaatggctccacgagggttcagctgtctcttacttttaaccagtgaaattgacctgcccgtgaagaggcgggcataacacagcaagacgagaagaccctatggagctttaatttattaatgcaaacagtacctaacaaacccacaggtcctaaactaccaaacctgcattaaaaatttcggttggggcgacctcggagcagaacccaacctccgagcagtacatgctaagacttcaccagtcaaagcgaactactatactcaattgatccaataacttgaccaacggaacaagttaccctagggataacagcgcaatcctattctagagtccatatcaacaatagggtttacgacctcgatgttggatcaggacatcccaatggtgcagccgctattaaaggttcgtttgttcaacgattaaagtcctacgtgatctgagttcagaccggagtaatccaggtcggtttctatctacnttcaaattcctccctgtacgaaaggacaagagaaataaggcctacttcacaaagcgccttcccccgtaaatgatatcatctcaacttagtattatacccacacccacccaagaacagggtttgttaagatggcagagcccggtaatcgcataaaacttaaaactttacagtcagaggttcaattcctcttcttaacaacatacccatggccaacctcctactcctcattgtacccattctaatcgcaatggcattcctaatgcttaccgaacgaaaaattctaggctatatacaactacgcaaaggccccaacgttgtaggcccctacgggctactacaacccttcgctgacgccataaaactcttcaccaaagagcccctaaaacccgccacatctaccatcaccctctacatcaccgccccgaccttagctctcaccatcgctcttctactatgaacccccctccccatacccaaccccctggtcaacctcaacctaggcctcctatttattctagccacctctagcctagccgtttactcaatcctctgatcagggtgagcatcaaactcaaactacgccctgatcggcgcactgcgagcagtagcccaaacaatctcatatgaagtcaccctagccatcattctactatcaacattactaataagtggctcctttaacctctccacccttatcacaacacaagaacacctctgattactcctgccatcatgacccttggccataatatgatttatctccacactagcagagaccaaccgaacccccttcgaccttgccgaaggggagtccgaactagtctcaggcttcaacatcgaatacgccgcaggccccttcgccctattcttcatagccgaatacacaaacattattataataaacaccctcaccactacaatcttcctaggaacaacatatgacgcactctcccctgaactctacacaacatattttgtcaccaagaccctacttctaacctccctgttcttatgaattcgaacagcatacccccgattccgctacgaccaactcatacacctcctatgaaaaaacttcctaccactcaccctagcattacttatatgatatgtctccatacccattacaatctccagcattccccctcaaacctaagaaatatgtctgataaaagagttactttgatagagtaaataataggagcttaaacccccttatttctaggactatgagaatcgaacccatccctgagaatccaaaattctccgtgccacctatcacaccccatcctaaagtaaggtcagctaaataagctatcgggcccataccccgaaaatgttggttatacccttcccgtactaattaatcccctggcccaacccgtcatctactctaccatctttgcaggcacactcatcacagcgctaagctcgcactgattttttacctgagtaggcctagaaataaacatgctagcttttattccagttctaaccaaaaaaataaaccctcgttccacagaagctgccatcaagtatttcctcacgcaagcaaccgcatccataatccttctaatagctatcctcttcaacaatatactctccggacaatgaaccataaccaatactaccaatcaatactcatcattaataatcataatggctatagcaataaaactaggaatagccccctttcacttctgagtcccagaggttacccaaggcacccctctgacatccggcctgcttcttctcacatgacaaaaactagcccccatctcaatcatataccaaatctctccctcactaaacgtaagccttctcctcactctctcaatcttatccatcatagcaggcagttgaggtggattaaaccaaacccagctacgcaaaatcttagcatactcctcaattacccacataggatgaataatagcagttctaccgtacaaccctaacataaccattcttaatttaactatttatattatcctaactactaccgcattcctactactcaacttaaactccagcaccacgaccctactactatctcgcacctgaaacaagctaacatgactaacacccttaattccatccaccctcctctccctaggaggcctgcccccgctaaccggctttttgcccaaatgggccattatcgaagaattcacaaaaaacaatagcctcatcatccccaccatcatagccaccatcaccctccttaacctctacttctacctacgcctaatctactccacctcaatcacactactccccatatctaacaacgtaaaaataaaatgacagtttgaacatacaaaacccaccccattcctccccacactcatcgcccttaccacgctactcctacctatctccccttttatactaataatcttatagaaatttaggttaaatacagaccaagagccttcaaagccctcagtaagttgcaatacttaatttctgtaacagctaaggactgcaaaaccccactctgcatcaactgaacgcaaatcagccactttaattaagctaagcccttactagaccaatgggacttaaacccacaaacacttagttaacagctaagcaccctaatcaactggcttcaatctacttctcccgccgccgggaaaaaaggcgggagaagccccggcaggtttgaagctgcttcttcgaatttgcaattcaatatgaaaatcacctcggagctggtaaaaagaggcctaacccctgtctttagatttacagtccaatgcttcactcagccattttacctcacccccactgatgttcgccgaccgttgactattctctacaaaccacaaagacattggaacactatacctattattcggcgcatgagctggagtcctaggcacagctctaagcctccttattcgagccgagctgggccagccaggcaaccttctaggtaacgaccacatctacaacgttatcgtcacagcccatgcatttgtaataatcttcttcatagtaatacccatcataatcggaggctttggcaactgactagttcccctaataatcggtgcccccgatatggcgtttccccgcataaacaacataagcttctgactcttacctccctctctcctactcctgctcgcatctgctatagtggaggccggagcaggaacaggttgaacagtctaccctcccttagcagggaactactcccaccctggagcctccgtagacctaaccatcttctccttacacctagcaggtgtctcctctatcttaggggccatcaatttcatcacaacaattatcaatataaaaccccctgccataacccaataccaaacgcccctcttcgtctgatccgtcctaatcacagcagtcctacttctcctatctctcccagtcctagctgctggcatcactatactactaacagaccgcaacctcaacaccaccttcttcgaccccgccggaggaggagaccccattctataccaacacctattctgatttttcggtcaccctgaagtttatattcttatcctaccaggcttcggaataatctcccatattgtaacttactactccggaaaaaaagaaccatttggatacataggtatggtctgagctatgatatcaattggcttcctagggtttatcgtgtgagcacaccatatatttacagtaggaatagacgtagacacacgagcatatttcacctccgctaccataatcatcgctatccccaccggcgtcaaagtatttagctgactcgccacactccacggaagcaatatgaaatgatctgctgcagtgctctgagccctaggattcatctttcttttcaccgtaggtggcctgactggcattgtattagcaaactcatcactagacatcgtactacacgacacgtactacgttgtagcccacttccactatgtcctatcaataggagctgtatttgccatcataggaggcttcattcactgatttcccctattctcaggctacaccctagaccaaacctacgccaaaatccatttcactatcatattcatcggcgtaaatctaactttcttcccacaacactttctcggcctatccggaatgccccgacgttactcggactaccccgatgcatacaccacatgaaacatcctatcatctgtaggctcattcatttctctaacagcagtaatattaataattttcatgatttgagaagccttcgcttcgaagcgaaaagtcctaatagtagaagaaccctccataaacctggagtgactatatggatgccccccaccctaccacacattcgaagaacccgtatacataaaatctagacaaaaaaggaaggaatcgaaccccccaaagctggtttcaagccaaccccatggcctccatgactttttcaaaaaggtattagaaaaaccatttcataactttgtcaaagttaaattataggctaaatcctatatatcttaatggcacatgcagcgcaagtaggtctacaagacgctacttcccctatcatagaagagcttatcacctttcatgatcacgccctcataatcattttccttatctgcttcctagtcctgtatgcccttttcctaacactcacaacaaaactaactaatactaacatctcagacgctcaggaaatagaaaccgtctgaactatcctgcccgccatcatcctagtcctcatcgccctcccatccctacgcatcctttacataacagacgaggtcaacgatccctcccttaccatcaaatcaattggccaccaatggtactgaacctacgagtacaccgactacggcggactaatcttcaactcctacatacttcccccattattcctagaaccaggcgacctgcgactccttgacgttgacaatcgagtagtactcccgattgaagcccccattcgtataataattacatcacaagacgtcttgcactcatgagctgtccccacattaggcttaaaaacagatgcaattcccggacgtctaaaccaaaccactttcaccgctacacgaccgggggtatactacggtcaatgctctgaaatctgtggagcaaaccacagtttcatgcccatcgtcctagaattaattcccctaaaaatctttgaaatagggcccgtatttaccctatagcaccccctctaccccctctagagcccactgtaaagctaacttagcattaaccttttaagttaaagattaagagaaccaacacctctttacagtgaaatgccccaactaaatactaccgtatggcccaccataattacccccatactccttacactattcctcatcacccaactaaaaatattaaacacaaactaccacctacctccctcaccaaagcccataaaaataaaaaattataacaaaccctgagaaccaaaatgaacgaaaatctgttcgcttcattcattgcccccacaatcctaggcctacccgccgcagtactgatcattctatttccccctctattgatccccacctccaaatatctcatcaacaaccgactaatcaccacccaacaatgactaatcaaactaacctcaaaacaaatgataaccatacacaacactaaaggacgaacctgatctcttatactagtatccttaatcatttttattgccacaactaacctcctcggactcctgcctcactcatttacaccaaccacccaactatctataaacctagccatggccatccccttatgagcgggcgcagtgattataggctttcgctctaagattaaaaatgccctagcccacttcttaccacaaggcacacctacaccccttatccccatactagttattatcgaaaccatcagcctactcattcaaccaatagccctggccgtacgcctaaccgctaacattactgcaggccacctactcatgcacctaattggaagcgccaccctagcaatatcaaccattaaccttccctctacacttatcatcttcacaattctaattctactgactatcctagaaatcgctgtcgccttaatccaagcctacgttttcacacttctagtaagcctctacctgcacgacaacacataatgacccaccaatcacatgcctatcatatagtaaaacccagcccatgacccctaacaggggccctctcagccctcctaatgacctccggcctagccatgtgatttcacttccactccataacgctcctcatactaggcctactaaccaacacactaaccatataccaatgatggcgcgatgtaacacgagaaagcacataccaaggccaccacacaccacctgtccaaaaaggccttcgatacgggataatcctatttattacctcagaagtttttttcttcgcaggatttttctgagccttttaccactccagcctagcccctaccccccaattaggagggcactggcccccaacaggcatcaccccgctaaatcccctagaagtcccactcctaaacacatccgtattactcgcatcaggagtatcaatcacctgagctcaccatagtctaatagaaaacaaccgaaaccaaataattcaagcactgcttattacaattttactgggtctctattttaccctcctacaagcctcagagtacttcgagtctcccttcaccatttccgacggcatctacggctcaacattttttgtagccacaggcttccacggacttcacgtcattattggctcaactttcctcactatctgcttcatccgccaactaatatttcactttacatccaaacatcactttggcttcgaagccgccgcctgatactggcattttgtagatgtggtttgactatttctgtatgtctccatctattgatgagggtcttactcttttagtataaatagtaccgttaacttccaattaactagttttgacaacattcaaaaaagagtaataaacttcgccttaattttaataatcaacaccctcctagccttactactaataattattacattttgactaccacaactcaacggctacatagaaaaatccaccccttacgagtgcggcttcgaccctatatcccccgcccgcgtccctttctccataaaattcttcttagtagctattaccttcttattatttgatctagaaattgccctccttttacccctaccatgagccctacaaacaactaacctgccactaatagttatgtcatccctcttattaatcatcatcctagccctaagtctggcctatgagtgactacaaaaaggattagactgaaccgaattggtatatagtttaaacaaaacgaatgatttcgactcattaaattatgataatcatatttaccaaatgcccctcatttacataaatattatactagcatttaccatctcacttctaggaatactagtatatcgctcacacctcatatcctccctactatgcctagaaggaataatactatcgctgttcattatagctactctcataaccctcaacacccactccctcttagccaatattgtgcctattgccatactagtctttgccgcctgcgaagcagcggtgggcctagccctactagtctcaatctccaacacatatggcctagactacgtacataacctaaacctactccaatgctaaaactaatcgtcccaacaattatattactaccactgacatgactttccaaaaaacacataatttgaatcaacacaaccacccacagcctaattattagcatcatccctctactattttttaaccaaatcaacaacaacctatttagctgttccccaaccttttcctccgaccccctaacaacccccctcctaatactaactacctgactcctacccctcacaatcatggcaagccaacgccacttatccagtgaaccactatcacgaaaaaaactctacctctctatactaatctccctacaaatctccttaattataacattcacagccacagaactaatcatattttatatcttcttcgaaaccacacttatccccaccttggctatcatcacccgatgaggcaaccagccagaacgcctgaacgcaggcacatacttcctattctacaccctagtaggctcccttcccctactcatcgcactaatttacactcacaacaccctaggctcactaaacattctactactcactctcactgcccaagaactatcaaactcctgagccaacaacttaatatgactagcttacacaatagcttttatagtaaagatacctctttacggactccacttatgactccctaaagcccatgtcgaagcccccatcgctgggtcaatagtacttgccgcagtactcttaaaactaggcggctatggtataatacgcctcacactcattctcaaccccctgacaaaacacatagcctaccccttccttgtactatccctatgaggcataattataacaagctccatctgcctacgacaaacagacctaaaatcgctcattgcatactcttcaatcagccacatagccctcgtagtaacagccattctcatccaaaccccctgaagcttcaccggcgcagtcattctcataatcgcccacgggcttacatcctcattactattctgcctagcaaactcaaactacgaacgcactcacagtcgcatcataatcctctctcaaggacttcaaactctactcccactaatagctttttgatgacttctagcaagcctcgctaacctcgccttaccccccactattaacctactgggagaactctctgtgctagtaaccacgttctcctgatcaaatatcactctcctacttacaggactcaacatactagtcacagccctatactccctctacatatttaccacaacacaatggggctcactcacccaccacattaacaacataaaaccctcattcacacgagaaaacaccctcatgttcatacacctatcccccattctcctcctatccctcaaccccgacatcattaccgggttttcctcttgtaaatatagtttaaccaaaacatcagattgtgaatctgacaacagaggcttacgaccccttatttaccgagaaagctcacaagaactgctaactcatgcccccatgtctaacaacatggctttctcaacttttaaaggataacagctatccattggtcttaggccccaaaaattttggtgcaactccaaataaaagtaataaccatgcacactactataaccaccctaaccctgacttccctaattccccccatccttaccaccctcgttaaccctaacaaaaaaaactcatacccccattatgtaaaatccattgtcgcatccacctttattatcagtctcttccccacaacaatattcatgtgcctagaccaagaagttattatctcgaactgacactgagccacaacccaaacaacccagctctccctaagcttcaaactagactacttctccataatattcatccctgtagcattgttcgttacatggtccatcatagaattctcactgtgatatataaactcagacccaaacattaatcagttcttcaaatatctactcatcttcctaattaccatactaatcttagttaccgctaacaacctattccaactgttcatcggctgagagggcgtaggaattatatccttcttgctcatcagttgatgatacgcccgagcagatgccaacacagcagccattcaagcaatcctatacaaccgtatcggcgatatcggtttcatcctcgccttagcatgatttatcctacactccaactcatgagacccacaacaaatagcccttctaaacgctaatccaagcctcaccccactactaggcctcctcctagcagcagcaggcaaatcagcccaattaggtctccacccctgactcccctcagccatagaaggccccaccccagtctcagccctactccactcaagcactatagttgtagcaggaatcttcttactcatccgcttccaccccctagcagaaaatagcccactaatccaaactctaacactatgcttaggcgctatcaccactctgttcgcagcagtctgcgcccttacacaaaatgacatcaaaaaaatcgtagccttctccacttcaagtcaactaggactcataatagttacaatcggcatcaaccaaccacacctagcattcctgcacatctgtacccacgccttcttcaaagccatactatttatgtgctccgggtccatcatccacaaccttaacaatgaacaagatattcgaaaaataggaggactactcaaaaccatacctctcacttcaacctccctcaccattggcagcctagcattagcaggaatacctttcctcacaggtttctactccaaagaccacatcatcgaaaccgcaaacatatcatacacaaacgcctgagccctatctattactctcatcgctacctccctgacaagcgcctatagcactcgaataattcttctcaccctaacaggtcaacctcgcttccccacccttactaacattaacgaaaataaccccaccctactaaaccccattaaacgcctggcagccggaagcctattcgcaggatttctcattactaacaacatttcccccgcatcccccttccaaacaacaatccccctctacctaaaactcacagccctcgctgtcactttcctaggacttctaacagccctagacctcaactacctaaccaacaaacttaaaataaaatccccactatgcacattttatttctccaacatactcggattctaccctagcatcacacaccgcacaatcccctatctaggccttcttacgagccaaaacctgcccctactcctcctagacctaacctgactagaaaagctattacctaaaacaatttcacagcaccaaatctccacctccatcatcacctcaacccaaaaaggcataattaaactttacttcctctctttcttcttcccactcatcctaaccctactcctaatcacataacctattcccccgagcaatctcaattacaatatatacaccaacaaacaatgttcaaccagtaactactactaatcaacgcccataatcatacaaagcccccgcaccaataggatcctcccgaatcaaccctgacccctctccttcataaattattcagcttcctacactattaaagtttaccacaaccaccaccccatcatactctttcacccacagcaccaatcctacctccatcgctaaccccactaaaacactcaccaagacctcaacccctgacccccatgcctcaggatactcctcaatagccatcgctgtagtatatccaaagacaaccatcattccccctaaataaattaaaaaaactattaaacccatataacctcccccaaaattcagaataataacacacccgaccacaccgctaacaatcaatactaaacccccataaataggagaaggcttagaagaaaaccccacaaaccccattactaaacccacactcaacagaaacaaagcatacatcattattctcgcacggactacaaccacgaccaatgatatgaaaaaccatcgttgtatttcaactacaagaacaccaatgaccccaatacgcaaaactaaccccctaataaaattaattaaccactcattcatcgacctccccaccccatccaacatctccgcatgatgaaacttcggctcactccttggcgcctgcctgatcctccaaatcaccacaggactattcctagccatgcactactcaccagacgcctcaaccgccttttcatcaatcgcccacatcactcgagacgtaaattatggctgaatcatccgctaccttcacgccaatggcgcctcaatattctttatctgcctcttcctacacatcgggcgaggcctatattacggatcatttctctactcagaaacctgaaacatcggcattatcctcctgcttgcaactatagcaacagccttcataggctatgtcctcccgtgaggccaaatatcattctgaggggccacagtaattacaaacttactatccgccatcccatacattgggacagacctagttcaatgaatctgaggaggctactcagtagacagtcccaccctcacacgattctttacctttcacttcatcttgcccttcattattgcagccctagcagcactccacctcctattcttgcacgaaacgggatcaaacaaccccctaggaatcacctcccattccgataaaatcaccttccacccttactacacaatcaaagacgccctcggcttacttctcttccttctctccttaatgacattaacactattctcaccagacctcctaggcgacccagacaattataccctagccaaccccttaaacacccctccccacatcaagcccgaatgatatttcctattcgcctacacaattctccgatccgtccctaacaaactaggaggcgtccttgccctattactatccatcctcatcctagcaataatccccatcctccatatatccaaacaacaaagcataatatttcgcccactaagccaatcactttattgactcctagccgcagacctcctcattctaacctgaatcggaggacaaccagtaagctacccttttaccatcattggacaagtagcatccgtactatacttcacaacaatcctaatcctaataccaactatctccctaattgaaaacaaaatactcaaatgggcctgtccttgtagtataaactaatacaccagtcttgtaaaccggagatgaaaacctttttccaaggacaaatcagagaaaaagtctttaactccaccattagcacccaaagctaagattctaatttaaactattctctgttctttcatggggaagcagatttgggtaccacccaagtattgactcacccatcaacaaccgctatgtatttcgtacattactgccagccaccatgaatattgtacggtaccataaatacttgaccacctgtagtacataaaaacccaatccacatcaaaaccccccccccatgcttacaagcaagtacagcaatcaaccctcaactatcacacatcaactgcaactccaaagccacccctcacccactaggataccaacaaacctacccacccttaacagtacatagtacataaagccatttaccgtacatagcacattacagtcaaatcccctctcgtccccatggatgacccccctcagataggggtcccttgaccaccatcctccgtgaaatcaatatcccgcacaagagtgctactctcctcgctccgggcccataacacttgggggtagctaaagtgaactgtatccgacatctggttcctacttcagggccataaagcctaaatagcccacacgttccccttaaataagacatcacgatg

SEQ ID NO: 263 - DNA, 16570 bp, Homo sapiens mitochondrial
  3108: "n" refers to a nucleotide at position 3107 of the Cambridge Reference Sequence (CRS, Anderson et al. 1981 Nature 290:457-465), later determined to be absent from the human mtDNA sequence according to the revised CRS (rCRS, Andrews et al. 1999 Nature Genetics 23:147); "n" therefore represents a single nucleotide deletion at a position corresponding to nucleotide 3107 of SEQ ID NO:1 as provided herein.
gatcacaggtctatcaccctattaaccactcacgggagctctccatgcatttggtattttcgtctggggggtgtgcacgcgatagcattgcgagacgctggagccggagcaccctatgtcgcagtatctgtctttgattcctgcctcatcctattatttatcgcacctacgttcaatattacaggcgaacatacttactaaagtgtgttaattaattaatgcttgtaggacataataataacaattgaatgtctgcacagccgctttccacacagacatcataacaaaaaatttccaccaaaccccccctcccccgccttctggccacagcacttaaacacatctctgccaaaccccaaaaacaaagaaccctaacaccagcctaaccagatttcaaattttatcttttggcggtatgcacttttaacagtcaccccccaactaacacattattttcccctcccactcccatactactaatctcatcaatacaacccccgcccatcctacccagcacacacacaccgctgctaaccccataccccgaaccaaccaaaccccaaagacaccccccacagtttatgtagcttacctcctcaaagcaatacactgaaaatgtttagacgggctcacatcaccccataaacaaataggtttggtcctagcctttctattagctcttagtaagattacacatgcaagcatccccgttccagtgagttcaccctctaaatcaccacgatcaaaagggacaagcatcaagcacgcagcaatgcagctcaaaacgcttagcctagccacacccccacgggaaacagcagtgattaacctttagcaataaacgaaagtttaactaagctatactaaccccagggttggtcaatttcgtgccagccaccgcggtcacacgattaacccaagtcaatagaagccggcgtaaagagtgttttagatcaccccctccccaataaagctaaaactcacctgagttgtaaaaaactccagttgacacaaaatagactacgaaagtggctttaacatatctgaacacacaatagctaagacccaaactgggattagataccccactatgcttagccctaaacctcaacagttaaatcaacaaaactgctcgccagaacactacgagccacagcttaaaactcaaaggacctggcggtgcttcatatccctctagaggagcctgttctgtaatcgataaaccccgatcaacctcaccacctcttgctcagcctatataccgccatcttcagcaaaccctgatgaaggctacaaagtaagcgcaagtacccacgtaaagacgttaggtcaaggtgtagcccatgaggtggcaagaaatgggctacattttctaccccagaaaactacgatagcccttatgaaacttaagggtcgaaggtggatttagcagtaaactgagagtagagtgcttagttgaacagggccctgaagcgcgtacacaccgcccgtcaccctcctcaagtatacttcaaaggacatttaactaaaacccctacgcatttatatagaggagacaagtcgtaacatggtaagtgtactggaaagtgcacttggacgaaccagagtgtagcttaacacaaagcacccaacttacacttaggagatttcaacttaacttgaccgctctgagctaaacctagccccaaacccactccaccctactaccagacaaccttagccaaaccatttacccaaataaagtataggcgatagaaattgaaacctggcgcaatagatatagtaccgcaagggaaagatgaaaaattataaccaagcataatatagcaaggactaacccctataccttctgcataatgaattaactagaaataactttgcaaggagagccaaagctaagacccccgaaaccagacgagctacctaagaacagctaaaagagcacacccgtctatgtagcaaaatagtgggaagatttataggtagaggcgacaaacctaccgagcctggtgatagctggttgtccaagatagaatcttagttcaactttaaatttgcccacagaaccctctaaatccccttgtaaatttaactgttagtccaaagaggaacagctctttggacactaggaaaaaaccttgtagagagagtaaaaaatttaacacccatagtaggcctaaaagcagccaccaattaagaaagcgttcaagctcaacacccactacctaaaaaatcccaaacatataactgaactcctcacacccaattggaccaatctatcaccctatagaagaactaatgttagtataagtaacatgaaaacattctcctccgcataagcctgcgtcagattaaaacactgaactgacaattaacagcccaatatctacaatcaaccaacaagtcattattaccctcactgtcaacccaacacaggcatgctcataaggaaaggttaaaaaaagtaaaaggaactcggcaaatcttaccccgcctgtttaccaaaaacatcacctctagcatcaccagtattagaggcaccgcctgcccagtgacacatgtttaacggccgcggtaccctaaccgtgcaaaggtagcataatcacttgttccttaaatagggacctgtatgaatggctccacgagggttcagctgtctcttacttttaaccagtgaaattgacctgcccgtgaagaggcgggcatgacacagcaagacgagaagaccctatggagctttaatttattaatgcaaacagtacctaacaaacccacaggtcctaaactaccaaacctgcattaaaaatttcggttggggcgacctcggagcagaacccaacctccgagcagtacatgctaagacttcaccagtcaaagcgaactactatactcaattgatccaataacttgaccaacggaacaagttaccctagggataacagcgcaatcctattctagagtccatatcaacaatagggtttacgacctcgatgttggatcaggacatcccgatggtgcagccgctattaaaggttcgtttgttcaacgattaaagtcctacgtgatctgagttcagaccggagtaatccaggtcggtttctatctacnttcaaattcctccctgtacgaaaggacaagagaaataaggcctacttcacaaagcgccttcccccgtaaatgatatcatctcaacttagcattatacccacacccacccaagaacagggtttgttaagatggcagagcccggtaatcgcataaaacttaaaactttacagtcagaggttcaattcctcttcttaacaacatacccatggccaacctcctactcctcattgtacccattctaatcgcaatggcattcctaatgcttaccgaacgaaaaattctaggctatatacaactacgcaaaggccccaacgttgtaggcccctacgggctactacaacccttcgctgacgccataaaactcttcaccaaagagcccctaaaacccgccacatctaccatcaccctctacatcaccgccccgaccttagctctcaccatcgctcttctactatgaacccccctccccatacccaaccccctggtcaacctcaacctaggcctcctatttattctagccacctctagcctagccgtttactcaatcctctgatcagggtgagcatcaaactcaaactacgccctgatcggcgcactgcgagcagtagcccaaacaatctcatatgaagtcaccctagccatcattctactatcaacattactaataagtggctcctttaacctctccacccttatcacaacacaagaacacctctgattactcctgccatcatgacccttggccataatatgatttatctccacactagcagagaccaaccgaacccccttcgaccttgccgaaggggagtccgaactagtctcaggcttcaacatcgaatacgccgcaggccccttcgccctattcttcatagccgaatacacaaacattattataataaacaccctcaccactacaatcttcctaggaacaacatatgacgcactctcccctgaactctacacaacatattttgtcaccaagaccctacttctaacctccctgttcttatgaattcgaacagcatacccccgattccgctacgaccaactcatacacctcctatgaaaaaacttcctaccactcaccctagcattacttatatgatatgtctccatacccattacaatctccagcattccccctcaaacctaagaaatatgtctgataaaagagttactttgatagagtaaataataggagcttaaacccccttatttctaggactatgagaatcgaacccatccctgagaatccaaaattctccgtgccacctatcacaccccatcctaaagtaaggtcagctaaataagctatcgggcccataccccgaaaatgttggttatacccttcccgtactaattaatcccctggcccaacccgtcatctactctaccatctttgcaggcacactcatcacagcgctaagctcgcactgattttttacctgagtaggcctagaaataaacatgctagcttttattccagttctaaccaaaaaaataaaccctcgttccacagaagctgccatcaagtatttcctcacgcaagcaaccgcatccataatccttctaatagctatcctcttcaacaatatactctccggacaatgaaccataaccaatactaccaatcaatactcatcattaataatcataatggctatagcaataaaactaggaatagccccctttcacttctgagtcccagaggttacccaaggcacccctctgacatccggcctgcttcttctcacatgacaaaaactagcccccatctcaatcatataccaaatctctccctcactaaacgtaagccttctcctcactctctcaatcttatccatcatagcaggcagttgaggtggattaaaccaaacccagctacgcaaaatcttagcatactcctcaattacccacataggatgaataatagcagttctaccgtacaaccctaacataaccattcttaatttaactatttatattatcctaactactaccgcattcctactactcaacttaaactccagcaccacgaccctactactatctcgcacctgaaacaagctaacatgactaacacccttaattccatccaccctcctctccctaggaggcctgcccccgctaaccggctttttgcccaaatgggccattatcgaagaattcacaaaaaacaatagcctcatcatccccaccatcatagccaccatcaccctccttaacctctacttctacctacgcctaatctactccacctcaatcacactactccccatatctaacaacgtaaaaataaaatgacagtttgaacatacaaaacccaccccattcctccccacactcatcgcccttaccacgctactcctacctatctcccctttcatactaataatcttatagaaatttaggttaaatacagaccaagagccttcaaagccctcagtaagttgcaatacttaatttctgtaacagctaaggactgcaaaaccccactctgcatcaactgaacgcaaatcagccactttaattaagctaagcccttactagaccaatgggacttaaacccacaaacacttagttaacagctaagcaccctaatcaactggcttcaatctacttctcccgccgccgggaaaaaaggcgggagaagccccggcaggtttgaagctgcttcttcgaatttgcaattcaatatgaaaatcacctcggagctggtaaaaagaggcctaacccctgtctttagatttacagtccaatgcttcactcagccattttacctcacccccactgatgttcgccgaccgttgactattctctacaaaccacaaagacattggaacactatacctattattcggcgcatgagctggagtcctaggcacagctctaagcctccttattcgagccgagctgggccagccaggcaaccttctaggtaacgaccacatctacaacgttatcgtcacagcccatgcatttgtaataatcttcttcatagtaatacccatcataatcggaggctttggcaactgactagttcccctaataatcggtgcccccgatatggcgtttccccgcataaacaacataagcttctgactcttacctccctctctcctactcctgctcgcatctgctatagtggaggccggagcaggaacaggttgaacagtctaccctcccttagcagggaactactcccaccctggagcctccgtagacctaaccatcttctccttacacctagcaggtgtctcctctatcttaggggccatcaatttcatcacaacaattatcaatataaaaccccctgccataacccaataccaaacgcccctcttcgtctgatccgtcctaatcacagcagtcctacttctcctatctctcccagtcctagctgctggcatcactatactactaacagaccgcaacctcaacaccaccttcttcgaccccgccggaggaggagaccccattctataccaacacctattctgatttttcggtcaccctgaagtttatattcttatcctaccaggcttcggaataatctcccatattgtaacttactactccggaaaaaaagaaccatttggatacataggtatggtctgagctatgatatcaattggcttcctagggtttatcgtgtgagcacaccatatatttacagtaggaatagacgtagacacacgagcatatttcacctccgctaccataatcatcgctatccccaccggcgtcaaagtatttagctgactcgccacactccacggaagcaatatgaaatgatctgctgcagtgctctgagccctaggattcatctttcttttcaccgtaggtggcctgactggcattgtattagcaaactcatcactagacatcgtactacacgacacgtactacgttgtagctcacttccactatgtcctatcaataggagctgtatttgccatcataggaggcttcattcactgatttcccctattctcaggctacaccctagaccaaacctacgccaaaatccatttcactatcatattcatcggcgtaaatctaactttcttcccacaacactttctcggcctatccggaatgccccgacgttactcggactaccccgatgcatacaccacatgaaacatcctatcatctgtaggctcattcatttctctaacagcagtaatattaataattttcatgatttgagaagccttcgcttcgaagcgaaaagtcctaatagtagaagaaccctccataaacctggagtgactatatggatgccccccaccctaccacacattcgaagaacccgtatacataaaatctagacaaaaaaggaaggaatcgaaccccccaaagctggtttcaagccaaccccatggcctccatgactttttcaaaaaggtattagaaaaaccatttcataactttgtcaaagttaaattataggctaaatcctatatatcttaatggcacatgcagcgcaagtaggtctacaagacgctacttcccctatcatagaagagcttatcacctttcatgatcacgccctcataatcattttccttatctgcttcctagtcctgtatgcccttttcctaacactcacaacaaaactaactaatactaacatctcagacgctcaggaaatagaaaccgtctgaactatcctgcccgccatcatcctagtcctcatcgccctcccatccctacgcatcctttacataacagacgaggtcaacgatccctcccttaccatcaaatcaattggccaccaatggtactgaacctacgagtacaccgactacggcggactaatcttcaactcctacatacttcccccattattcctagaaccaggcgacctgcgactccttgacgttgacaatcgagtagtactcccgattgaagcccccattcgtataataattacatcacaagacgtcttgcactcatgagctgtccccacattaggcttaaaaacagatgcaattcccggacgtctaaaccaaaccactttcaccgctacacgaccgggggtatactacggtcaatgctctgaaatctgtggagcaaaccacagtttcatgcccatcgtcctagaattaattcccctaaaaatctttgaaatagggcccgtatttaccctatagcaccccctctaccccctctagagcccactgtaaagctaacttagcattaaccttttaagttaaagattaagagaaccaacacctctttacagtgaaatgccccaactaaatactaccgtatggcccaccataattacccccatactccttacactattcctcatcacccaactaaaaatattaaacacaaactaccacctacctccctcaccaaagcccataaaaataaaaaattataacaaaccctgagaaccaaaatgaacgaaaatctgttcgcttcattcattgcccccacaatcctaggcctacccgccgcagtactgatcattctatttccccctctattgatccccacctccaaatatctcatcaacaaccgactaatcaccacccaacaatgactaatcaaactaacctcaaaacaaatgataaccatacacaacactaaaggacgaacctgatctcttatactagtatccttaatcatttttattgccacaactaacctcctcggactcctgcctcactcatttacaccaaccacccaactatctataaacctagccatggccatccccttatgagcgggcgcagtgattataggctttcgctctaagattaaaaatgccctagcccacttcttaccacaaggcacacctacaccccttatccccatactagttattatcgaaaccatcagcctactcattcaaccaatagccctggccgtacgcctaaccgctaacattactgcaggccacctactcatgcacctaattggaagcgccaccctagcaatatcaaccattaaccttccctctacacttatcatcttcacaattctaattctactgactatcctagaaatcgctgtcgccttaatccaagcctacgttttcacacttctagtaagcctctacctgcacgacaacacataatgacccaccaatcacatgcctatcatatagtaaaacccagcccatgacccctaacaggggccctctcagccctcctaatgacctccggcctagccatgtgatttcacttccactccataacgctcctcatactaggcctactaaccaacacactaaccatataccaatgatggcgcgatgtaacacgagaaagcacataccaaggccaccacacaccacctgtccaaaaaggccttcgatacgggataatcctatttattacctcagaaatttttttcttcgcaggatttttctgagccttttaccactccagcctagcccctaccccccaattaggagggcactggcccccaacaggcatcaccccgctaaatcccctagaagtcccactcctaaacacatccgtattactcgcatcaggagtatcaatcacctgagctcaccatagtctaatagaaaacaaccgaaaccaaataattcaagcactgcttattacaattttactgggtctctattttaccctcctacaagcctcagagtacttcgagtctcccttcaccatttccgacggcatctacggctcaacattttttgtagccacaggcttccacggacttcacgtcattattggctcaactttcctcactatctgcttcatccgccaactaatatttcactttacatccaaacatcactttggcttcgaagccgccgcctgatactggcattttgtagatgtggtttgactatttctgtatgtctccatctattgatgagggtcttactcttttagtataaatagtaccgttaacttccaattaactagttttgacaacattcaaaaaagagtaataaacttcgccttaattttaataatcaacaccctcctagccttactactaataattattacattttgactaccacaactcaacggctacatagaaaaatccaccccttacgagtgcggcttcgaccctatatcccccgcccgcgtccctttctccataaaattcttcttagtagctattaccttcttattatttgatctagaaattgccctccttttacccctaccatgagccctacaaacaactaacctgccactaatagttatgtcatccctcttattaatcatcatcctagccctaagtctggcctatgagtgactacaaaaaggattagactgaaccgaattggtatatagtttaaacaaaacgaatgatttcgactcattaaattatgataatcatatttaccaaatgcccctcatttacataaatattatactagcatttaccatctcacttctaggaatactagtatatcgctcacacctcatatcctccctactatgcctagaaggaataatactatcgctgttcattatagctactctcataaccctcaacacccactccctcttagccaatattgtgcctattgccatactagtctttgccgcctgcgaagcagcggtgggcctagccctactagtctcaatctccaacacatatggcctagactacgtacataacctaaacctactccaatgctaaaactaatcgtcccaacaattatattactaccactgacatgactttccaaaaaacacataatttgaatcaacacaaccacccacagcctaattattagcatcatccctctactattttttaaccaaatcaacaacaacctatttagctgttccccaaccttttcctccgaccccctaacaacccccctcctaatactaactacctgactcctacccctcacaatcatggcaagccaacgccacttatccagtgaaccactatcacgaaaaaaactctacctctctatactaatctccctacaaatctccttaattataacattcacagccacagaactaatcatattttatatcttcttcgaaaccacacttatccccaccttggctatcatcacccgatgaggcaaccagccagaacgcctgaacgcaggcacatacttcctattctacaccctagtaggctcccttcccctactcatcgcactaatttacactcacaacaccctaggctcactaaacattctactactcactctcactgcccaagaactatcaaactcctgagccaacaacttaatatgactagcttacacaatagcttttatagtaaagatacctctttacggactccacttatgactccctaaagcccatgtcgaagcccccatcgctgggtcaatagtacttgccgcagtactcttgaaactaggcggctatggtataatacgcctcacactcattctcaaccccctgacaaaacacatagcctaccccttccttgtactatccctatgaggcataattataacaagctccatctgcctacgacaaacagacctaaaatcgctcattgcatactcttcaatcagccacatagccctcgtagtaacagccattctcatccaaaccccctgaagcttcaccggcgcagtcattctcataatcgcccacggacttacatcctcattactattctgcctagcaaactcaaactacgaacgcactcacagtcgcatcataatcctctctcaaggacttcaaactctactcccactaatagctttttgatgacttctagcaagcctcgctaacctcgccttaccccccactattaacctactgggagaactctctgtgctagtaaccacgttctcctgatcaaatatcactctcctacttacaggactcaacatactagtcacagccctatactccctctacatatttaccacaacacaatggggctcactcacccaccacattaacaacataaaaccctcattcacacgagaaaacaccctcatgttcatacacctatcccccattctcctcctatccctcaaccccgacatcattaccgggttttcctcttgtaaatatagtttaaccaaaacatcagattgtgaatctgacaacagaggcttacgaccccttatttaccgagaaagctcacaagaactgctaactcatgcccccatgtctaacaacatggctttctcaacttttaaaggataacagctatccattggtcttaggccccaagaattttggtgcaactccaaataaaagtaataaccatgcacactactataaccaccctaaccctaacttccctaattccccccatccttaccaccctcgttaaccctaacaaaaaaaactcatacccccattatgtaaaatccattgtcgcatccacctttattatcagtctcttccccacaacaatattcatgtgcctagaccaagaagttattatctcgaactgacactgagccacaacccaaacaacccagctctccctaagcttcaaactagactacttctccataatattcatccctgtagcattgttcgttacatggtccatcatagaattctcactgtgatatataaactcagacccaaacattaatcagttcttcaaatatctactcatcttcctaattaccatactaatcttagttaccgctaacaacctattccaactgttcatcggctgagagggcgtaggaattatatccttcttgctcatcagttgatgatacgcccgagcagatgccaacacagcagccattcaagcaatcctatacaaccgtatcggcgatatcggtttcatcctcgccttagcatgatttatcctacactccaactcatgagacccacaacaaatagcccttctaaacgctaatccaagcctcaccccactactaggcctcctcctagcagcagcaggcaaatcagcccaattaggtctccacccctgactcccctcagccatagaaggccccaccccagtctcagccctactccactcaagcactatagttgtagcaggaatcttcttactcatccgcttccaccccctagcagaaaatagcccactaatccaaactctaacactatgcttaggcgctatcaccactctgttcgcagcagtctgcgcccttacacaaaatgacatcaaaaaaatcgtagccttctccacttcaagtcaactaggactcataatagttacaatcggcatcaaccaaccacacctagcattcctgcacatctgtacccacgccttcttcaaagccatactatttatgtgctccgggtccatcatccacaaccttaacaatgaacaagatattcgaaaaataggaggactactcaaaaccatacctctcacttcaacctccctcaccattggcagcctagcattagcaggaatacctttcctcacaggtttctactccaaagaccacatcatcgaaaccgcaaacatatcatacacaaacgcctgagccctatctattactctcatcgctacctccctgacaagcgcctatagcactcgaataatccttctcaccctaacaggtcaacctcgcttccccacccttactaacattaacgaaaataaccccaccctactaaaccccattaaacgcctggcagccggaagcctattcgcaggatttctcattactaacaacatttcccccgcatcccccttccaaacaacaatccccctctacctaaaactcacagccctcgctgtcactttcctaggacttctaacagccctagacctcaactacctaaccaacaaacttaaaataaaatccccactatgcacattttatttctccaacatactcggattctaccctagcatcacacaccgcacaatcccctatctaggccttcttacgagccaaaacctgcccctactcctcctagacctaacctgactagaaaagctattacctaaaacaatttcacagcaccaaatctccacctccatcatcacctcaacccaaaaaggcataattaaactttacttcctctctttcttcttcccactcatcctaaccctactcctaatcacataacctattcccccgagcaatctcaattacaatatatacaccaacaaacaatgttcaaccagtaactactactaatcaacgcccataatcatacaaagcccccgcaccaataggatcctcccgaatcaaccctgacccctctccttcataaattattcagcttcctacactattaaagtttaccacaaccaccaccccatcatactctttcacccacagcaccaatcctacctccatcgctaaccccactaaaacactcaccaagacctcaacccctgacccccatgcctcaggatactcctcaatagccatcgctgtagtatatccaaagacaaccatcattccccctaaataaattaaaaaaactattaaacccatataacctcccccaaaattcagaataataacacacccgaccacaccgctaacaatcaatactaaacccccataaataggagaaggcttagaagaaaaccccacaaaccccattactaaacccacactcaacagaaacaaagcatacatcattattctcgcacggactacaaccacgaccaatgatatgaaaaaccatcgttgtatttcaactacaagaacaccaatgaccccaatacgcaaaattaaccccctaataaaattaattaaccgctcattcatcgacctccccaccccatccaacatctccgcatgatgaaacttcggctcactccttggcgcctgcctgatcctccaaatcaccacaggactattcctagccatgcactactcaccagacgcctcaaccgccttttcatcaatcgcccacatcactcgagacgtaaattatggctgaatcatccgctaccttcacgccaatggcgcctcaatattctttatctgcctcttcctacacatcgggcgaggcctatattacggatcatttctctactcagaaacctgaaacatcggcattatcctcctgcttgcaactatagcaacagccttcataggctatgtcctcccgtgaggccaaatatcattctgaggggccacagtaattacaaacttactatccgccatcccatacattggggcagacctagttcaatgaatctgaggaggctactcagtagacagtcccaccctcacacgattctttacctttcacttcatcttgcccttcattattgcagccctagcagcactccacctcctattcttgcacgaaacgggatcaaacaaccccctaggaatcacctcccattccgataaaatcaccttccacccttactacacaatcaaagacgccctcggcttacttctcttccttctctccttaatgacattaacactattctcaccagacctcctaggcgacccagacaattataccctagccaaccccttaaacacccctccccacatcaagcccgaatgatatttcctattcgcctacacaattctccgatccgtccctaacaaactaggaggcgtccttgccctattactatccatcctcatcctagcaataatccccatcctccatatatccaaacaacaaagcataatatttcgcccactaagccaatcactttattgactcctagccgcagacctcctcattctaacctgaatcggaggacaaccagtaagctacccttttaccatcattggacaagtagcatccgtactatacttcacaacaatcctaatcctaataccaactatctccctaattgaaaacaaaatactcaaatgggcctgtccttgtagtataaactaatacaccagtcttgtaagccggagatgaaaacctttttccaaggacaaatcagagaaaaagtctttaactccaccattagcacccaaagctaagattctaatttaaactattctctgttctttcatggggaagcagatttgggtaccacccaagtattgactcacccatcaacaaccgctatgtatttcgtacattactgccagccaccatgaatattgtacggtaccataaatacttgaccacctgtagtacataaaaacccaatccacatcaaaaccccctccccatgcttacaagcaagtacagcaatcaaccctcaactatcacacatcaactgcaactccaaagtcacccctcacccattaggataccaacaaacctacccacccttaacagtacatagtacataaagccatttaccgtacatagcacattacagtcaaatcccttctcgtccccatggatgacccccctcagataggggtcccttggccaccatcctccgtgaaatcaatatcccgcacaagagtgctactctcctcgctccgggcccataacacttgggggtagctaaagtgaactgtatccgacatctggttcctacttcagggtcataaagcctaaatagcccacacgttccccttaaataagacatcacgatg

SEQ ID NO: 264 - DNA, 16561 bp, Homo sapiens mitochondrial
  3108: "n" refers to a nucleotide at position 3107 of the Cambridge Reference Sequence (CRS, Anderson et al. 1981 Nature 290:457-465), later determined to be absent from the human mtDNA sequence according to the revised CRS (rCRS, Andrews et al. 1999 Nature Genetics 23:147); "n" therefore represents a single nucleotide deletion at a position corresponding to nucleotide 3107 of SEQ ID NO:1 as provided herein.
gatcacaggtctatcaccctattaaccactcacgggagctctccatgcatttggtattttcgtctggggggtgtgcacgcgatagcattgcgagacgctggagccggagcaccctatgtcgcagtatctgtctttgattcctgcctcatcctattattcatcgcacctacgttcaatattacaggcgaacatacttactaaagtgtgttaattaattaatgcttgtaggacataataataacaattgaatgtctgcacagccgctttccacacagacatcataacaaaaaatttccaccaaaccccccctcccccgccttctggccacagcacttaaacacatctctgccaaaccccaaaaacaaagaaccctaacaccagcctaaccagatttcaaattttatcttttggcggtatgcacttttaacagtcaccccccaactaacacattattttcccctcccactcccatactactaatctcatcaatacaacccccacccatcctacccagcacacacacaccgctgctaaccccataccccgaaccaaccaaaccccaaagacaccccccacagtttatgtagcttacctcctcaaagcaatacactgaaaatgtttagacgggctcacatcaccccataaacaaataggtttggtcctagcctttctattagctcttagtaagattacacatgcaagcatccccgttccagtgagttcaccctctaaatcaccacgatcaaaagggacaagcatcaagcacgcagcaatgcagctcaaaacgcttagcctagccacacccccacgggaaacagcagtgattagcctttagcaataaacgaaagtttaactaagctatactaaccccagggttggtcaatttcgtgccagccaccgcggtcacacgattaacccaagtcaatagaagccggcgtaaagagtgttttagatcaccccctccccaataaagctaaaactcacctgagttgtaaaaaactccagttgacacaaaatagactacgaaagtggctttaacatatctgaacacacaatagctaagacccaaactgggattagataccccactatgcttagccctaaacctcaacagttaaatcaacaaaactgctcgccagaacactacgagccacagcttaaaactcaaaggacctggcggtgcttcatatccctctagaggagcctgttctgtaatcgataaaccccgatcaacctcaccacctcttgctcagcctatataccgccatcttcagcaaaccctgatgaaggctacaaagtaagcgcaagtacccacgtaaagacgttaggtcaaggtgtagcccatgaggtggcaagaaatgggctacattttctaccccagaaaactacgatagcccttatgaaacttaagggtcgaaggtggatttagcagtaaactgagagtagagtgcttagttgaacagggccctgaagcgcgtacacaccgcccgtcaccctcctcaagtatacttcaaaggacatttaactaaaacccctacgcatttatatagaggagacaagtcgtaacatggtaagtgtactggaaagtgcacttggacgaaccagagtgtagcttaacacaaagcacccaacttacacttaggagatttcaacttaacttgaccgctctgagctaaacctagccccaaacccactccaccttactaccagacaaccttagccaaaccatttacccaaataaagtataggcgatagaaattgaaacctggcgcaatagatatagtaccgcaagggaaagatgaaaaattataaccaagcataatatagcaaggactaacccctataccttctgcataatgaattaactagaaataactttgcaaggagagccaaagctaagacccccgaaaccagacgagctacctaagaacagctaaaagagcacacccgtctatgtagcaaaatagtgggaagatttataggtagaggcgacaaacctaccgagcctggtgatagctggttgtccaagatagaatcttagttcaactttaaatttgcccacagaaccctctaaatccccttgtaaatttaactgttagtccaaagaggaacagctctttggacactaggaaaaaaccttgtagagagagtaaaaaatttaacacccatagtaggcctaaaagcagccaccaattaagaaagcgttcaagctcaacacccactacctaaaaaatcccaaacatataactgaactcctcacacccaattggaccaatctatcaccctatagaagaactaatgttagtataagtaacatgaaaacattctcctccgcataagcctgcgtcagattaaaacactgaactgacaattaacagcccaatatctacaatcaaccaacaagtcattattaccctcactgtcaacccaacacaggcatgctcataaggaaaggttaaaaaaagtaaaaggaactcggcaaatcttaccccgcctgtttaccaaaaacatcacctctagcatcaccagtattagaggcaccgcctgcccagtgacacatgtttaacggccgcggtaccctaaccgtgcaaaggtagcataatcacttgttccttaaatagggacctgtatgaatggctccacgagggttcagctgtctcttacttttaaccagtgaaattgacctgcccgtgaagaggcgggcatgacacagcaagacgagaagaccctatggagctttaatttattaatgcaaacagtacctaacaaacccacaggtcctaaactaccaaacctgcattaaagatttcggttggggcgacctcggagcagaacccaacctccgagcagtacatgctaagacttcaccagtcaaagcgaactactatactcaattgatccaataacttgaccaacggaacaagttaccctagggataacagcgcaatcctattctagagtccatatcaacaatagggtttacgacctcgatgttggatcaggacatcccgatggtgcagccgctattaaaggttcgtttgttcaacgattaaagtcctacgtgatctgagttcagaccggagtaatccaggtcggtttctatctacnttcaaattcctccctgtacgaaaggacaagagaaataaggcctacttcacaaagcgccttcccccgtaaatgatatcatctcaacttagtattatacccacacccacccaagaacagggtttgttaagatggcagagcccggtaatcgcataaaacttaaaactttacagtcagaggttcaattcctcttcttaacaacatacccatggccaacctcctactcctcattgtacccattctaatcgcaatggcattcctaatgcttaccgaacgaaaaattctaggctatatacaactacgcaaaggccccaacgttgtaggcccctacgggctactacaacccttcgctgacgccataaaactcttcaccaaagagcccctaaaacccgccacatctaccatcaccctctacatcaccgccccgaccttagctctcaccgtcgctcttctactatgaacccccctccccatacccaaccccctggtcaacctcaacctaggcctcctatttattctagccacctctagcctagccgtttactcaatcctctgatcagggtgagcatcaaactcaaactacgccctgatcggcgcactgcgagcagtagcccaaacaatctcatatgaagtcaccctagccatcattctactatcaacattactaataagtggctcctttaacctctccacccttatcacaacacaagaacacctctgattactcctgccatcatgacccttggccataatatgatttatctccacactagcagagaccaaccgaacccccttcgaccttgccgaaggggagtccgaactagtctcaggcttcaacatcgaatacgccgcaggccccttcgccctattcttcatagccgaatacacaaacattattataataaacaccctcaccactacaatcttcctaggaacaacatatgacgcactctcccctgaactctacacaacatattttgtcaccaagaccctacttctaacctccctgttcttatgaattcgaacagcatacccccgattccgctacgaccaactcatacacctcctatgaaaaaacttcctaccactcaccctagcattacttatatgatatgtctccatacccattacaatctccagcattccccctcaaacctaagaaatatgtctgataaaagagttactttgatagagtaaataataggagcttaaacccccttatttctaggactatgagaatcgaacccatccctgagaatccaaaattctccgtgccacctatcacaccccatcctaaagtaaggtcagctaaataagctatcgggcccataccccgaaaatgttggttatacccttcccgtactaattaatcccctggcccaacccgtcatctactctaccatctttgcaggcacactcatcacagcgctaagctcgcactgattttttacctgagtaggcctagaaataaacatgctagcttttattccagttctaaccaaaaaaataaaccctcgttccacagaagctgccatcaagtatttcctcacgcaagcaaccgcatccataatccttctaatagctatcctcttcaacaatatactctccggacaatgaaccataaccaatactaccaatcaatactcatcattaataatcataatggctatagcaataaaactaggaatagccccctttcacttctgagtcccagaagttacccaaggcacccctctgacatccggcctgcttcttctcacatgacaaaaactagcccccatctcaatcatataccaaatctctccctcactaaacgtaagccttctcctcactctctcaatcttatccatcatagcaggcagttgaggtggactaaaccaaacccagctacgcaaaatcttagcatactcctcaattacccacataggatgaataatagcagttctaccgtacaaccctaacataaccattcttaatttaactatttatattatcctaactactaccgcattcctactactcaacttaaactccagcaccacgaccctactactatctcgcacctgaaacaagctaacatgactaacacccttaattccatccaccctcctctccctaggaggcctgcccccgctaaccggctttttgcccaaatgggccattatcgaagaattcacaaaaaacaatagcctcatcatccccaccatcatagccaccatcaccctccttaacctctacttctacctacgcctaatctactccacctcaatcacactactccccatatctaacaacgtaaaaataaaatgacagtttgaacatacaaaacccaccccattcctccccacactcatcgcccttaccacgctactcctacctatctccccttttatactaataatcttatagaaatttaggttaaatacagaccaagagccttcaaagccctcagtaagttgcaatacttaatttctgtaacagctaaggactgcaaaaccccactctgcatcaactgaacgcaaatcagccactttaattaagctaagcccttactagaccaatgggacttaaacccacaaacacttagttaacagctaagcaccctaatcaactggcttcaatctacttctcccgccgccgggaaaaaaggcgggagaagccccggcaggtttgaagctgcttcttcgaatttgcaattcaatatgaaaatcacctcggagctggtaaaaagaggcctaacccctgtctttagatttacagtccaatgcttcactcagccattttacctcacccccactgatgttcgccgaccgttgactattctctacaaaccacaaagacattggaacactatacctattattcggcgcatgagctggagtcctaggcacagctctaagcctccttattcgagccgagctgggccagccaggcaaccttctaggtaacgaccacatctacaacgttatcgtcacagcccatgcatttgtaataatcttcttcatagtaatacccatcataatcggaggctttggcaactgactagttcccctaataatcggtgcccccgatatggcgtttccccgcataaacaacataagcttctgactcttacctccctctctcctactcctgctcgcatctgctatagtggaggccggagcaggaacaggttgaacagtctaccctcccttagcagggaactactcccaccctggagcctccgtagacctaaccatcttctccttacacctagcaggtgtctcctctatcttaggggccatcaatttcatcacaacaattatcaatataaaaccccctgccataacccaataccaaacgcccctcttcgtctgatccgtcctaattacagcagtcctacttctcctatctctcccagtcctagctgctggcatcactatactactaacagaccgcaacctcaacaccaccttcttcgaccccgccggaggaggagaccccattctataccaacacctattctgatttttcggtcaccctgaagtttatattcttatcctaccaggcttcggaataatctcccatattgtaacttactactccggaaaaaaagaaccatttggatacataggtatggtctgagctatgatatcaattggcttcctagggtttatcgtgtgagcacaccatatatttacagtaggaatagacgtagacacacgagcatatttcacctccgctaccataatcatcgctatccccaccggcgtcaaagtatttagctgactcgccacactccacggaagcaatatgaaatgatctgctgcagtgctctgagccctaggattcatctttcttttcaccgtaggtggcctgactggcattgtattagcaaactcatcactagacatcgtactacacgacacgtactacgttgtagctcacttccactatgtcctatcaataggagctgtatttgccatcataggaggcttcattcactgatttcccctattctcaggctacaccctagaccaaacctacgccaaaatccatttcactatcatattcatcggcgtaaatctaactttcttcccacaacactttctcggcctatccggaatgccccgacgttactcggactaccccgatgcatacaccacatgaaacatcctatcatctgtaggctcattcatttctctaacagcagtaatattaataattttcatgatttgagaagccttcgcttcgaagcgaaaagtcctaatagtagaagaaccctccataaacctggagtgactatatggatgccccccaccctaccacacattcgaagaacccgtatacataaaatctagacaaaaaaggaaggaatcgaaccccccaaagctggtttcaagccaaccccatggcctccatgactttttcaaaaaggtattagaaaaaccatttcataactttgtcaaagttaaattataggctaaatcctatatatcttaatggcacatgcagcgcaagtaggtctacaagacgctacttcccctatcatagaagagcttatcacctttcatgatcacgccctcataatcattttccttatctgcttcctagtcctgtatgcccttttcctaacactcacaacaaaactaactaatactaacatctcagacgctcaggaaatagaaaccgtctgaactatcctgcccgccatcatcctagtcctcatcgccctcccatccctacgcatcctttacataacagacgaggtcaacgatccctcccttaccatcaaatcaattggccaccaatggtactgaacctacgagtacaccgactacggcggactaatcttcaactcctacatacttcccccattattcctagaaccaggcgacctgcgactccttgacgttgacaatcgagtagtactcccgattgaagcccccattcgtataataattacatcacaagacgtcttgcactcatgagctgtccccacattaggcttaaaaacagatgcaattcccggacgtctaaaccaaaccactttcaccgctacacgaccgggggtatactacggtcaatgctctgaaatctgtggagcaaaccacagtttcatgcccatcgtcctagaattaattcccctaaaaatctttgaaatagggcccgtatttaccctatagcaccccctctagaacccactgtaaagctaacttagcattaaccttttaagttaaagattaagagaaccaacacctctttacagtgaaatgccccaactaaatactaccgtatggcccaccataattacccccatactccttacactattcctcatcacccaactaaaaatattaaacacaaactaccacctacctccctcaccaaagcccataaaaataaaaaattataacaaaccctgagaaccaaaatgaacgaaaatctgttcgcttcattcattgcccccacaatcctaggcctacccgccgcagtactgatcattctatttccccctctattgatccccacctccaaatatctcatcaacaaccgactaatcaccacccaacaatgactaatcaaactaacctcaaaacaaatgataaccatacacaacactaaaggacgaacctgatctcttatactagtatccttaatcatttttattgccacaactaacctcctcggactcctgcctcactcatttacaccaaccacccaactatctataaacctagccatggccatccccttatgagcgggcgcagtgattataggctttcgctctaagattaaaaatgccctagcccacttcttaccacaaggcacacctacaccccttatccccatactagttattatcgaaaccatcagcctactcattcaaccaatagccctggccgtacgcctaaccgctaacattactgcaggccacctactcatgcacctaattggaagcgccaccctagcaatatcaaccattaaccttccctctacacttatcatcttcacaattctaattctactgactatcctagaaatcgctgtcgccttaatccaagcctacgttttcacacttctagtaagcctctacctgcacgacaacacataatgacccaccaatcacatgcctatcatatagtaaaacccagcccatgacccctaacaggggccctctcagccctcctaatgacctccggcctagccatgtgatttcacttccactccataacgctcctcatactaggcctactaaccaacacactaaccatataccaatgatggcgcgatgtaacacgagaaagcacataccaaggccaccacacaccacctgtccaaaaaggccttcgatacgggataatcctatttattacctcagaagtttttttcttcgcaggatttttctgagccttttaccactccagcctagcccctaccccccaattaggagggcactggcccccaacaggcatcaccccgctaaatcccctagaagtcccactcctaaacacatccgtattactcgcatcaggagtatcaatcacctgagctcaccatagtctaatagaaaacaaccgaaaccaaataattcaagcactgcttattacaattttactgggtctctattttaccctcctacaagcctcagagtacttcgagtctcccttcaccatttccgacggcatctacggctcaacattttttgtagccacaggcttccacggacttcacgtcattattggctcaactttcctcactatctgcttcatccgccaactaatatttcactttacatccaaacatcactttggcttcgaagccgccgcctgatactggcattttgtagatgtggtctgactatttctgtatgtctccatctattgatgagggtcttactcttttagtataaatagtaccgttaacttccaattaactagttttgacaacattcaaaaaagagtaataaacttcgccttaattttaataatcaacaccctcctagccttactactaataattattacattttgactaccacaactcaacggctacatagaaaaatccaccccttacgagtgcggcttcgaccctatatcccccgcccgcgtccctttctccataaaattcttcttagtagctattaccttcttattatttgatctagaaattgccctccttttacccctaccatgagccctacaaacaactaacctgccactaatagttatgtcatccctcttattaatcatcatcctagccctaagtctggcctatgagtgactacaaaaaggattagactgaaccgaattggtatatagtttaaacaaaacgaatgatttcgactcattaaattatgataatcatatttaccaaatgcccctcatttacataaatattatactagcatttaccatctcacttctaggaatactagtatatcgctcacacctcatatcctccctactatgcctagaaggaataatactatcgctgttcattatagctactctcataaccctcaacacccactccctcttagccaatattgtgcctattgccatactagtctttgccgcctgcgaagcagcggtgggcctagccctactagtctcaatctccaacacatatggcctagactacgtacataacctaaacctactccaatgctaaaactaatcgtcccaacaattatattactaccactgacatgactttccaaaaaacacataatttgaatcaacacaaccacccacagcctaattattagcatcatccctctactattttttaaccaaatcaacaacaacctatttagctgttccccaaccttttcctccgaccccctaacaacccccctcctaatactaactacctgactcctacccctcacaatcatggcaagccaacgccacttatccagtgaaccactatcacgaaaaaaactctacctctctatactaatctccctacaaatctccttaattataacattcacagccacagaactaatcatattttatatcttcttcgaaaccacacttatccccaccttggctatcatcacccgatgaggcaaccagtcagaacgcctgaacgcaggcacatacttcctattctacaccctagtaggctcccttcccctactcatcgcactaatttacactcacaacaccctaggctcactaaacattctactactcactctcactgcccaagaactatcaaactcctgagccaacaacttaatatgactagcttacacaatagcttttatagtaaagatacctctttacggactccacttatgactccctaaagcccatgtcgaagcccccatcgctgggtcaatagtacttgccgcagtactcttaaaactaggcggctatggtataatacgcctcacactcattctcaaccccctgacaaaacacatagcctaccccttccttgtactatccctatgaggcataattataacaagctccatctgcctacgacaaacagacctaaaatcgctcattgcatactcttcaatcagccacatagccctcgtagtaacagccattctcatccaaaccccctgaagcttcaccggcgcagtcattctcataatcgcccacggacttacatcctcattactattctgcctagcaaactcaaactacgaacgcactcacagtcgcatcataatcctctctcaaggacttcaaactctactcccactaatagctttttgatgacttctagcaagcctcgctaacctcgccttaccccccactattaacctactgggagaactctctgtgctagtaaccacgttctcctgatcaaatatcactctcctacttacaggactcaacatactagtcacagccctatactccctctacatatttaccacaacacaatggggctcactcacccaccacattaacaacataaaaccctcattcacacgagaaaacaccctcatgttcatacacctatcccccattctcctcctatccctcaaccccgacatcattaccgggttttcctcttgtaaatatagtttaaccaaaacatcagattgtgaatctgacaacagaggcttacgaccccttatttaccgagaaagctcacaagaactgctaactcatgcccccatgtctaacaacatggctttctcaacttttaaaggataacagctatccattggtcttaggccccaaaaattttggtgcaactccaaataaaagtaataaccatgcacactactataaccaccctaaccctgacttccctaattccccccatccttaccaccctcgttaaccctaacaaaaaaaactcatacccccattatgtaaaatccattgtcgcatccacctttattatcagtctcttccccacaacaatattcatgtgcctagaccaagaagttattatctcgaactgacactgagccacaacccaaacaacccagctctccctaagcttcaaactagactacttctccataatattcatccctgtagcattgttcgttacatggtccatcatagaattctcactgtgatatataaactcagacccaaacattaatcagttcttcaaatatctactcatcttcctaattaccatactaatcttagttaccgctaacaacctattccaactgttcatcggctgagagggcgtaggaattatatccttcttgctcatcagttgatgatacgcccgagcagatgccaacacagcagccattcaagcaatcctatacaaccgtatcggcgatatcggtttcatcctcgccttagcatgatttatcctacactccaactcatgagacccacaacaaatagcccttctaaacgctaatccaagcctcaccccactactaggcctcctcctagcagcagcaggcaaatcagcccaattaggtctccacccctgactcccctcagccatagaaggccccaccccagtctcagccctactccactcaagcactatagttgtagcaggaatcttcttactcatccgcttccaccccctagcagaaaatagcccactaatccaaactctaacactatgcttaggcgctatcaccactctgttcgcagcagtctgcgcccttacacaaaatgacatcaaaaaaatcgtagccttctccacttcaagtcaactaggactcataatagttacaatcggcatcaaccaaccacacctagcattcctgcacatctgtacccacgccttcttcaaagccatactatttatgtgctccgggtccatcatccacaaccttaacaatgaacaagatattcgaaaaataggaggactactcaaaaccatacctctcacttcaacctccctcaccattggcagcctagcattagcaggaatacctttcctcacaggtttctactccaaagaccacatcatcgaaaccgcaaacatatcatacacaaacgcctgagccctatctattactctcatcgctacctccctaacaagcgcctatagcactcgaataattcttctcaccctaacaggtcaacctcgcttccccacccttactaacattaacgaaaataaccccaccctactaaaccccattaaacgcctggcagccggaagcctattcgcaggatttctcattactaacaacatttcccccgcatcccccttccaaacaacaatccccctctacctaaaactcacagccctcgctgtcactttcctaggacttctaacagccctagacctcaactacctaaccaacaaacttaaaataaaaaccccactatgcacattttatttctccaacatactcggattctaccctagcatcacacaccgcacaatcccctatctaggccttcttacgagccaaaacctgcccctactcctcctagacctaacctgactagaaaagctattacctaaaacaatttcacagcaccaaatctccacctccatcatcacctcaacccaaaaaggcataattaaactttacttcctctctttcttcttcccactcatcctaaccctactcctaatcacataacctattcccccgagcaatctcaattacaatatatacaccaacaaacaatgttcaaccagtaactactactaatcaacgcccataatcatacaaagcccccgcaccaataggatcctcccgaatcaaccctgacccctctccttcataaattattcagcttcctacactattaaagtttaccacaaccaccaccccatcatactctttcacccacagcaccaatcctacctccatcgctaaccccactaaaacactcaccaagacctcaacccctgacccccatgcctcaggatactcctcaatagccatcgctgtagtatatccaaagacaaccatcattccccctaaataaattaaaaaaactattaaacccatataacctcccccaaaattcagaataataacacacccgaccacaccgctaacaatcaatactaaacccccataaataggagaaggcttagaagaaaaccccacaaaccccattactaaacccacactcaacagaaacaaagcatacatcattattctcgcacggactacaaccacgaccaatgatatgaaaaaccatcgttgtatttcaactacaagaacaccaatgaccccaatacgcaaaattaaccccctaataaaattaattaaccactcattcatcgacctccccaccccatccaacatctccgcatgatgaaacttcggctcactccttggcgcctgcctgatcctccaaatcaccacaggactattcctagccatgcactactcaccagacgcctcaaccgccttttcatcaatcgcccacatcactcgagacgtaaattatggctgaatcatccgctaccttcacgccaatggcgcctcaatattctttatctgcctcttcctacacatcgggcgaggcctatattacggatcatttctctactcagaaacctgaaacatcggcattatcctcctgcttgcaactatagcaacagccttcataggctatgtcctcccgtgaggccaaatatcattctgaggggccacagtaattacaaacttactatccgccatcccatacattgggacagacctagttcaatgaatctgaggaggctactcagtagacagtcccaccctcacacgattctttacctttcacttcatcttgcccttcattattgcagccctagcagcactccacctcctattcttgcacgaaacgggatcaaacaaccccctaggaatcacctcccattccgataaaatcaccttccacccttactacacaatcaaagacgccctcggcttacttctcttccttctctccttaatgacattaacactattctcaccagacctcctaggcgacccagacaattataccctagccaaccccttaaatacccctccccacatcaagcccgaatgatatttcctattcgcctacacaattctccgatccgtccctaacaaactaggaggcgtccttgccctattactatccatcctcatcctagcaataatccccatcctccatatatccaaacaacaaagcataatatttcgcccactaagccaatcactttattgactcctagccgcagacctcctcattctaacctgaatcggaggacaaccagtaagctacccttttaccatcattggacaagtagcatccgtactatacttcacaacaatcctaatcctaataccaactatctccctaattgaaaacaaaatactcaaatgggcctgtccttgtagtataaactaatacaccagtcttgtaaaccggagatgaaaacctttttccaaggacaaatcagagaaaaagtctttaactccaccattagcacccaaagctaagattctaatttaaactattctctgttctttcatggggaagcagatttgggtaccacccaagtattgactcacccatcaacaaccgctatgtacttcgtacattactgccagccaccatgaatattgtacggtaccataaatacttgaccacctgtagtacataaaaacccaatccacatcaaccccccccccccatgcttacaagcaagtacagcaaccaaccctcaactatcacacatcaactgcaactccaaagccacccctcacccactaggataccaacaaacctacccacccttaacagtacatagtacataaagccatttaccgtacatagcacattacagtcaaatcccttctcgtccccatggatgacccccctcagataggggtcccttgaccaccatcctccgtgaaatcaatatcccgcacaagagtgctactctcctcgctccgggcccataacacttgggggtagctaaagtgaactgtatccgacatctggttcctacttcagggccataaagcctaaatagcccacacgttccccttaaataagacatcacgatg

SEQ ID NO: 265 - DNA, 16567 bp, Homo sapiens mitochondrial
  3105: "n" refers to a nucleotide at position 3107 of the Cambridge Reference Sequence (CRS, Anderson et al. 1981 Nature 290:457-465), later determined to be absent from the human mtDNA sequence according to the revised CRS (rCRS, Andrews et al. 1999 Nature Genetics 23:147); "n" therefore represents a single nucleotide deletion at a position corresponding to nucleotide 3107 of SEQ ID NO:1 as provided herein.
gatcacaggtctatcaccctattaaccactcacgggagctctccatgcatttggtattttcgtctggggggtgtgcacgcgatagcattgcgagacgctggagccggagcaccctatgtcacagtatctgtctttgattcctgcctcatcctattatttatcgcacctacgttcaatattacaggcgaacatacttactaaagtgtgttaattaattaatgcttgtaggacataataataacaattgaatgtctgcacagccgctttccacacagacatcataacaaaaaatttccaccaaaccccccctcccccgcttctggccacagcacttaaacacatctctgccaaaccccaaaaacaaagaaccctaacaccagcctaaccagatttcaaattttatcttttggcggtatgcacttttaacagtcaccccccaactaacacattattttcccctcccactcccatactactaatctcatcaatacaacccccgcccatcctacccagcacacacaccgctgctaaccccataccccgaaccaaccaaaccccaaagacaccccccacagtttatgtagcttacctcctcaaagcaatacactgaaaatgtttagacgggctcacatcaccccataaacaaataggtttggtcctagcctttctattagctcttagtaagattacacatgcaagcatccccattccagtgagttcaccctctaaatcaccacgatcaaaagggacaagcatcaagcacgcagcaatgcagctcaaaacgcttagcctagccacacccccacgggaaacagcagtgattaacctttagcaataaacgaaagtttaactaagctatactaaccccagggttggtcaatttcgtgccagccaccgcggtcacacgattaacccaagtcaatagaaaccggcgtaaagagtgttttagatcaccccctccccaataaagctaaaactcacctgagttgtaaaaaactccagttgacacaaaatagactacgaaagtggctttaacatatctgaacacacaatagctaagacccaaactgggattagataccccactatgcttagccctaaacctcaacagttaaatcaacaaaactgctcgccagaacactacgagccacagcttaaaactcaaaggacctggcggtgcttcatatccctctagaggagcctgttctgtaatcgataaaccccgatcaacctcaccacctcttgctcagcctatataccgccatcttcagcaaaccctgatgaaggctacaaagtaagcgcaagtacccacgtaaagacgttaggtcaaggtgtagcccatgaggtggcaagaaatgggctacattttctaccccagaaaactacgatagcccttatgaaacttaagggtcgaaggtggatttagcagtaaactgagagtagagtgcttagttgaacagggccctgaagcgcgtacacaccgcccgtcaccctcctcaagtatacttcaaaggacatttaactaaaacccctacgcatttatatagaggagacaagtcgtaacatggtaagtgtactggaaagtgcacttggacgaaccagagtgtagcttaacacaaagcacccaacttacacttaggagatttcaacttaacttgaccgctctgagctaaacctagccccaaacccactccaccttactaccagacaaccttagccaaaccatttacccaaataaagtataggcgatagaaattgaaacctggcgcaatagatatagtaccgcaagggaaagatgaaaaattataaccaagcataatatagcaaggactaacccctataccttctgcataatgaattaactagaaataactttgcaaggagaaccaaagctaagacccccgaaaccagacgagctacctaagaacagctaaaagagcacacccgtctatgtagcaaaatagtgggaagatttataggtagaggcgacaaacctaccgagcctggtgatagctggttgtccaagatagaatcttagttcaactttaaatttgcccacagaaccctctaaatccccttgtaaatttaactgttagtccaaagaggaacagctctttggacactaggaaaaaaccttgtagagagagtaaaaaatttaacacccatagtaggcctaaaagcagccaccaattaagaaagcgttcaagctcaacacccactacctaaaaaatcccaaacatataactgaactcctcacacccaattggaccaatctatcaccctatagaagaactaatgttagtataagtaacatgaaaacattctcctccgcataagcctgcgtcagattaaaacactgaactgacaattaacagcccaatatctacaatcaaccaacaagtcattattaccctcactgtcaacccaacacaggcatgctcataaggaaaggttaaaaaaagtaaaaggaactcggcaaatcttaccccgcctgtttaccaaaaacatcacctctagcatcaccagtattagaggcaccgcctgcccagtgacacatgtttaacggccgcggtaccctaaccgtgcaaaggtagcataatcacttgttccttaaatagggacctgtatgaatggctccacgagggttcagctgtctcttacttttaaccagtgaaattgacctgcccgtgaagaggcgggcatgacacagcaagacgagaagaccctatggagctttaatttattaatgcaaacagtacctaacaaacccacaggtcctaaactaccaaacctgcattaaaaatttcggttggggcgacctcggagcagaacccaacctccgagcagtacatgctaagacttcaccagtcaaagcgaactactatactcaattgatccaataacttgaccaacggaacaagttaccctagggataacagcgcaatcctattctagagtccatatcaacaatagggtttacgacctcgatgttggatcaggacatcccgatggtgcagccgctattaaaggttcgtttgttcaacgattaaagtcctacgtgatctgagttcagaccggagtaatccaggtcggtttctatctacnttcaaattcctccctgtacgaaaggacaagagaaataaggcctacttcacaaagcgccttcccccgtaaatgatatcatctcaacttagtattatacccacacccacccaagaacagggtttgttaagatggcagagcccggtaatcgcataaaacttaaaactttacagtcagaggttcaattcctcttcttaacaacatacccatggccaacctcctactcctcattgtacccattctaatcgcaatggcattcctaatgcttaccgaacgaaaaattctaggctatatacaactacgcaaaggccccaacgttgtaggcccctacgggctactacaacccttcgctgacgccataaaactcttcaccaaagagcccctaaaacccgccacatctaccatcaccctctacatcaccgccccaaccttagctctcaccatcgctcttctactatgaacccccctccccatacccaaccccctggtcaacctcaacctaggcctcctatttattctagccacctctagcctagccgtttactcaatcctctgatcagggtgagcatcaaactcaaactacgccctgatcggcgcactgcgagcagtagcccaaacaatctcatatgaagtcaccctagccatcattctactatcaacattactaataagtggctcctttaacctctccacccttatcacaacacaagaacacctctgattactcctgccatcatgacccttggccataatatgatttatctccacactagcagagaccaaccgaacccccttcgaccttgccgaaggggagtccgaactagtctcaggcttcaacatcgaatacgccgcaggccccttcgccctattcttcatagccgaatacacaaacattattataataaacaccctcaccactacaatcttcctaggaacaacatatgacgcactctcccctgaactctacacaacatattttgtcaccaagaccctacttctaacctccctgttcttatgaattcgaacagcatacccccgattccgctacgaccaactcatacacctcctatgaaaaaacttcctaccactcaccctagcattacttatatgacatgtctccatacccattacaatctccagcattccccctcaaacctaagaaatatgtctgataaaagagttactttgatagagtaaataataggagcttaaacccccttatttctaggactatgagaatcgaacccatccctgagaatccaaaattctccgtgccacctatcacaccccatcctaaagtaaggtcagctaaataagctatcgggcccataccccgaaaatgttggttatacccttcccgtactaattaatcccctggcccaacccgtcatctactctaccatctttgcaggcacactcatcacagcgctaagctcgcactgattttttacctgagtaggcctagaaataaacatgctagcttttattccagttctaaccaaaaaaataaaccctcgttccacagaagctgccatcaagtatttcctcacgcaagcaaccgcatccataatccttctaatagctatcctcttcaacaatatactctccggacaatgaaccataaccaatactaccaatcaatactcatcattaataatcataatggctatagcaataaaactaggaatagccccctttcacttctgagtcccagaggttacccaaggcacccctctgacatccggcctgcttcttctcacatgacaaaaactagcccccatctcaatcatataccaaatctctccctcactagacgtaagccttctcctcactctctcaatcttatccatcatagcaggcagttgaggtggattaaaccaaacccagctacgcaaaatcttagcatactcctcaattacccacataggatgaataatagcagttctaccgtacaaccctaacataaccattcttaatttaactatttatattatcctaactactaccgcattcctactactcaacttaaactccagcaccacaaccctactactatctcgcacctgaaacaagctaacatgactaacacccttaattccatccaccctcctctccctaggaggcctgcccccgctaaccggctttttgcccaaatgggccattatcgaagaattcacaaaaaacaatagcctcatcatccccaccatcatagccaccatcaccctccttaacctctacttctacctacgcctaatctactccacctcaatcacactactccccatatctaacaacgtaaaaataaaatgacagtttgaacatacaaaacccaccccattcctccccacactcatcgcccttaccacgctactcctacctatctccccttttatactaataatcttatagaaatttaggttaaatacagaccaagagccttcaaagccctcagtaagttgcaatacttaatttctgtaacagctaaggactgcaaaaccccactctgcatcaactgaacgcaaatcagccactttaattaagctaagcccttactagaccaatgggacttaaacccacaaacacttagttaacagctaagcaccctaatcaactggcttcaatctacttctcccgccgccgggaaaaaaggcgggagaagccccggcaggtttgaagctgcttcttcgaatttgcaattcaatatgaaaatcacctcggagctggtaaaaagaggcctaacccctgtctttagatttacagtccaatgcttcactcagccattttacctcacccccactgatgttcgccgaccgttgactattctctacaaaccacaaagacattggaacactatacctattattcggcgcatgagctggagtcctaggcacagctctaagcctccttattcgagccgagctgggccagccaggcaaccttctaggtaacgaccacatctacaacgttatcgtcacagcccatgcatttgtaataatcttcttcatagtaatacccatcataatcggaggctttggcaactgactagttcccctaataatcggtgcccccgatatggcgtttccccgcataaacaacataagcttctgactcttacctccctctctcctactcctgctcgcatctgctatagtggaggccggagcaggaacaggttgaacagtctaccctcccttagcagggaactactcccaccctggagcctccgtagacctaaccatcttctccttacacctagcaggtgtctcctctatcttaggggccatcaatttcatcacaacaattatcaatataaaaccccctgccataacccaataccaaacgcccctcttcgtctgatccgtcctaatcacagcagtcctacttctcctatctctcccagtcctagctgctggcatcactatactactaacagaccgcaacctcaacaccaccttcttcgaccccgccggaggaggagaccccattctataccaacacctattctgatttttcggtcaccctgaagtttatattcttatcctaccaggcttcggaataatctcccatattgtaacttactactccggaaaaaaagaaccatttggatacataggtatggtctgagctatgatatcaattggcttcctagggtttatcgtgtgagcacaccatatatttacagtaggaatagacgtagacacacgagcatatttcacctccgctaccataatcatcgctatccccaccggcgtcaaagtatttagctgactcgccacactccacggaagcaatatgaaatgatctgctgcagtgctctgagccctaggattcatctttcttttcaccgtaggtggcctgactggcattgtattagcaaactcatcactagacatcgtactacacgacacgtactacgttgtagctcacttccactatgtcctatcaataggagctgtatttgccatcataggaggcttcattcactgatttcccctattctcaggctacaccctagaccaaacctacgccaaaatccatttcactatcatattcatcggcgtaaatctaactttcttcccacaacactttctcggcctatccggaatgccccgacgttactcggactaccccgatgcatacaccacatgaaacatcctatcatctgtaggctcattcatttctctaacagcagtaatattaataattttcatgatttgagaagccttcgcttcgaagcgaaaagtcctaatagtagaagaaccctccataaacctggagtgactatatggatgccccccaccctaccacacattcgaagaacccgtatacataaaatctagacaaaaaaggaaggaatcgaaccccccaaagctggtttcaagccaaccccatggcctccatgactttttcaaaaaggtattagaaaaaccatttcataactttgtcaaagttaaattataggctaaatcctatatatcttaatggcacatgcagcgcaagtaggtctacaagacgctacttcccctatcatagaagagcttatcacctttcatgatcacgccctcataatcattttccttatctgcttcctagtcctgtatgcccttttcctaacactcacaacaaaactaactaatactaacatctcagacgctcaggaaatagaaaccgtctgaactatcctgcccgccatcatcctagtcctcatcgccctcccatccctacgcatcctttacataacagacgaggtcaacgatccctcccttaccatcaaatcaattggccaccaatggtactgaacctacgagtacaccgactacggcggactaatcttcaactcctacatacttcccccattattcctagaaccaggcgacctgcgactccttgacgttgacaatcgagtagtactcccgattgaagcccccattcgtataataattacatcacaagacgtcttgcactcatgagctgtccccacattaggcttaaaaacagatgcaattcccggacgtctaaaccaaaccactttcaccgctacacgaccgggggtatactacggtcaatgctctgaaatctgtggagcaaaccacagtttcatgcccatcgtcctagaattaattcccctaaaaatctttgaaatagggcccgtatttaccctatagcaccccctctaccccctctagagcccactgtaaagctaacttagcattaaccttttaagttaaagattaagagaaccaacacctctttacagtgaaatgccccaactaaatactaccgtatggcccaccataattacccccatactccttacgctattcctcatcacccaactaaaaatattaaacacaaactaccacctacctccctcaccaaagcccataaaaataaaaaattataacaaaccctgagaaccaaaatgaacgaaaatctgttcgcttcattcattgcccccacaatcctaggcctacccgccgcagtactgatcattctatttccccctctattgatccccacctccaaatatctcatcaacaaccgactaatcaccacccaacaatgactaatcaaactaacctcaaaacaaataataaccatacacaacactaaaggacgaacctgatctcttatactagtatccttaatcatttttattgccacaactaacctcctcggactcctgcctcactcatttacaccaaccacccaactatctataaacctagccatggccatccccttatgagcgggcgcagtgattataggctttcgctctaagattaaaaatgccctagcccacttcttaccacaaggcacacctacaccccttatccccatactagttattatcgaaaccatcagcctactcattcaaccaatagccctggccgtacgcctaaccgctaacattactgcaggccacctactcatgcacctaattggaagcgccaccctagcaatatcaaccattaaccttccctctacacttatcatcttcacaattctaattctactgactatcctagaaatcgctgtcgccttaatccaagcctacgttttcacacttctagtaagcctctacctgcacgacaacacataatgacccaccaatcacatgcctatcatatagtaaaacccagcccatgacccctaacaggggccctctcagccctcctaatgacctccggcctagccatgtgatttcacttccactccataacgctcctcatactaggcctactaaccaacacactaaccatataccaatgatggcgcgatgtaacacgagaaagcacataccaaggccaccacacaccacctgtccaaaaaggccttcgatacgggataatcctatttattacctcagaagtttttttcttcgcaggatttttctgagccttttaccactccagcctagcccctaccccccaattaggagggcactggcccccaacaggcatcaccccgctaaatcccctagaagtcccactcctaaacacatccgtattactcgcatcaggagtatcaatcacctgagctcaccatagtctaatagaaaacaaccgaaaccaaataattcaagcactgcttattacaattttactgggtctctattttaccctcctacaagcctcagagtacttcgagtctcccttcaccatttccgacggcatctacggctcaacattttttgtagccacaggcttccacggacttcacgtcattattggctcaactttcctcactatctgcttcatccgccaactaatatttcactttacatccaaacatcactttggcttcgaagccgccgcctgatactggcattttgtagatgtggtttgactatttctgtatgtctccatctattgatgagggtcttactcttttagtataaatagtaccgttaacttccaattaactagttttgacaacattcaaaaaagagtaataaacttcgccttaattttaataatcaacaccctcctagccttactactaataattattacattttgactaccacaactcaacggctacatagaaaaatccaccccttacgagtgcggcttcgaccctatatcccccgcccgcgtccctttctccataaaattcttcttagtagctattaccttcttattatttgatctagaaattgccctccttttacccctaccatgagccctacaaacaactaacctgccactaatagttatgtcatccctcttattaatcatcatcctagccctaagtctggcctatgagtgactacaaaaaggattagactgaaccgaattggtatatagtttaaacaaaacgaatgatttcgactcattaaattatgataatcatatctaccaaatgcccctcatttacataaatattatactagcatttaccatctcacttctaggaatactagtatatcgctcacacctcatatcctccctactatgcctagaaggaataatactatcgctgttcattatagctactctcataaccctcaacacccactccctcttagccaatattgtgcctattgccatactagtctttgccgcctgcgaagcagcggtgggcctagccctactagtctcaatctccaacacatatggcctagactacgtacataacctaaacctactccaatgctaaaactaatcgtcccaacaattatattactaccactgacatgactttccaaaaaacacataatttgaatcaacacaaccacccacagcctaattattagcatcatccctctactattttttaaccaaatcaacaacaacctatttagctgttccccaaccttttcctccgaccccctaacaacccccctcctaatactaactacctgactcctacccctcacaatcatggcaagccaacgccacttatccagtgaaccactatcacgaaaaaaactctacctctctatactaatctccctacaaatctccttaattataacattcacagccacagaactaatcatattttatatcttcttcgaaaccacacttatccccaccttggctatcatcacccgatgaggcaaccagccagaacgcctgaacgcaggcacatacttcctattctacaccctagtaggctcccttcccctactcatcgcactgatttacactcacaacaccctaggctcactaaacattctactactcactctcactgcccaagaactatcaaactcctgagccaacaacttaatatgactagcttacacaatagcttttatagtaaagatacctctttacggactccacttatgactccctaaagcccatgtcgaagcccccatcgctgggtcaatagtacttgccgcagtactcttaaaactaggcggctatggtataatacgcctcacactcattctcaaccccctgacaaaacacatagcctaccccttccttgtactatccctatgaggcataattataacaagctccatctgcctacgacaaacagacctaaaatcgctcattgcatactcttcaatcagccacatagccctcgtagtaacagccattctcatccaaaccccctgaagcttcaccggcgcagtcattctcataatcgcccacggacttacatcctcattactattctgcctagcaaactcaaactacgaacgcactcacagtcgcatcataatcctctctcaaggacttcaaactctgctcccactaatagctttttgatgacttctagcaagcctcgctaacctcgccttaccccccactattaacctactgggagaactctctgtgctagtaaccacgttctcctgatcaaatatcactctcctacttacaggactcaacatactagtcacagccctatactccctctacatatttaccacaacacaatggggctcactcacccaccacattaacaacataaaaccctcattcacacgagaaaacaccctcatgttcatacacctatcccccattctcctcctatccctcaaccccgacatcattaccgggttttcctcttgtaaatatagtttaaccaaaacatcagattgtgaatctgacaacagaggcttacgaccccttatttaccgagaaagctcacaagaactgctaactcatgcccccatgtctaacaacatggctttctcaacttttaaaggataacagctatccattggtcttaggccccaaaaattttggtgcaactccaaataaaagtaataaccatgcacactactataaccaccctaaccctgacttccctaattccccccatccttaccaccctcgttaaccctaacaaaaaaaactcatacccccattatgtaaaatccattgtcgcatccacctttattatcagtctcttccccacaacaatattcatgtgcctagaccaagaagttattatctcgaactgacactgagccacaacccaaacaacccagctctccctaagcttcaaactagactacttctccataatattcatccctgtagcattgttcgttacatggtccatcatagaattctcactgtgatatataaactcagacccaaacattaatcagttcttcaaatatctactcatcttcctaattaccatactaatcttagttaccgctaacaacctattccaactgttcatcggctgagagggcgtaggaattatatccttcttgctcatcagttgatgatacgcccgagcagatgccaacacagcagccattcaagcaatcctatacaaccgtatcggcgatatcggtttcatcctcgccttagcatgatttatcctacactccaactcatgagacccacaacaaatagcccttctaaacgctaatccaagcctcaccccactactaggcctcctcctagcagcagcaggcaaatcagcccaattaggtctccacccctgactcccctcagccatagaaggccccaccccagtctcagccctactccactcaagcactatagttgtagcaggaatcttcttactcatccgcttccaccccctagcagaaaatagcccactaatccaaactctaacactatgcttaggcgctatcaccactctgttcgcagcagtctgcgcccttacacaaaatgacatcaaaaaaatcgtagccttctccacttcaagtcaactaggactcataatagttacaatcggcatcaaccaaccacacctagcattcctgcacatctgtacccacgccttcttcaaagccatactatttatgtgctccggatccatcatccacaaccttaacaatgaacaagatattcgaaaaataggaggactactcaaaaccatacctctcacttcaacctccctcaccattggcagcctagcattagcaggaatacctttcctcacaggtttctactccaaagaccacatcatcgaaaccgcaaacatatcatacacaaacgcctgagccctatctattactctcatcgctacctccctgacaagcgcctatagcactcgaataattcttctcaccctaacaggtcaacctcgcttccccacccttactaacattaacgaaaataaccccaccctactaaaccccattaaacgcctggcagccggaagcctattcgcaggatttctcattactaacaacatttcccccgcatcccccttccaaacaacaatccccctctacctaaaactcacagccctcgctgtcactttcctaggacttctaacagccctagacctcaactacctaaccaacaaacttaaaataaaatccccactatgcacattttatttctccaacatactcggattctaccctaccatcacacaccgcacaatcccctatctaggccttcttacgagccaaaacctgcccctactcctcctagacctaacctgactagaaaagctattacctaaaacaatttcacagcaccaaatctccacctccatcatcacctcaacccaaaaaggcataattaaactttacttcctctctttcttcttcccactcatcctaaccctactcctaatcacataacctattcccccgagcaatctcaattacaatatatacaccaacaaacaatgttcaaccagtaactactactaatcaacgcccatagtcatacaaagcccccgcaccaataggatcctcccgaatcaaccctgacccctctccttcataaattattcagcttcctacactattaaagtttaccacaaccaccaccccatcatactctttcacccacagcaccaatcctacctccatcgctaaccccactaaaacactcaccaagacctcaacccctgacccccatgcctcaggatactcctcaatagccatcgctgtagtatatccaaagacaaccatcattccccctaaataaattaaaaaaactattaaacccatataacctcccccaaaattcagaataataacacacccgaccacaccgctaacaatcaatactaaacccccataaataggagaaggcttagaagaaaaccccacaaaccccattactaaacccacactcaacagaaacaaagcatacatcattattctcgcacggactacaaccacgaccaatgatatgaaaaaccatcgttgtatttcaactacaagaacaccaatgaccccaatacgcaaaattaaccccctaataaaattaattaaccactcattcatcgacctccccaccccatccaacatctccgcatgatgaaacttcggctcactccttggcgcctgcctgatcctccaaatcaccacaggactattcctagccatacactactcaccagacgcctcaaccgccttttcatcaatcgcccacatcactcgagacgtaaattatggctgaatcatccgctaccttcacgccaatggcgcctcaatattctttatctgcctcttcctacacatcgggcgaggcctatattacggatcatttctctactcagaaacctgaaacatcggcattatcctcctgcttgcaactatagcaacagccttcataggctatgtcctcccgtgaggccaaatatcattctgaggggccacagtaattacaaacttactatccgccatcccatacattgggacagacctagttcaatgaatctgaggaggctactcagtagacagtcccaccctcacacgattctttacctttcacttcatcttgcccttcattattgcagccctagcagcactccacctcctattcttgcacgaaacgggatcaaacaaccccctaggaatcacctcccattccgataaaatcaccttccacccttactacacaatcaaagacgccctcggcttacttctcttcattctctccttaatgacattaacactattctcaccagacctcctaggcgacccagacaattataccctagccaaccccttaaacacccctccccacatcaagcccgaatgatatttcctattcgcctacacaattctccgatccgtccctaacaagctaggaggcgtccttgccctattactatccatcctcatcctagcaataatccccatcctccatatatccaaacaacaaagcataatatttcgcccactaagccaatcactttattgactcctagccgcagacctcctcattctaacctgaatcggaggacaaccagtaagctacccttttaccatcattggacaagtagcatccgtactatacttcacaacaatcctaatcctaataccaactatctccctaattgaaaacaaaatactcaaatgggcctgtccttgtagtataaactaatacaccagtcttgtaaaccgaagatgaaaacctttttccaaggacaaatcagagaaaaagtctttaactccaccattagcacccaaagctaagattctaatttaaactattctctgttctttcatggggaagcagatttgggtaccacccaagtattgactcacccatcaacaaccgctatgtatttcgtacattactgccagccaccatgaatattgcacggtaccataaatacttgaccacctgtagtacataaaaacccaatccacatcaaaaccccctccccatgcttacaagcaagtacagcaatcaaccctcaactatcacacatcaactgcaactccaaagccacccctcacccactaggataccaacaaacctacccatctttaacagcacatagtacataaagccatttaccgtacatagcacattacagtcaaatcccttctcgtccccatggatgacccccctcagataggggtcccttgaccaccatcctccgtgaaatcaatatcccgcacaagagtgctactctcctcgctccgggcccataacacttgggggtagctaaagtgaactgtatccgacatctggttcctacttcagggccataaagcctaaatagcccacacgttccccttaaataagacatcacgatg

SEQ ID NO: 266 - DNA, 16570 bp, Homo sapiens mitochondrial
  3108: "n" refers to a nucleotide at position 3107 of the Cambridge Reference Sequence (CRS, Anderson et al. 1981 Nature 290:457-465), later determined to be absent from the human mtDNA sequence according to the revised CRS (rCRS, Andrews et al. 1999 Nature Genetics 23:147); "n" therefore represents a single nucleotide deletion at a position corresponding to nucleotide 3107 of SEQ ID NO:1 as provided herein.
gatcacaggtctatcaccctattaaccactcacgggagctctccatgcatttggtattttcgtctggggggtgtgcacgcgatagcattgcgagacgctggagccggagcaccctatgtcgcagtatctgtctttgattcctgcctcatcctattatttatcgcacctacgttcaatattacaggcgaacatacttactaaagtgtgttaattaattaatgcttgtaggacataataataacaattgaatgtctgcacagccgctttccacacagacatcataacaaaaaatttccaccaaaccccccctcccccgccttctggccacagcacttaaacacatctctgccaaaccccaaaaacaaagaaccctaacaccagcctaaccagatttcaaattttatcttttggcggtatgcacttttaacagtcaccccccaactaacacattattttcccctcccactcccatactactaatctcatcaatacaaccctcgcccatcctacccagcacacacacaccgctgctaaccccataccccgaaccaaccaaaccccaaagacaccccccacagtttatgtagcttacctcctcaaagcaatacactgaaaatgtttagacgggctcacatcaccccataaacaaataggtttggtcctagcctttctattagctcttagtaagattacacatgcaagcatccccgttccagtgagttcaccctctaaatcaccacgatcaaaagggacaagcatcaagcacgcagcaatgcagctcaaaacgcttagcctagccacacccccacgggaaacagcagtgattaacctttagcaataaacgaaagtttaactaagctatactaaccccagggttggtcaatttcgtgccagccaccgcggtcacacgattaacccaagtcaatagaagccggcgtaaagagtgttttagatcaccccctccccaataaagctaaaactcacctgagttgtaaaaaactccagttgacacaaaatagactacgaaagtggctttaacatatctgaacacacaatagctaagacccaaactgggattagataccccactatgcttagccctaaacctcaacagttaaatcaacaaaactgctcgccagaacactacgagccacagcttaaaactcaaaggacctggcggtgcttcatacccctctagaggagcctgttctgtaatcgataaaccccgatcaacctcaccacctcttgctcagcctatataccgccatcttcagcaaaccctgatgaaggctacaaagtaagcgcaagtacccacgtaaagacgttaggtcaaggtgtagcccatgaggtggcaagaaatgggctacattttctaccccagaaaactacgatagcccttatgaaacttaagggtcgaaggtggatttagcagtaaactgagagtagagtgcttagttgaacagggccctgaagcgcgtacacaccgcccgtcaccctcctcaagtatacttcaaaggacatttaactaaaacccctacgcatttatatagaggagacaagtcgtaacatggtaagtgtactggaaagtgcacttggacgaaccagagtgtagcttaacacaaagcacccaacttacacttaggagatttcaacttaacttgaccgctctgagctaaacctagccccaaacccactccaccttactaccagacaaccttagccaaaccatttacccaaataaagtataggcgatagaaattgaaacctggcgcaatagatatagtaccgcaagggaaagatgaaaaattatagccaagcataatatagcaaggactaacccctataccttctgcataatgaattaactagaaataactttgcaaggagagccaaagctaagacccccgaaaccagacgagctacctaagaacagctaaaagagcacacccgtctatgtagcaaaatagtgggaagatttataggtagaggcgacaaacctaccgagcctggtgatagctggttgtccaagatagaatcttagttcaactttaaatttgcccacagaaccctctaaatccccttgtaaatttaactgttagtccaaagaggaacagctctttggacactaggaaaaaaccttgtagagagagtaaaaaatttaacacccatagtaggcctaaaagcagccaccaattaagaaagcgttcaagctcaacacccactacctaaaaaatcccaaacatataactgaactcctcacacccaattggaccaatctatcaccctatagaagaactaatgttagtataagtaacatgaaaacattctcctccgcataagcctgcgtcagattaaaacactgaactgacaattaacagcccaatatctacaatcaaccaacaagtcattattaccctcactgtcaacccaacacaggcatgctcataaggaaaggttaaaaaaagtaaaaggaactcggcaaatcttaccccgcctgtttaccaaaaacatcacctctagcatcaccagtattagaggcaccgcctgcccagtgacacatgtttaacggccgcggtaccctaaccgtgcaaaggtagcataatcacttgttccttaaatagggacctgtatgaatggctccacgagggttcagctgtctcttacttttaaccagtgaaattgacctgcccgtgaagaggcgggcatgacacagcaagacgagaagaccctatggagctttaatttattaatgcaaacagtacctaacaaacccacaggtcctaaactaccaaacctgcattaaaaatttcggttggggcgacctcggagcagaacccaacctccgagcagtacatgctaagacttcaccagtcaaagcgaactactatactcaattgatccaataacttgaccaacggaacaagttaccctagggataacagcgcaatcctattctagagtccatatcaacaatagggtttacgacctcgatgttggatcaggacatcccgatggtgcagccgctattaaaggttcgtttgttcaacgattaaagtcctacgtgatctgagttcagaccggagtaatccaggtcggtttctatctacnttcaaattcctccctgtacgaaaggacaagagaaataaggcctacttcacaaagcgccttcccccgtaaatgatatcatctcaacttagtattatacccacacccacccaagaacagggtttgttaagatggcagagcccggtaatcgcataaaacttaaaactttacagtcagaggttcaattcctcttcttaacaacatacccatggccaacctcctactcctcattgtacccattctaatcgcaatggcattcctaatgcttaccgaacgaaaaattctaggctatatacaactacgcaaaggccccaacgttgtaggcccctacgggctactacaacccttcgctgacgccataaaactcttcaccaaggagcccctaaaacccgccacatctaccatcaccctctacatcaccgccccgaccttagctctcaccatcgctcttctactatgaacccccctccccatacccaaccccctggtcaacctcaacctaggcctcctatttattctagccacctctagcctagccgtttactcaatcctctgatcagggtgagcatcaaactcaaactacgccctgatcggcgcactgcgagcagtagcccaaacaatctcatatgaagtcaccctagccatcattctactatcaacattactaataagtggctcctttaacctctccacccttatcacaacacaagaacacctctgattactcctgccatcatgacccttggccataatatgatttatctccacactagcagagaccaaccgaacccccttcgaccttgccgaaggggagtccgaactagtctcaggcttcaacatcgaatacgccgcaggccccttcgccctattcttcatagccgaatacacaaacattattataataaacaccctcaccactacaatcttcctaggaacaacatatgacgcactctcccctgaactctacacaacatattttgtcaccaagaccctacttctaacctccctgttcttatgaattcgaacagcatacccccgattccgctacgaccaactcatacacctcctatgaaaaaacttcctaccactcaccctagcattacttatatgatatgtctccatacccattacaatctccagcattccccctcaaacctaagaaatatgtctgataaaagagttactttgatagagtaaataataggagcttaaacccccttatttctaggactatgagaatcgaacccatccctgagaatccaaaattctccgtgccacctatcacaccccatcctaaagtaaggtcagctaaataagctatcgggcccataccccgaaaatgttggttatacccttcccgtactaattaatcccctggcccaacccgtcatctactctaccatctttgcaggcacactcatcacagcgctaagctcgcactgattttttacctgagtaggcctagaaataaacatgctagcttttattccagttctaaccaaaaaaataaaccctcgttccacagaagctgccatcaagtatttcctcacgcaagcaaccgcatccataatccttctaatagctatcctcttcaacaatatactctccggacaatgaaccataaccaatactaccaatcaatactcatcattaataatcataatggctatagcaataaaactaggaatagccccctttcacttctgagtcccagaggttacccaaggcacccctctgacatccggcctgcttcttctcacatgacaaaaactagcccccatctcaatcatataccaaatctctccctcactaaacgtaagccttctcctcactctctcaatcttatccatcatagcaggcagttgaggtggattaaaccaaacccagctacgcaaaatcttagcatactcctcaattacccacataggatgaataatagcagttctaccgtacaaccctaacataaccattcttaatttaactatttatattatcctaactactaccgcattcctactactcaacttaaactccagcaccacgaccctactactatctcgcacctgaaacaagctaacatgactaacacccttaattccatccaccctcctctccctaggaggcctgcccccgctaaccggctttttgcccaaatgggccattatcgaagaattcacaaaaaacaatagcctcatcatccccaccatcatagccaccatcaccctccttaacctctacttctacctacgcctaatctactccacctcaatcacactactccccatatctaacaacgtaaaaataaaatgacagtttgaacatacaaaacccaccccattcctccccacactcatcgcccttaccacgctactcctacctatctccccttttatactaataatcttatagaaatttaggttaaatacagaccaagagccttcaaagccctcagtaagttgcaatacttaatttctgtaacagctaaggactgcaaaaccccactctgcatcaactgaacgcaaatcagccactttaattaagctaagcccttactagaccaatgggacttaaacccacaaacacttagttaacagctaagcaccctaatcaactggcttcaatctacttctcccgccgccgggaaaaaaggcgggagaagccccggcaggtttgaagctgcttcttcgaatttgcaattcaatatgaaaatcacctcggagctggtaaaaagaggcctaacccctgtctttagatttacagtccaatgcttcactcagccattttacctcacccccactgatgttcgccgaccgttgactattctctacaaaccacaaagacattggaacactatacctattattcggcgcatgagctggagtcctaggcacagctctaagcctccttattcgagccgagctgggccagccaggcaaccttctaggtaacgaccacatctacaacgttatcgtcacagcccatgcatttgtaataatcttcttcatagtaatacccatcataatcggaggctttggcaactgactagttcccctaataatcggtgcccccgatatggcgtttccccgcataaacaacataagcttctgactcttacctccctctctcctactcctgctcgcatctgctatagtggaggccggagcaggaacaggttgaacagtctaccctcccttagcagggaactactcccaccctggagcctccgtagacctaaccatcttctccttacacctagcaggtgtctcctctatcttaggggccatcaatttcatcacaacaattatcaatataaaaccccctgccataacccaataccaaacgcccctcttcgtctgatccgtcctaatcacagcagtcctacttctcctatctctcccagtcctagctgctggcatcactatactactaacagaccgcaacctcaacaccaccttcttcgaccccgccggaggaggagaccccattctataccaacacctattctgatttttcggtcaccctgaagtttatattcttatcctaccaggcttcggaataatctcccatattgtaacttactactccggaaaaaaagaaccatttggatacataggtatggtctgagctatgatatcaattggcttcctagggtttatcgtgtgagcacaccatatatttacagtaggaatagacgtagacacacgagcatatttcacctccgctaccataatcatcgctatccccaccggcgtcaaagtatttagctgactcgccacactccacggaagcaatatgaaatgatctgctgcagtgctctgagccctaggattcatctttcttttcaccgtaggtggcctgactggcattgtattagcaaactcatcactagacatcgtactacacgacacgtactacgttgtagctcacttccactatgtcctatcaataggagctgtatttgccatcataggaggcttcattcactgatttcccctattctcaggctacaccctagaccaaacctacgccaaaatccatttcactatcatattcatcggcgtaaatctaactttcttcccacaacactttctcggcctatccggaatgccccgacgttactcggactaccccgatgcatacaccacatgaaacatcctatcatctgtaggctcattcatttctctaacagcagtaatattaataattttcatgatttgagaagccttcgcttcgaagcgaaaagtcctaatagtagaagaaccctccataaacctggagtgactatatggatgccccccaccctaccacacattcgaagaacccgtatacataaaatctagacaaaaaaggaaggaatcgaaccccccaaagctggtttcaagccaaccccatggcctccatgactttttcaaaaaggtattagaaaaaccatttcataactttgtcaaagttaaattataggctaaatcctatatatcttaatggcacatgcagcgcaagtaggtctacaagacgctacttcccctatcatagaagagcttatcacctttcatgatcacgccctcataatcattttccttatctgcttcctagtcctgtatgcccttttcctaacactcacaacaaaactaactaatactaacatctcagacgctcaggaaatagaaaccgtctgaactatcctgcccgccatcatcctagtcctcatcgccctcccatccctacgcatcctttacataacagacgaggtcaacgatccctcccttaccatcaaatcaattggccaccaatggtactgaacctacgagtacaccgactacggcggactaatcttcaactcctacatacttcccccattattcctagaaccaggcgacctgcgactccttgacgttgacaatcgagtagtactcccgattgaagcccccattcgtataataattacatcacaagacgtcttgcactcatgagctgtccccacattaggcttaaaaacagatgcaattcccggacgtctaaaccaaaccactttcaccgctacacgaccgggggtatactacggtcaatgctctgaaatctgtggagcaaaccacagtttcatgcccatcgtcctagaattaattcccctaaaaatctttgaaatagggcccgtatttaccctatagcaccccctctaccccctctagagcccactgtaaagctaacttagcattaaccttttaagttaaagattaagagaaccaacacctctttacagtgaaatgccccaactaaatactaccgtatggcccaccataattacccccatactccttacactattcctcatcacccaactaaaaatattaaacacaaactaccacctacctccctcaccaaagcccataaaaataaaaaattataacaaaccctgagaaccaaaatgaacgaaaatctgttcgcttcattcattgcccccacaatcctaggcctacccgccgcagtactgatcattctatttccccctctattgatccccacctccaaatatctcatcaacaaccgactaatcaccacccaacaatgactaatcaaactaacctcaaaacaaatgataaccatacacaacactaaaggacgaacctgatctcttatactagtatccttaatcatttttattgccacaactaacctcctcggactcctgcctcactcatttacaccaaccacccaactatctataaacctagccatggccatccccttatgagcgggcgcagtgattataggctttcgctctaagattaaaaatgccctagcccacttcttaccacaaggcacacctacaccccttatccccatactagttattatcgaaaccatcagcctactcattcaaccaatagccctggccgtacgcctaaccgctaacattactgcaggccacctactcatgcacctaattggaagcaccaccctagcaatatcaaccattaaccttccctctacacttatcatcttcacaattctaattctactgactatcctagaaatcgctgtcgccttaatccaagcctacgttttcacacttctagtaagcctctacctgcacgacaacacataatgacccaccaatcacatgcctatcatatagtaaaacccagcccatgacccctaacaggggccctctcagccctcctaatgacctccggcctagccatgtgatttcacttccactccataacgctcctcatactaggcctactaaccaacacactaaccatataccaatgatggcgcgatgtaacacgagaaagcacataccaaggccaccacacaccacctgtccaaaaaggccttcgatacgggataatcctatttattacctcagaagtttttttcttcgcaggatttttctgagccttttaccactccagcctagcccctaccccccaattaggagggcactggcccccaacaggcatcaccccgctaaatcccctagaagtcccactcctaaacacatccgtattactcgcatcaggagtatcaatcacctgagctcaccatagtctaatagaaaacaaccgaaaccaaataattcaagcactgctcattacaattttactgggtctctattttaccctcctacaagcctcagagtacttcgagtctcccttcaccatttccgacggcatctacggctcaacattttttgtagccacaggcttccacggacttcacgtcattattggctcaactttcctcactatctgcttcatccgccaactaatatttcactttacatccaaacatcactttggcttcgaagccgccgcctgatactggcattttgtagatgtggtttgactatttctgtatgtctccatctattgatgagggtcttactcttttagtataaatagtaccgttaacttccaattaactagttttgacaacattcaaaaaagagtaataaacttcgccttaattttaataatcaacaccctcctagccttactactaataattattacattttgactaccacaactcaacggctacatagaaaaatccaccccttacgagtgcggcttcgaccctatatcccccgcccgcgtccctttctccataaaattcttcttagtagctattaccttcttattatttgatctagaaattgccctccttttacccctaccatgagccctacaaacaactaacctgccactaatagttatgtcatccctcttattaatcatcatcctagccctaagtctggcctatgagtgactacaaaaaggattagactgagccgaattggtatatagtttaaacaaaacgaatgatttcgactcattaaattatgataatcatatttaccaaatgcccctcatttacataaatattatactagcatttaccatctcacttctaggaatactagtatatcgctcacacctcatgtcctccctactatgcctagaaggaataatactatcgctgttcattatagctactctcataaccctcaacacccactccctcttagccaatattgtgcctattgccatactagtctttgccgcctgcgaagcagcggtgggcctagccctactagtctcaatctccaacacatatggcctagactacgtacataacctaaacctactccaatgctaaaactaatcgtcccaacaattatattactaccactgacatgactttccaaaaaacacataatttgaatcaacacaaccacccacagcctaattattagcatcatccctctactattttttaaccaaatcaacaacaacctatttagctgttccccaaccttttcctccgaccccctaacaacccccctcctaatactaactacctgactcctgcccctcacaatcatggcaagccaacgccacttatccagtgaaccactatcacgaaaaaaactctacctctctatactaatctccctacaaatctccttaattataacattcacagccacagaactaatcatattttatatcttcttcgaaaccacacttatccccaccttggctatcatcacccgatgaggcaaccagccagaacgcctgaacgcaggcacatacttcctattctacaccctagtaggctcccttcccctactcatcgcactaatttacactcacaacaccctaggctcactaaacattctactactcaccctcactgcccaagaactatcaaactcctgagccaacaacttaatatgactagcttacacaatagcttttatagtaaagatacctctttacggactccacttatgactccctaaagcccatgtcgaagcccccatcgctgggtcaatagtacttgccgcagtactcttgaagctaggcggctatggtataatacgcctcacactcattctcaaccccctgacaaaacacatagcctaccccttccttgtactatccctatgaggcataattataacaagctccatctgcctacgacaaacagacctaaaatcgctcattgcatactcttcaatcagccacatagccctcgtagtaacagccattctcatccaaaccccctgaagcttcaccggcgcagtcattctcataatcgcccacggacttacatcctcattactattctgcctagcaaactcaaactacgaacgcactcacagtcgcatcataatcctctctcaaggacttcaaactctactcccactaatagctttttgatgacttctagcaagcctcgctaacctcgccttaccccccactattaacctactgggagaactctctgtgctagtaaccacattctcctgatcaaatatcactctcctacttacaggactcaacatactagtcacagccctatactccctctacatatttaccacaacacaatggggctcactcacccaccacattaacaacataaaaccctcattcacacgagaaaacaccctcatgttcatacacctatcccccattctcctcctatccctcaaccccgacatcattaccgggttttcctcttgtaaatatagtttaaccaaaacatcagattgtgaatctgacaacagaggcttacgaccccttatttaccgagaaagctcacaagaactgctaactcatgcccccatgtctaacaacatggctttctcaacttttaaaggataacagctatccattggtcttaggccccaagaattttggtgcaactccaaataaaagtaataaccatgcacactactataaccaccctaaccctaacttccctaattccccccatccttaccaccctcgttaaccctaacaaaaaaaactcatacccccattatgtaaaatccattgtcgcatccacctttattatcagtctcttccccacaacaatattcatgtgcctagaccaagaagttattatctcgaactgacactgagccacaacccaaacaacccagctctccctaagcttcaaactagactacttctccataatattcatccctgtagcattgttcgttacatggtccatcatagaattctcactgtgatatataaactcagacccaaacattaatcagttcttcaaatatctactcatcttcctaattaccatactaatcttagttaccgctaacaacctattccaactgttcatcggctgagagggcgtaggaattatatccttcttgctcatcagttgatgatacgcccgagcagatgccaacacagcagccattcaagcaatcctatacaaccgtatcggcgatatcggtttcatcctcgccttagcatgatttatcctacactccaactcatgagacccacaacaaatagcccttctaaacgccaatccaagcctcaccccactactaggcctcctcctagcagcagcaggcaaatcagcccaattaggtctccacccctgactcccctcagccatagaaggccccaccccagtctcagccctactccactcaagcactatagttgtagcaggaatcttcttactcatccgcttccaccccctagcagaaaatagcccactaatccaaactctaacactatgcttaggcgctatcaccactctgttcgcagcagtctgcgcccttacacaaaatgacatcaaaaaaatcgtagccttctccacttcaagtcaactaggactcataatagttacaatcggcatcaaccaaccacacctagcattcctgcacatctgtacccacgccttcttcaaagccatactatttatgtgctccgggtccatcatccacaaccttaacaatgaacaagatattcgaaaaataggaggactactcaaaaccatacctctcacttcaacctccctcaccattggcagcctagcattagcaggaatacctttcctcacaggtttctactccaaagaccacatcatcgaaaccgcaaacatatcatacacaaacgcctgagccctatctattactctcatcgctacctccctgacaagcgcctatagcactcgaataattcttctcaccctaacaggtcaacctcgcttccccacccttactaacattaacgaaaataaccccaccctactaaaccccattaaacgcctggcagccggaagcctattcgcaggatttctcattactaacaacatttcccccgcatcccccttccaaacaacaatccccctctacctaaaactcacagccctcgctgtcactttcctaggacttctaacagccctagacctcaactacctaaccaacaaacttaaaataaaatccccactatgcacattttatttctccaacatactcggattctaccctagcatcacacaccgcacaatcccctatctaggccttcttacgagccaaaacctgcccctactcctcctagacctaacctgactagaaaagctattacctaaaacaatttcacagcaccaaatctccacctccatcatcacctcaacccaaaaaggcataattaaactttacttcctctctttcttcttcccactcatcctaaccctactcctaatcacataacctattcccccgagcaatttcaattacaatatatacaccaacaaacaatgttcaaccagtaactactactaatcaacgcccataatcatacaaagcccccgcaccaataggatcctcccgaatcaaccctgacccctctccttcataaattattcagcttcctacactattaaagtttaccacaaccaccaccccatcatactctttcacccacagcaccaatcctacctccatcgctaaccccactaaaacactcaccaagacctcaacccctgacccccatgcctcaggatactcctcaatagccatcgctgtagtatatccaaagacaaccatcattccccctaaataaattaaaaaaactattaaacccatataacctcccccaaaattcagaataataacacacccgaccacaccgctaacaatcaatactaaacccccataaataggagaaggcttagaagaaaaccccacaaaccccattactaaacccacactcaacagaaacaaagcatacatcattattctcgcacggactacaaccacgaccaatgatatgaaaaaccatcgttgtatttcaactacaagaacaccaatgaccccaatacgcaaaattaaccccctaataaaattaattaaccactcactcatcgacctccccaccccatccaacatctccgcatgatgaaacttcggctcactccttggcgcctgcctgatcctccaaatcaccacaggactattcctagccatgcactactcaccagacgcctcaaccgccttttcatcaatcgcccacatcactcgagacgtaaattatggctgaatcatccgctaccttcacgccaatggcgcctcaatattctttatctgcctcttcctacacatcgggcgaggcctatattacggatcatttctctactcagaaacctgaaacatcggcattatcctcctgcttgcaactatagcaacagccttcataggctatgtcctcccgtgaggccaaatatcattctgaggggccacagtaattacaaacttactatccgccatcccatacattgggacagacctagttcaatgaatctgaggaggctactcagtagacagtcccaccctcacacgattctttacctttcacttcatcttgcccttcattattgcagccctagcagcactccacctcctattcttgcacgaaacgggatcaaacaaccccctaggaatcacctcccattccgataaaatcaccttccacccttactacacaatcaaagacgccctcggcttacttctcttccttctctccttaatgacattaacactattctcaccagacctcctaggcgacccagacaattataccctagccaaccccttaaacacccctccccacatcaagcccgaatgatatttcctattcgcctacacaattctccgatccgtccctaacaaactaggaggcgtccttgccctattactatccatcctcatcctagcaataatccccatcctccatatatccaaacaacaaagcataatatttcgcccactaagccaatcactttattgactcctagccgcagacctcctcattctaacctgaatcggaggacaaccagtaagctacccttttaccatcattggacaagtagcatccgtactatacttcacaacaatcctaatcctaataccaactatctccctaattgaaaacaaaatactcaaatgggcctgtccttgtagtataaactaatacaccagtcttgtaagccggagatgaaaacctttttccaaggacaaatcagagaaaaagtctttaactccaccattagcacccaaagctaagattctaatttaaactattctctgttctttcatggggaagcagatttgggtaccacccaagtattgactcacccatcaacaaccgctatgtatttcgtacattactgccagccaccatgaatattgtacggtaccataaatacttgaccacctgtagtacataaaaacccaatccacatcaaaaccccctccccatgcttacaagcaagtacagcaatcaacctccaactatcatacatcaactgcaactccaaagccacccctcacccactaggataccaacaaacctacccacccttaacagtacatagcacataaagccatttaccgtacatagcacattacagtcaaatcccttctcgtccccatggatgacccccctcagataggggtcccttgaccaccatcctccgtgaaatcaatatcccgcacaagagtgctactctcctcgctccgggcccataacacttgggggtagctaaagtgaactgtatccgacatctggttcctacttcagggccataaagcctaaatagcccacacgttccccttaaataagacatcacgatg

SEQ ID NO: 267 - DNA, 16571 bp, Homo sapiens mitochondrial
  3109: "n" refers to a nucleotide at position 3107 of the Cambridge Reference Sequence (CRS, Anderson et al. 1981 Nature 290:457-465), later determined to be absent from the human mtDNA sequence according to the revised CRS (rCRS, Andrews et al. 1999 Nature Genetics 23:147); "n" therefore represents a single nucleotide deletion at a position corresponding to nucleotide 3107 of SEQ ID NO:1 as provided herein.
gatcacaggtctatcaccctattaaccactcacgggagctctccatgcatttggtattttcgtctggggggtatgcacgcgatagcattgcgagacgctggagccggagcaccctatgtcgcagtatctgtctttgattcctgcctcatcctattatttatcgcacctacgttcaatattacaggcgaacatacttactaaagtgtgttaattaattaatgcttgtaggacataataataacaattgaatgtctgcacagccgctttccacacagacatcataacaaaaaatttccaccaaaccccccctcccccccgcttctggccacagcacttaaacacatctctgccaaaccccaaaaacaaagaaccctaacaccagcctaaccagatttcaaattttatcttttggcggtatgcacttttaacagtcaccccccaactaacacattattttcccctcccactcccatactactaatctcatcaatacaacccccgcccatcctacccagcacacacacaccgctgctaaccccataccccgaaccaaccaaaccccaaagacaccccccacagtttatgtagcttacctcctcaaagcaatacactgaaaatgtttagacgggctcacatcaccccataaacaaataggtttggtcctagcctttctattagctcttagtaagattacacatgcaagcatccccgttccagtgagttcaccctctaaatcaccacgatcaaaaggaacaagcatcaagcacgcagcaatgcagctcaaaacgcttagcctagccacacccccacgggaaacagcagtgattaacctttagcaataaacgaaagtttaactaagctatactaaccccagggttggtcaatttcgtgccagccaccgcggtcacacgattaacccaagtcaatagaagccggcgtaaagagtgttttagatcaccccctccccaataaagctaaaactcacctgagttgtaaaaaactccagttgacacaaaatagactacgaaagtggctttaacatatctgaacacacaatagctaagacccaaactgggattagataccccactatgcttagccctaaacctcaacagttaaatcaacaaaactgctcgccagaacactacgagccacagcttaaaactcaaaggacctggcggtgcttcatatccctctagaggagcctgttctgtaatcgataaaccccgatcaacctcaccacctcttgctcagcctatataccgccatcttcagcaaaccctgatgaaggctacaaagtaagcgcaagtacccacgtaaagacgttaggtcaaggtgtagcccatgaggtggcaagaaatgggctacattttctaccccagaaaactacgatagcccttatgaaacttaagggtcgaaggtggatttagcagtaaactaagagtagagtgcttagttgaacagggccctgaagcgcgtacacaccgcccgtcaccctcctcaagtatacttcaaaggacatttaactaaaacccctacgcatttatatagaggagacaagtcgtaacatggtaagtgtactggaaagtgcacttggacgaaccagagtgtagcttaacacaaagcacccaacttacacttaggagatttcaacttaacttgaccgctctgagctaaacctagccccaaacccactccaccttactaccagacaaccttagccaaaccatttacccaaataaagtataggcgatagaaattgaaacctggcgcaatagatatagtaccgcaagggaaagatgaaaaattataaccaagcataatatagcaaggactaacccctataccttctgcataatgaattaactagaaataactttgcaaggagagccaaagctaagacccccgaaaccagacgagctacctaagaacagctaaaagagcacacccgtctatgtagcaaaatagtgggaagatttataggtagaggcgacaaacctaccgagcctggtgatagctggttgtccaagatagaatcttagttcaactttaaatttgcccacagaaccctctaaatccccttgtaaatttaactgttagtccaaagaggaacagctctttggacactaggaaaaaaccttgtagagagagtaaaaaatttaacacccatagtaggcctaaaagcagccaccaattaagaaagcgttcaagctcaacacccactacctaaaaaatcccaaacatataactgaactcctcacacccaattggaccaatctatcaccctatagaagaactaatgttagtataagtaacatgaaaacattctcctccgcataagcctgcgtcagattaaaacactgaactgacaattaacagcccaatatctacaatcaaccaacaagtcattattaccctcactgtcaacccaacacaggcatgctcataaggaaaggttaaaaaaagtaaaaggaactcggcaaatcttaccccgcctgtttaccaaaaacatcacctctagcatcaccagtattagaggcaccgcctgcccagtgacacatgtttaacggccgcggtaccctaaccgtgcaaaggtagcataatcacttgttccttaaatagggacctgtatgaatggctccacgagggttcagctgtctcttacttttaaccagtgaaattgacctgcccgtgaagaggcgggcataacacagcaagacgagaagaccctatggagctttaatttattaatgcaaacagtacctaacaaacccacaggtcctaaactaccaaacctgcattaaaaatttcggttggggcgacctcggagcagaacccaacctccgagcagtacatgctaagacttcaccagtcaaagcgaactactatactcaattgatccaataacttgaccaacggaacaagttaccctagggataacagcgcaatcctattctagagtccatatcaacaatagggtttacgacctcgatgttggatcaggacatcccgatggtgcagccgctattaaaggttcgtttgttcaacgattaaagtcctacgtgatctgagttcagaccggagtaatccaggtcggtttctatctacnttcaaattcctccctgtacgaaaggacaagagaaataaggcctacttcacaaagcgccttcccccgtaaatgatatcatctcaacttagtattatacccacacccacccaagaacagggtttgttaagatggcagagcccggtaatcgcataaaacttaaaactttacagtcagaggttcaattcctcttcttaacaacatacccatggccaacctcctactcctcattgtacccattctaatcgcaatggcattcctaatgcttaccgaacgaaaaattctaggctatatacaactacgcaaaggccccaacgttgtaggcccctacgggctactacaacccttcgctgacgccataaaactcttcaccaaagagcccctaaaacccgccacatctaccatcaccctctacatcaccgccccgaccttagctctcaccatcgctcttctactatgaacccccctccccatacccaaccccctggtcaacctcaacctaggcctcctatttattctagccacctctagcctagccgtttactcaatcctctgatcagggtgagcatcaaactcaaactacgccctgatcggcgcactgcgagcagtagcccaaacaatctcatatgaagtcaccctagccatcattctactatcaacattactaataagtggctcctttaacctctccacccttatcacaacacaagaacacctctgattactcctgccatcatgacccttggccataatatgatttatctccacactagcagagaccaaccgaacccccttcgaccttgccgaaggggagtccgaactagtctcaggcttcaacatcgaatacgccgcaggccccttcgccctattcttcatagccgaatacacaaacattattataataaacaccctcaccactacaatcttcctaggaacaacatatgacgcactctcccctgaactctacacaacatattttgtcaccaagaccctacttctaacctccctgttcttatgaattcgaacagcatacccccgattccgctacgaccaactcatacacctcctatgaaaaaacttcctaccactcaccctagcattacttatatgatatgtctccatacccattacaatctccagcattccccctcaaacctaagaaatatgtctgataaaagagttactttgatagagtaaataataggagcttaaacccccttatttctaggactatgagaatcgaacccatccctgagaatccaaaattctccgtgccacctatcacaccccatcctaaagtaaggtcagctaaataagctatcgggcccataccccgaaaatgttggttatacccttcccgtactaattaatcccctggcccaacccgtcatctactctaccatctttgcaggcacactcatcacagcgctaagctcgcactgattttttacctgagtaggcctagaaataaacatgctagcttttattccagttctaaccaaaaaaataaaccctcgttccacagaagctgccatcaagtatttcctcacgcaagcaaccgcatccataatccttctaatagctatcctcttcaacaatatactctccggacaatgaaccataaccaatactaccaatcaatactcatcattaataatcataatagctatagcaataaaactaggaatagccccctttcacttctgagtcccagaggttacccaaggcacccctctgacatccggcctgcttcttctcacatgacaaaaactagcccccatctcaatcatataccaaatctctccctcactaaacgtaagccttctcctcactctctcaatcttatccatcatagcaggcagttgaggtggattaaaccaaacccagctacgcaaaatcttagcatactcctcaattacccacataggatgaataatagcagttctaccgtacaaccctaacataaccattcttaatttaactatttatattatcctaactactaccgcattcctactactcaacttaaactccagcaccacgaccctactactatctcgcacctgaaacaagctaacatgactaacacccttaattccatccaccctcctctccctaggaggcctgcccccgctaaccggctttttgcccaaatgggccattatcgaagaattcacaaaaaacaatagcctcatcatccccaccatcatagccaccatcaccctccttaacctctacttctacctacgcctaatctactccacctcaatcacactactccccatatctaacaacgtaaaaataaaatgacagtttgaacatacaaaacccaccccattcctccccacactcatcgcccttaccacgctactcctacctatctccccttttatactaataatcttatagaaatttaggttaaatacagaccaagagccttcaaagccctcagtaagttgcaatacttaatttctgtaacagctaaggactgcaaaaccccactctgcatcaactgaacgcaaatcagccactttaattaagctaagcccttactagaccaatgggacttaaacccacaaacacttagttaacagctaagcaccctaatcaactggcttcaatctacttctcccgccgccgggaaaaaaggcgggagaagccccggcaggtttgaagctgcttcttcgaatttgcaattcaatatgaaaatcacctcggagctggtaaaaagaggcctaacccctgtctttagatttacagtccaatgcttcactcagccattttacctcacccccactgatgttcgccgaccgttgactattctctacaaaccacaaagacattggaacactatacctattattcggcgcatgagctggagtcctaggcacagctctaagcctccttattcgagccgagctgggccagccaggcaaccttctaggtaacgaccacatctacaacgttatcgtcacagcccatgcatttgtaataatcttcttcatagtaatacccatcataatcggaggctttggcaactgactagttcccctaataatcggtgcccccgatatggcgtttccccgcataaacaacataagcttctgactcttacctccctctctcctactcctgctcgcatctgctatagtggaggccggagcaggaacaggttgaacagtctaccctcccttagcagggaactactcccaccctggagcctccgtagacctaaccatcttctccttacacctagcaggtgtctcctctatcttaggggccatcaatttcatcacaacaattatcaatataaaaccccctgccataacccaataccaaacgcccctcttcgtctgatccgtcctaatcacagcagtcctacttctcctatctctcccagtcctagctgctggcatcactatactactaacagaccgcaacctcaacaccaccttcttcgaccccgccggaggaggagaccccattctataccaacacctattctgatttttcggtcaccctgaagtttatattcttatcctaccaggcttcggaataatctcccatattgtaacttactactccggaaaaaaagaaccatttggatacataggtatggtctgagctatgatatcaattggcttcctagggtttatcgtgtgagcacaccatatatttacagtaggaatagacgtagacacacgagcatatttcacctccgctaccataatcatcgctatccccaccggcgtcaaagtatttagctgactcgccacactccacggaagcaatatgaaatgatctgctgcagtgctctgagccctaggattcatctttcttttcaccgtaggtggcctgactggcattgtattagcaaactcatcactagacatcgtactacacgacacgtactacgttgtagcccacttccactatgtcctatcaataggagctgtatttgccatcataggaggcttcattcactgatttcccctattctcaggctacaccctagaccaaacctacgccaaaatccatttcactatcatattcatcggcgtaaatctaactttcttcccacaacactttctcggcctatccggaatgccccgacgttactcggactaccccgatgcatacaccacatgaaacatcctatcatctgtaggctcattcatttctctaacagcagtaatattaataattttcatgatttgagaagccttcgcttcgaagcgaaaagtcctaatagtagaagaaccctccataaacctggagtgactatatggatgccccccaccctaccacacattcgaagaacccgtatacataaaatctagacaaaaaaggaaggaatcgaaccccccaaagctggtttcaagccaaccccatggcctccatgactttttcaaaaaggtattagaaaaaccatttcataactttgtcaaagttaaattataggctaaatcctatatatcttaatggcacatgcagcgcaagtaggtctacaagacgctacttcccctatcatagaagagcttatcacctttcatgatcacgccctcataatcattttccttatctgcttcctagtcctgtatgcccttttcctaacactcacaacaaaactaactaatactaacatctcagacgctcaggaaatagaaaccgtctgaactatcctgcccgccatcatcctagtcctcatcgccctcccatccctacgcatcctttacataacagacgaggtcaacgatccctcccttaccatcaaatcaattggccaccaatggtactgaacctacgagtacaccgactacggcggactaatcttcaactcctacatacttcccccattattcctagaaccaggcgacctgcgactccttgacgttgacaatcgagtagtactcccgattgaagcccccattcgtataataattacatcacaagacgtcttgcactcatgagctgtccccacattaggcttaaaaacagatgcaattcccggacgtctaaaccaaaccactttcaccgctacacgaccgggggtatactacggtcaatgctctgaaatctgtggagcaaaccacagtttcatgcccatcgtcctagaattaattcccctaaaaatctttgaaatagggcccgtatttaccctatagcaccccctctaccccctctagagcccactgtaaagctaacttagcattaaccttttaagttaaagattaagagaaccaacacctctttacagtgaaatgccccaactaaatactaccgtatggcccaccataattacccccatactccttacactattcctcatcacccaactaaaaatattaaacacaaactaccacctacctccctcaccaaagcccataaaaataaaaaattataacaaaccctgagaaccaaaatgaacgaaaatctgttcgcttcattcattgcccccacaatcctaggcctacccgccgcagtactgatcattctatttccccctctattgatccccacctccaaatatctcatcaacaaccgactaatcaccacccaacaatgactaatcaaactaacctcaaaacaaatgataaccatacacaacactaaaggacgaacctgatctcttatactagtatccttaatcatttttattgccacaactaacctcctcggactcctgcctcactcatttacaccaaccacccaactatctataaacctagccatggccatccccttatgagcgggcgcagtgattataggctttcgctctaagattaaaaatgccctagcccacttcttaccacaaggcacacctacaccccttatccccatactagttattatcgaaaccatcagcctactcattcaaccaatagccctggccgtacgcctaaccgctaacattactgcaggccacctactcatgcacctaattggaagcgccaccctagcaatatcaaccattaaccttccctctacacttatcatcttcacaattctaattctactgactatcctagaaatcgctgtcgccttaatccaagcctacgttttcacacttctagtaagcctctacctgcacgacaacacataatgacccaccaatcacatgcctatcatatagtaaaacccagcccatgacccctaacaggggccctctcagccctcctaatgacctccggcctagccatgtgatttcacttccactccataacgctcctcatactaggcctactaaccaacacactaaccatataccaatgatggcgcgatgtaacacgagaaagcacataccaaggccaccacacaccacctgtccaaaaaggccttcgatacgggataatcctatttattacctcagaagtttttttcttcgcaggatttttctgagccttttaccactccagcctagcccctaccccccaattaggagggcactggcccccaacaggcatcaccccgctaaatcccctagaagtcccactcctaaacacatccgtattactcgcatcaggagtatcaatcacctgagctcaccatagtctaatagaaaacaaccgaaaccaaataattcaagcactgcttattacaattttactgggtctctattttaccctcctacaagcctcagagtacttcgagtctcccttcaccatttccgacggcatctacggctcaacattttttgtagccacaggcttccacggacttcacgtcattattggctcaactttcctcactatctgcttcatccgccaactaatatttcactttacatccaaacatcactttggcttcgaagccgccgcctgatactggcattttgtagatgtggtttgactatttctgtatgtctccatctattgatgagggtcttactcttttagtataaatagtaccgttaacttccaattaactagttttgacaacattcaaaaaagagtaataaacttcgccttaattttaataatcaacaccctcctagccttactactaataattattacattttgactaccacaactcaacggctacatagaaaaatccaccccttacgagtgcggcttcgaccctatatcccccgcccgcgtccctttctccataaaattcttcttagtagctattaccttcttattatttgatctagaaattgccctccttttacccctaccatgagccctacaaacaactaacctgccactaatagttatgtcatccctcttattaatcatcatcctagccctaagtctggcctatgagtgactacaaaaaggattagactgaaccgaattggtatatagtttaaacaaaacgaatgatttcgactcattaaattatgataatcatatttaccaaatgcccctcatttacataaatattatactagcatttaccatctcacttctaggaatactagtatatcgctcacacctcatatcctccctactatgcctagaaggaataatactatcgctgttcattatagctactctcataaccctcaacacccactccctcttagccaatattgtgcctattgccatactagtctttgccgcctgcgaagcagcggtgggcctagccctactagtctcaatctccaacacatatggcctagactacgtacataacctaaacctactccaatgctaaaactaatcgtcccaacaattatattactaccactgacatgactttccaaaaaacacataatttgaatcaacacaaccacccacagcctaattattagcatcatccctctactattttttaaccaaatcaacaacaacctatttagctgttccccaaccttttcctccgaccccctaacaacccccctcctaatactaactacctgactcctacccctcacaatcatggcaagccaacgccacttatccagtgaaccactatcacgaaaaaaactctacctctctatactaatctccctacaaatctccttaattataacattcacagccacagaactaatcatattttatatcttcttcgaaaccacacttatccccaccttggctatcatcacccgatgaggcaaccagccagaacgcctgaacgcaggcacatacttcctattctacaccctagtaggctcccttcccctactcatcgcactaatttacactcacaacaccctaggctcactaaacattctactactcactctcactgcccaagaactatcaaactcctgagccaacaacttaatatgactagcttacacaatagcttttatagtaaagatacctctttacggactccacttatgactccctaaagcccatgtcgaagcccccatcgctgggtcaatagtacttgccgcagtactcttaaaactaggcggctatggtataatacgcctcacactcattctcaaccccctgacaaaacacatagcctaccccttccttgtactatccctatgaggcataattataacaagctccatctgcctacgacaaacagacctaaaatcgctcattgcatactcttcaatcagccacatagccctcgtagtaacagccattctcatccaaaccccctgaagcttcaccggcgcagtcattctcataatcgcccacgggcttacatcctcattactattctgcctagcaaactcaaactacgaacgcactcacagtcgcatcataatcctctctcaaggacttcaaactctactcccactaatagctttttgatgacttctagcaagcctcgctaacctcgccttaccccccactattaacctactgggagaactctctgtgctagtaaccacgttctcctgatcaaatatcactctcctacttacaggactcaacatactagtcacagccctatactccctctacatatttaccacaacacaatggggctcactcacccaccacattaacaacataaaaccctcattcacacgagaaaacaccctcatgttcatacacctatcccccattctcctcctatccctcaaccccgacatcattaccgggttttcctcttgtaaatatagtttaaccaaaacatcagattgtgaatctgacaacagaggcttacgaccccttatttaccgagaaagctcacaagaactgctaactcatgcccccatgtctaacaacatggctttctcaacttttaaaggataacagctatccattggtcttaggccccaaaaattttggtgcaactccaaataaaagtaataaccatgcacactactataaccaccctaaccctgacttccctaattccccccatccttaccaccctcgttaaccctaacaaaaaaaactcatacccccattatgtaaaatccattgtcgcatccacctttattatcagtctcttccccacaacaatattcatgtgcctagaccaagaagttattatctcgaactgacactgagccacaacccaaacaacccagctctccctaagcttcaaactagactacttctccataatattcatccctgtagcattgttcgttacatggtccatcatagaattctcactgtgatatataaactcagacccaaacattaatcagttcttcaaatatctactcatcttcctaattaccatactaatcttagttaccgctaacaacctattccaactgttcatcggctgagagggcgtaggaattatatccttcttgctcatcagttgatgatacgcccgagcagatgccaacacagcagccattcaagcaatcctatacaaccgtatcggcgatatcggtttcatcctcgccttagcatgatttatcctacactccaactcatgagacccacaacaaatagcccttctaaacgctaatccaagcctcaccccactactaggcctcctcctagcagcagcaggcaaatcagcccaattaggtctccacccctgactcccctcagccatagaaggccccaccccagtctcagccctactccactcaagcactatagttgtagcaggaatcttcttactcatccgcttccaccccctagcagaaaatagcccactaatccaaactctaacactatgcttaggcgctatcaccactctgttcgcagcagtctgcgcccttacacaaaatgacatcaaaaaaatcgtagccttctccacttcaagtcaactaggactcataatagttacaatcggcatcaaccaaccacacctagcattcctgcacatctgtacccacgccttcttcaaagccatactatttatgtgctccgggtccatcatccacaaccttaacaatgaacaagatattcgaaaaataggaggactactcaaaaccatacctctcacttcaacctccctcaccattggcagcctagcattagcaggaatacctttcctcacaggtttctactccaaagaccacatcatcgaaaccgcaaacatatcatacacaaacgcctgagccctatctattactctcatcgctacctccctgacaagcgcctatagcactcgaataattcttctcaccctaacaggtcaacctcgcttccccacccttactaacattaacgaaaataaccccaccctactaaaccccattaaacgcctggcagccggaagcctattcgcaggatttctcattactaacaacatttcccccgcatcccccttccaaacaacaatccccctctacctaaaactcacagccctcgctgtcactttcctaggacttctaacagccctagacctcaactacctaaccaacaaacttaaaataaaatccccactatgcacattttatttctccaacatactcggattctaccctagcatcacacaccgcacaatcccctatctaggccttcttacgagccaaaacctgcccctactcctcctagacctaacctgactagaaaagctattacctaaaacaatttcacagcaccaaatctccacctccatcatcacctcaacccaaaaaggcataattaaactttacttcctctctttcttcttcccactcatcctaaccctactcctaatcacataacctattcccccgagcaatctcaattacaatatatacaccaacaaacaatgttcaaccagtaactactactaatcaacgcccataatcatacaaagcccccgcaccaataggatcctcccgaatcaaccctgacccctctccttcataaattattcagcttcctacactattaaagtttaccacaaccaccaccccatcatactctttcacccacagcaccaatcctacctccatcgctaaccccactaaaacactcaccaagacctcaacccctgacccccatgcctcaggatactcctcaatagccatcgctgtagtatatccaaagacaaccatcattccccctaaataaattaaaaaaactattaaacccatataacctcccccaaaattcagaataataacacacccgaccacaccgctaacaatcaatactaaacccccataaataggagaaggcttagaagaaaaccccacaaaccccattactaaacccacactcaacagaaacaaagcatacatcattattctcgcacggactacaaccacgaccaatgatatgaaaaaccatcgttgtatttcaactacaagaacaccaatgaccccaatacgcaaaactaaccccctaataaaattaattaaccactcattcatcgacctccccaccccatccaacatctccgcatgatgaaacttcggctcactccttggcgcctgcctgatcctccaaatcaccacaggactattcctagccatgcactactcaccagacgcctcaaccgccttttcatcaatcgcccacatcactcgagacgtaaattatggctgaatcatccgctaccttcacgccaatggcgcctcaatattctttatctgcctcttcctacacatcgggcgaggcctatattacggatcatttctctactcagaaacctgaaacatcggcattatcctcctgcttgcaactatagcaacagccttcataggctatgtcctcccgtgaggccaaatatcattctgaggggccacagtaattacaaacttactatccgccatcccatacattgggacagacctagttcaatgaatctgaggaggctactcagtagacagtcccaccctcacacgattctttacctttcacttcatcttgcccttcattattgcagccctagcagcactccacctcctattcttgcacgaaacgggatcaaacaaccccctaggaatcacctcccattccgataaaatcaccttccacccttactacacaatcaaagacgccctcggcttacttctcttccttctctccttaatgacattaacactattctcaccagacctcctaggcgacccagacaattataccctagccaaccccttaaacacccctccccacatcaagcccgaatgatatttcctattcgcctacacaattctccgatccgtccctaacaaactaggaggcgtccttgccctattactatccatcctcatcctagcaataatccccatcctccatatatccaaacaacaaagcataatatttcgcccactaagccaatcactttattgactcctagccgcagacctcctcattctaacctgaatcggaggacaaccagtaagctacccttttaccatcattggacaagtagcatccgtactatacttcacaacaatcctaatcctaataccaactatctccctaattgaaaacaaaatactcaaatgggcctgtccttgtagtataaactaatacaccagtcttgtaaaccggagatgaaaacctttttccaaggacaaatcagagaaaaagtctttaactccaccattagcacccaaagctaagattctaatttaaactattctctgttctttcatggggaagcagatttgggtaccacccaagtattgactcacccatcaacaaccgctatgtatttcgtacattactgccagccaccatgaatattgtacggtaccataaatacttgaccacctgtagtacataaaaacccaatccacatcaaaaccccctccccatgcttacaagcaagtacagcaatcaaccctcaactatcacgcatcaactgcaactccaaagccacccctcacccactaggataccaacaaacctactcgcccttaacagtacatagtacataaagccatttaccgtacatagcacattacagtcaaatcccttctcgtccccatggatgacccccctcagataggggtcccttgaccaccatcctccgtgaaatcaatatcccgcacaagagtgctactctcctcgctccgggcccataacacttgggggtagctaaggtgaactgtatccgacatctggttcctacttcagggtcataaagcctaaatagcccacacgttccccttaaataagacatcacgatg

SEQ ID NO: 268 - DNA, 16570 bp, Homo sapiens mitochondrial
  3108: "n" refers to a nucleotide at position 3107 of the Cambridge Reference Sequence (CRS, Anderson et al. 1981 Nature 290:457-465), later determined to be absent from the human mtDNA sequence according to the revised CRS (rCRS, Andrews et al. 1999 Nature Genetics 23:147); "n" therefore represents a single nucleotide deletion at a position corresponding to nucleotide 3107 of SEQ ID NO:1 as provided herein.
gatcacaggtctatcaccctattaaccactcacgggagctctccatgcatttggtattttcgtctggggggtatgcacgcgatagcattgcgagacgctggagccggagcaccctatgtcgcagtatctgtctttgattcctgcctcatcctattatttatcgcacctacgttcaatattacaggcgaacatacttactaaagtgtgttaattaattaatgcttgtaggacataataataacaattgaatgtctgcacagccgctttccacacagacatcataacaaaaaatttccaccaaaccccccctcccccgccttctggccacagcacttaaacacatctctgccaaaccccaaaaacaaagaaccctaacaccagcctaaccagatttcaaattttatcttttggcggtatgcacttttaacagtcaccccccaactaacacattattttcccctcccactcccatactactaatctcatcaatacaacccccgcccatcctacccagcacacacacaccgctgctaaccccataccccgaaccaaccaaaccccaaagacaccccccacagtttatgtagcttacctcctcaaagcaatacactgaaaatgtttagacgggctcacatcaccccataaacaaataggtttggtcctagcctttctattagctcttagtaagattacacatgcaagcatccccgttccagtgagttcaccctctaaatcaccacgatcaaaagggacaagcatcaagcacgcagcaatgcagctcaaaacgcttagcctagccacacccccacgggaaacagcagtgattaacctttagcaataaacgaaagtttaactaagctatactaaccccagggttggtcaatttcgtgccagccaccgcggtcacacgattaacccaagtcaatagaagccggcgtaaagagtgttttagatcaccccctccccaataaagctaaaactcacctgagttgtaaaaaactccagttgacacaaaatagactacgaaagtggctttaacatatctgaacacacaatagctaagacccaaactgggattagataccccactatgcttagccctaaacctcaacagttaaatcaacaaaactgctcgccagaacactacgagccacagcttaaaactcaaaggacctggcggtgcttcatatccctctagaggagcctgttctgtaatcgataaaccccgatcaacctcaccacctcttgctcagcctatataccgccatcttcagcaaaccctgatgaaggctacaaagtaagcgcaagtacccacgtaaagacgttaggtcaaggtgtagcccatgaggtggcaagaaatgggctacattttctaccccagaaaactacgatagcccttatgaaacttaagggtcgaaggtggatttagcagtaaactgagagtagagtgcttagttgaacagggccctgaagcgcgtacacaccgcccgtcaccctcctcaagtatacttcaaaggacatttaactaaaacccctacgcatttatatagaggagacaagtcgtaacatggtaagtgtactggaaagtgcacttggacgaaccagagtgtagcttaacacaaagcacccaacttacacttaggagatttcaacttaacttgaccgctctgagctaaacctagccccaaacccactccaccttactaccagacaaccttagccaaaccatttacccaaataaagtataggcgatagaaattgaaacctggcgcaatagatatagtaccgcaagggaaagatgaaaaattataaccaagcataatatagcaaggactaacccctataccttctgcataatgaattaactagaaataactttgcaaggagagccaaagctaagacccccgaaaccagacgagctacctaagaacagctaaaagagcacacccgtctatgtagcaaaatagtgggaagatttataggtagaggcgacaaacctaccgagcctggtgatagctggttgtccaagatagaatcttagttcaactttaaatttgcccacagaaccctctaaatccccttgtaaatttaactgttagtccaaagaggaacagctctttggacactaggaaaaaaccttgtagagagagtaaaaaatttaacacccatagtaggcctaaaagcagccaccaattaagaaagcgttcaagctcaacacccactacctaaaaaatcccaaacatataactgaactcctcacacccaattggaccaatctatcaccctatagaagaactaatgttagtataagtaacatgaaaacattctcctccgcataagcctgcgtcagattaaaacactgaactgacaattaacagcccaatatctacaatcaaccaacaagtcattattaccctcactgtcaacccaacacaggcatgctcataaggaaaggttaaaaaaagtaaaaggaactcggcaaatcttaccccgcctgtttaccaaaaacatcacctctagcatcaccagtattagaggcaccgcctgcccagtgacacatgtttaacggccgcggtaccctaaccgtgcaaaggtagcataatcacttgttccttaaatagggacctgtatgaatggctccacgagggttcagctgtctcttacttttaaccagtgaaattgacctgcccgtgaagaggcgggcataacacagcaagacgagaagaccctatggagctttaatttattaatgcaaacagtacctaacaaacccacaggtcctaaactaccaaacctgcattaaaaatttcggttggggcgacctcggagcagaacccaacctccgagcagtacatgctaagacttcaccagtcaaagcgaactactatactcaattgatccaataacttgaccaacggaacaagttaccctagggataacagcgcaatcctattctagagtccatatcaacaatagggtttacgacctcgatgttggatcaggacatcccgatggtgcagccgctattaaaggttcgtttgttcaacgattaaagtcctacgtgatctgagttcagaccggagtaatccaggtcggtttctatctacnttcaaattcctccctgtacgaaaggacaagagaaataaggcctacttcacaaagcgccttcccccgtaaatgatatcatctcaacttagtattatacccacacccacccaagaacagggtttgttaagatggcagagcccggtaatcgcataaaacttaaaactttacagtcagaggttcaattcctcttcttaacaacatacccatggccaacctcctactcctcattgtacccattctaatcgcaatggcattcctaatgcttaccgaacgaaaaattctaggctatatacaactacgcaaaggccccaacgttgtaggcccctacgggctactacaacccttcgctgacgccataaaactcttcaccaaagagcccctaaaacccgccacatctaccatcaccctctacatcaccgccccgaccttagctctcaccatcgctcttctactatgaacccccctccccatacccaaccccctggtcaacctcaacctaggcctcctatttattctagccacctctagcctagccgtttactcaatcctctgatcagggtgagcatcaaactcaaactacgccctgatcggcgcactgcgagcagtagcccaaacaatctcatatgaagtcaccctagccatcattctactatcaacattactaataagtggctcctttaacctctccacccttatcacaacacaagaacacctctgattactcctgccatcatgacccttggccataatatgatttatctccacactagcagagaccaaccgaacccccttcgaccttgccgaaggggagtccgaactagtctcaggcttcaacatcgaatacgccgcaggccccttcgccctattcttcatagccgaatacacaaacattattataataaacaccctcaccactacaatcttcctaggaacaacatatgacgcactctcccctgaactctacacaacatattttgtcaccaagaccctacttctaacctccctgttcttatgaattcgaacagcatacccccgattccgctacgaccaactcatacacctcctatgaaaaaacttcctaccactcaccctagcattacttatatgatatgtctccatacccattacaatctccagcattccccctcaaacctaagaaatatgtctgataaaagagttactttgatagagtaaataataggagcttaaacccccttatttctaggactatgagaatcgaacccatccctgagaatccaaaattctccgtgccacctatcacaccccatcctaaagtaaggtcagctaaataagctatcgggcccataccccgaaaatgttggttatacccttcccgtactaattaatcccctggcccaacccgtcatctactctaccatctttgcaggcacactcatcacagcgctaagctcgcactgattttttacctgagtaggcctagaaataaacatgctagcttttattccagttctaaccaaaaaaataaaccctcgttccacagaagctgccatcaagtatttcctcacgcaagcaaccgcatccataatccttctaatagctatcctcttcaacaatatactctccggacaatgaaccataaccaatactaccaatcaatactcatcattaataatcataatggctatagcaataaaactaggaatagccccctttcacttctgagtcccagaggttacccaaggcacccctctgacatccggcctgcttcttctcacatgacaaaaactagcccccatctcaatcatataccaaatctctccctcactaaacgtaagccttctcctcactctctcaatcttatccatcatagcaggcagttgaggtggattaaaccaaacccagctacgcaaaatcttagcatactcctcaattacccacataggatgaataatagcagttctaccgtacaaccctaacataaccattcttaatttaactatttatattatcctaactactaccgcattcctactactcaacttaaactccagcaccacgaccctactactatctcgcacctgaaacaagctaacatgactaacacccttaattccatccaccctcctctccctaggaggcctgcccccgctaaccggctttttgcccaaatgggccattatcgaagaattcacaaaaaacaatagcctcatcatccccaccatcatagccaccatcaccctccttaacctctacttctacctacgcctaatctactccacctcaatcacactactccccatatctaacaacgtaaaaataaaatgacagtttgaacatacaaaacccaccccactcctccccacactcatcgcccttaccacgctactcctacctatctccccttttatactaataatcttatagaaatttaggttaaatacagaccaagagccttcaaagccctcagtaagttgcaatacttaatttctgtaacagctaaggactgcaaaaccccactctgcatcaactgaacgcaaatcagccactttaattaagctaagcccttactagaccaatgggacttaaacccacaaacacttagttaacagctaagcaccctaatcaactggcttcaatctacttctcccgccgccgggaaaaaaggcgggagaagccccggcaggtttgaagctgcttcttcgaatttgcaattcaatatgaaaatcacctcggagctggtaaaaagaggcctaacccctgtctttagatttacagtccaatgcttcactcagccattttacctcacccccactgatgttcgccgaccgttgactattctctacaaaccacaaagacattggaacactatacctattattcggcgcatgagctggagtcctaggcacagctctaagcctccttattcgagccgagctgggccagccaggcaaccttctaggtaacgaccacatctacaacgttatcgtcacagcccatgcatttgtaataatcttcttcatagtaatacccatcataatcggaggctttggcaactgactagttcccctaataatcggtgcccccgatatggcgtttccccgcataaacaacataagcttctgactcttacctccctctctcctactcctgctcgcatctgctatagtggaggccggagcaggaacaggttgaacagtctaccctcccttagcagggaactactcccaccctggagcctccgtagacctaaccatcttctccttacacctagcaggtgtctcctctatcttaggggccatcaatttcatcacaacaattatcaatataaaaccccctgccataacccaataccaaacgcccctcttcgtctgatccgtcctaatcacagcagtcctacttctcctatctctcccagtcctagctgctggcatcactatactactaacagaccgcaacctcaacaccaccttcttcgaccccgccggaggaggagaccccattctataccaacacctattctgatttttcggtcaccctgaagtttatattcttatcctaccaggcttcggaataatctcccatattgtaacttactactccggaaaaaaagaaccatttggatacataggtatggtctgagctatgatatcaattggcttcctagggtttatcgtgtgagcacaccatatatttacagtaggaatagacgtagacacacgagcatatttcacctccgctaccataatcatcgctatccccaccggcgtcaaagtatttagctgactcgccacactccacggaagcaatatgaaatgatctgctgcagtgctctgagccctaggattcatctttcttttcaccgtaggtggcctgactggcattgtattagcaaactcatcactagacatcgtactacacgacacgtactacgttgtagcccacttccactatgtcctatcaataggagctgtatttgccatcataggaggcttcattcactgatttcccctattctcaggctacaccctagaccaaacctacgccaaaatccatttcactatcatattcatcggcgtaaatctaactttcttcccacaacactttctcggcctatccggaatgccccgacgttactcggactaccccgatgcatacaccacatgaaacatcctatcatctgtaggctcattcatttctctaacagcagtaatattaataattttcatgatttgagaagccttcgcttcgaagcgaaaagtcctaatagtagaagaaccctccataaacctggagtgactatatggatgccccccaccctaccacacattcgaagaacccgtatacataaaatctagacaaaaaaggaaggaatcgaaccccccaaagctggtttcaagccaaccccatggcctccatgactttttcaaaaaggtattagaaaaaccatttcataactttgtcaaagttaaattataggctaaatcctatatatcttaatggcacatgcagcgcaagtaggtctacaagacgctacttcccctatcatagaagagcttatcacctttcatgatcacgccctcataatcattttccttatctgcttcctagtcctgtatgcccttttcctaacactcacaacaaaactaactaatactaacatctcagacgctcaggaaatagaaaccgtctgaactatcctgcccgccatcatcctagtcctcatcgccctcccatccctacgcatcctttacataacagacgaggtcaacgatccctcccttaccatcaaatcaattggccaccaatggtactgaacctacgagtacaccgactacggcggactaatcttcaactcctacatacttcccccattattcctagaaccaggcgacctgcgactccttgacgttgacaatcgagtagtactcccgattgaagcccccattcgtataataattacatcacaagacgtcttgcactcatgagctgtccccacattaggcttaaaaacagatgcaattcccggacgtctaaaccaaaccactttcaccgctacacgaccgggggtatactacggtcaatgctctgaaatctgtggagcaaaccacagtttcatgcccatcgtcctagaattaattcccctaaaaatctttgaaatagggcccgtatttaccctatagcaccccctctaccccctctagagcccactgtaaagctaacttagcattaaccttttaagttaaagattaagagaaccaacacctctttacagtgaaatgccccaactaaatactaccgtatggcccaccataattacccccatactccttacactattcctcatcacccaactaaaaatattaaacacaaactaccacctacctccctcaccaaagcccataaaaataaaaaattataacaaaccctgagaaccaaaatgaacgaaaatctgttcgcttcattcattgcccccacaatcctaggcctacccgccgcagtactgatcattctatttccccctctattgatccccacctccaaatatctcatcaacaaccgactaatcaccacccaacaatgactaatcaaactaacctcaaaacaaatgataaccatacacaacactaaaggacgaacctgatctcttatactagtatccttaatcatttttattgccacaactaacctcctcggactcctgcctcactcatttacaccaaccacccaactatctataaacctagccatggccacccccttatgagcgggcgcagtgattataggctttcgctctaagattaaaaatgccctagcccacttcttaccacaaggcacacctacaccccttatccccatactagttattatcgaaaccatcagcctactcattcaaccaatagccctggccgtacgcctaaccgctaacattactgcaggccacctactcatgcacctaattggaagcgccaccctagcaatatcaaccattaaccttccctctacacttatcatcttcacaattctaattctactgactatcctagaaatcgctgtcgccttaatccaagcctacgttttcacacttctagtaagcctctacctgcacgacaacacataatgacccaccaatcacatgcctatcatatagtaaaacccagcccatgacccctaacaggggccctctcagccctcctaatgacctccggcctagccatgtgatttcacttccactccataacgctcctcatactaggcctactaaccaacacactaaccatataccaatgatggcgcgatgtaacacgagaaagcacataccaaggccaccacacaccacctgtccaaaaaggccttcgatacgggataatcctatttattacctcagaagtttttttcttcgcaggatttttctgagccttttaccactccagcctagcccctaccccccaattaggagggcactggcccccaacaggcatcaccccgctaaatcccctagaagtcccactcctaaacacatccgtattactcgcatcaggagtatcaatcacctgagctcaccatagtctaatagaaaacaaccgaaaccaaataattcaagcactgcttattacaattttactgggtctctattttaccctcctacaagcctcagagtacttcgagtctcccttcaccatttccgacggcatctacggctcaacattttttgtagccacaggcttccacggacttcacgtcattattggctcaactttcctcactatctgcttcatccgccaactaatatttcactttacatccaaacatcactttggcttcgaagccgccgcctgatactgacattttgtagatgtggtttgactatttctgtatgtctccatctattgatgagggtcttactcttttagtataaatagtaccgttaacttccaattaactagttttgacaacattcaaaaaagagtaataaacttcgccttaattttaataatcaacaccctcctagccttactactaataattattacattttgactaccacaactcaacggctacatagaaaaatccaccccttacgagtgcggcttcgaccctatatcccccgcccgcgtccctttctccataaaattcttcttagtagctattaccttcttattatttgatctagaaattgccctccttttacccctaccatgagccctacaaacaactaacctgccactaatagttatgtcatccctcttattaatcatcatcctagccctaagtctggcctatgagtgactacaaaaaggattagactgaaccgaattggtatatagtttaaacaaaacgaatgatttcgactcattaaattatgataatcatatttaccaaatgcccctcatttacataaatattatactagcatttaccatctcacttctaggaatactagtatatcgctcacacctcatatcctccctactatgcctagaaggaataatactatcgctgttcattatagctactctcataaccctcaacacccactccctcttagccaatattgtgcctattgccatactagtctttgccgcctgcgaagcagcggtgggcctagccctactagtctcaatctccaacacatatggcctagactacgtacataacctaaacctactccaatgctaaaactaatcgtcccaacaattatattactaccactgacatgactttccaaaaaacacataatttgaatcaacacaaccacccacagcctaattattagcatcatccctctactattttttaaccaaatcaacaacaacctatttagctgttccccaaccttttcctccgaccccctaacaacccccctcctaatactaactacctgactcctacccctcacaatcatggcaagccaacgccacttatccagtgaaccactatcacgaaaaaaactctatctctctatactaatctccctacaaatctccttaattataacattcacagccacagaactaatcatattttatatcttcttcgaaaccacacttatccccaccttggctatcatcacccgatgaggcaaccagccagaacgcctgaacgcaggcacatacttcctattctacaccctagtaggctcccttcccctactcatcgcactaatttacactcacaacaccctaggctcactaaacattctactactcactctcactgcccaagaactatcaaactcctgagccaacaacttaatatgactagcttacacaatagcttttatagtaaagatacctctttacggactccacttatgactccctaaagcccatgtcgaagcccccatcgctgggtcaatagtacttgccgcagtactcttaaaactaggcggctatggtataatacgcctcacactcattctcaaccccctgacaaaacacatagcctaccccttccttgtactatccctatgaggcataattataacaagctccatctgcctacgacaaacagacctaaaatcgctcattgcatactcttcaatcagccacatagccctcgtagtaacagccattctcatccaaaccccctgaagcttcaccggcgcagtcattctcataatcgcccacgggcttacatcctcattactattctgcctagcaaactcaaactacgaacgcactcacagtcgcatcataatcctctctcaaggacttcaaactctactcccactaatagctttttgatgacttctagcaagcctcgctaacctcgccttaccccccactattaacctactgggagaactctctgtgctagtaaccacgttctcctgatcaaatatcactctcctacttacaggactcaacatactagtcacagccctatactccctctacatatttaccacaacacaatggggctcactcacccaccacattaacaacataaaaccctcattcacacgagaaaacaccctcatgttcatacacctatcccccattctcctcctatccctcaaccccgacatcattaccgggttttcctcttgtaaatatagtttaaccaaaacatcagattgtgaatctgacaacagaggcttacgaccccttatttaccgagaaagctcacaagaactgctaactcatgcccccatgtctaacaacatggctttctcaacttttaaaggataacagctatccattggtcttaggccccaaaaattttggtgcaactccaaataaaagtaataaccatgcacactactataaccaccctaaccctgacttccctaattccccccatccttaccaccctcgttaaccctaacaaaaaaaactcatacccccattatgtaaaatccattgtcgcatccacctttattatcagtctcttccccacaacaatattcatgtgcctagaccaagaagttattatctcgaactgacactgagccacaacccaaacaacccagctctccctaagcttcaaactagactacttctccataatattcatccctgtagcattgttcgttacatggtccatcatagaattctcactgtgatatataaactcagacccaaacattaatcagttcttcaaatatctactcatcttcctaattaccatactaatcttagttaccgctaacaacctattccaactgttcatcggctgagagggcgtaggaattatatccttcttgctcatcagttgatgatacgcccgagcagatgccaacacagcagccattcaagcaatcctatacaaccgtatcggcgatatcggtttcatcctcgccttagcatgatttatcctacactccaactcatgagacccacaacaaatagcccttctaaacgctaatccaagcctcaccccactactaggcctcctcctagcagcagcaggcaaatcagcccaattaggtctccacccctgactcccctcagccatagaaggccccaccccagtctcagccctactccactcaagcactatagttgtagcaggaatcttcttactcatccgcttccaccccctagcagaaaatagcccactaatccaaactctaacactatgcttaggcgctatcaccactctgttcgcagcagtctgcgcccttacacaaaatgacatcaaaaaaatcgtagccttctccacttcaagtcaactaggactcataatagttacaatcggcatcaaccaaccacacctagcattcctgcacatctgtacccacgccttcttcaaagccatactatttatgtgctccgggtccatcatccacaaccttaacaatgaacaagatattcgaaaaataggaggactactcaaaaccatacctctcacttcaacctccctcaccattggcagcctagcattagcaggaatacctttcctcacaggtttctactccaaagaccacatcatcgaaaccgcaaacatatcatacacaaacgcctgagccctatctattactctcatcgctacctccctgacaagcgcctatagcactcgaataattcttctcaccctaacaggtcaacctcgcttccccacccttactaacattaacgaaaataaccccaccctactaaaccccattaaacgcctggcagccggaagcctattcgcaggatttctcattactaacaacatttcccccgcatcccccttccaaacaacaatccccctctacctaaaactcacagccctcgctgtcactttcctaggacttctaacagccctagacctcaactacctaaccaacaaacttaaaataaaatccccactatgcacattttatttctccaacatactcggattctaccctagcatcacacaccgcacaatcccctatctaggccttcttacgagccaaaacctgcccctactcctcctagacctaacctgactagaaaagctattacctaaaacaatttcacagcaccaaatctccacctccatcatcacctcaacccaaaaaggcataattaaactttacttcctctctttcttcttcccactcatcctaaccctactcctaatcacataatctattcccccgagcaatctcaattacaatatatacaccaacaaacaatgttcaaccagtaactactactaatcaacgcccataatcatacaaagcccccgcaccaataggatcctcccgaatcaaccctgacccctctccttcataaattattcagcttcctacactattaaagtttaccacaaccaccaccccatcatactctttcacccacagcaccaatcctacctccatcgctaaccccactaaaacactcaccaagacctcaacccctgacccccatgcctcaggatactcctcaatagccatcgctgtagtatatccaaagacaaccatcattccccctaaataaattaaaaaaactattaaacccatataacctcccccaaaattcagaataataacacacccgaccacaccgctaacaatcaatactaaacccccataaataggagaaggcttagaagaaaaccccacaaaccccattactaaacccacactcaacagaaacaaagcatacatcattattctcgcacggactacaaccacgaccaatgatatgaaaaaccatcgttgtatttcaactacaagaacaccaatgaccccaatacgcaaaactaaccccctaataaaattaattaaccactcattcatcgacctccccaccccatccaacatctccgcatgatgaaacttcggctcactccttggcgcctgcctgatcctccaaatcaccacaggactattcctagccatgcactactcaccagacgcctcaaccgccttttcatcaatcgcccacatcactcgagacgtaaattatggctgaatcatccgctaccttcacgccaatggcgcctcaatattctttatctgcctcttcctacacatcgggcgaggcctatattacggatcatttctctactcagaaacctgaaacatcggcattatcctcctgcttgcaactatagcaacagccttcataggctatgtcctcccgtgaggccaaatatcattctgaggggccacagtaattacaaacttactatccgccatcccatacattgggacagacctagttcaatgaatctgaggaggctactcagtagacagtcccaccctcacacgattctttacctttcacttcatcttgcccttcattattgcagccctagcagcactccacctcctattcttgcacgaaacgggatcaaacaaccccctaggaatcacctcccattccgataaaatcaccttccacccttactacacaatcaaagacgccctcggcttacttctcttccttctctccttaatgacattaacactattctcaccagacctcctaggcgacccagacaattataccctagccaaccccttaaacacccctccccacatcaagcccgaatgatatttcctattcgcctacacaattctccgatccgtccctaacaaactaggaggcgtccttgccctattactatccatcctcatcctagcaataatccccatcctccatatatccaaacaacaaagcataatatttcgcccactaagccaatcactttattgactcctagccgcagacctcctcattctaacctgaatcggaggacaaccagtaagctacccttttaccatcattggacaagtagcatccgtactatacttcacaacaatcctaatcctaataccaactatctccctaattgaaaacaaaatactcaaatgggcctgtccttgtagtataaactaatacaccagtcttgtaaaccggagatgaaaacctttttccaaggacaaatcagagaaaaagtctttaactccaccattagcacccaaagctaagattctaatttaaactattctctgttctttcatggggaagcagatttgggtaccacccaagtattgactcacccatcaacaaccgctatgtatttcgtacattactgccagccaccatgaatattgtacggtaccataaatacttgaccacctgtagtacataaaaacccaatccacatcaaaaccccctccccatgcttacaagcaagtacagcaatcaaccctcaactatcatacatcaactgcaactccaaagccacccctcacccactaggataccaacaaacctacccacccttaacagtacatagtacataaagccatttaccgtacatagcacattacagtcaaatcccttctcgtccccatggatgacccccctcagataggggtcccttgaccaccatcctccgtgaaatcaatatcccgcacaagagtgctactctcctcgctccgggcccataacacttgggggtagctaaagtgaactgtatccgacatctggttcctacttcagggccataaagcctaaatagcccacacgttccccttaaataagacatcacgatg

SEQ ID NO: 269 - DNA, 16572 bp, Homo sapiens mitochondrial
  3110: "n" refers to a nucleotide at position 3107 of the Cambridge Reference Sequence (CRS, Anderson et al. 1981 Nature 290:457-465), later determined to be absent from the human mtDNA sequence according to the revised CRS (rCRS, Andrews et al. 1999 Nature Genetics 23:147); "n" therefore represents a single nucleotide deletion at a position corresponding to nucleotide 3107 of SEQ ID NO:1 as provided herein.
gatcacaggtctatcaccctattaaccactcacgggagctctccatgcatttggtattttcgtctggggggtatgcacgcgatagcattgcgagacgctggagccggagcaccctatgtcgcagtatctgtctttgattcctgcctcatcctattatttatcgcacctacgttcaatattacaggcgaacatacttactaaagtgtgttaattaattaatgcttgtaggacataataataacaattgaatgtctgcacagccgctttccacacagacatcataacaaaaaatttccaccaaaccccccctccccccccgcttctggccacagcacttaaacacatctctgccaaaccccaaaaacaaagaaccctaacaccagcctaaccagatttcaaattttatcttttggcggtatgcacttttaacagtcaccccccaactaacacattattttcccctcccactcccatactactaatctcatcaatacaacccccgcccatcctacccagcacacacacaccgctgctaaccccataccccgaaccaaccaaaccccaaagacaccccccacagtttatgtagcttacctcctcaaagcaatacactgaaaatgtttagacgggctcacatcaccccataaacaaataggtttggtcctagcctttctattagctcttagtaagattacacatgcaagcatccccgttccagtgagttcaccctctaaatcaccacgatcaaaagggacaagcatcaagcacgcagcaatgcagctcaaaacgcttagcctagccacacccccacgggaaacagcagtgattaacctttagcaataaacgaaagtttaactaagctatactaaccccagggttggtcaatttcgtgccagccaccgcggtcacacgattaacccaagtcaatagaagccggcgtaaagagtgttttagatcaccccctccccaataaagctaaaactcacctgagttgtaaaaaactccagttgacacaaaatagactacgaaagtggctttaacatatctgaacacacaatagctaagacccaaactgggattagataccccactatgcttagccctaaacctcaacagttaaatcaacaaaactgctcgccagaacactacgagccacagcttaaaactcaaaggacctggcggtgcttcatatccctctagaggagcctgttctgtaatcgataaaccccgatcaacctcaccacctcttgctcagcctatataccgccatcttcagcaaaccctgatgaaggctacaaagtaagcgcaagtacccacgtaaagacgttaggtcaaggtgtagcccatgaggtggcaagaaatgggctacattttctaccccagaaaactacgatagcccttatgaaacttaagggtcgaaggtggatttagcagtaaactgagagtagagtgcttagttgaacagggccctgaagcgcgtacacaccgcccgtcaccctcctcaagtatacttcaaaggacatttaactaaaacccctacgcatttatatagaggagacaagtcgtaacatggtaagtgtactggaaagtgcacttggacgaaccagagtgtagcttaacacaaagcacccaacttacacttaggagatttcaacttaacttgaccgctctgagctaaacctagccccaaacccactccaccttactaccagacaaccttagccaaaccatttacccaaataaagtataggcgatagaaattgaaacctggcgcaatagatatagtaccgcaagggaaagatgaaaaattataaccaagcataatatagcaaggactaacccctataccttctgcataatgaattaactagaaataactttgcaaggagagccaaagctaagacccccgaaaccagacgagctacctaagaacagctaaaagagcacacccgtctatgtagcaaaatagtgggaagatttataggtagaggcgacaaacctaccgagcctggtgatagctggttgtccaagatagaatcttagttcaactttaaatttgcccacagaaccctctaaatccccttgtaaatttaactgttagtccaaagaggaacagctctttggacactaggaaaaaaccttgtagagagagtaaaaaatttaacacccatagtaggcctaaaagcagccaccaattaagaaagcgttcaagctcaacacccactacctaaaaaatcccaaacatataactgaactcctcacacccaattggaccaatctatcaccctatagaagaactaatgttagtataagtaacatgaaaacattctcctccgcataagcctgcgtcagattaaaacactgaactgacaattaacagcccaatatctacaatcaaccaacaagtcattattaccctcactgtcaacccaacacaggcatgctcataaggaaaggttaaaaaaagtaaaaggaactcggcaaatcttaccccgcctgtttaccaaaaacatcacctctagcatcaccagtattagaggcaccgcctgcccagtgacacatgtttaacggccgcggtaccctaaccgtgcaaaggtagcataatcacttgttccttaaatagggacctgtatgaatggctccacgagggttcagctgtctcttacttttaaccagtgaaattgacctgcccgtgaagaggcgggcataacacagcaagacgagaagaccctatggagctttaatttattaatgcaaacagtacctaacaaacccacaggtcctaaactaccaaacctgcattaaaaatttcggttggggcgacctcggagcagaacccaacctccgagcagtacatgctaagacttcaccagtcaaagcgaactactatactcaattgatccaataacttgaccaacggaacaagttaccctagggataacagcgcaatcctattctagagtccatatcaacaatagggtttacgacctcgatgttggatcaggacatcccgatggtgcagccgctattaaaggttcgtttgttcaacgattaaagtcctacgtgatctgagttcagaccggagtaatccaggtcggtttctatctacnttcaaattcctccctgtacgaaaggacaagagaaataaggcctacttcacaaagcgccttcccccgtaaatgatatcatctcaacttagtattatacccacacccacccaagaacagggtttgttaagatggcagagcccggtaatcgcataaaacttaaaactttacagtcagaggttcaattcctcttcttaacaacatacccatggccaacctcctactcctcattgtacccattctaatcgcaatggcattcctaatgcttaccgaacgaaaaattctaggctatatacaactacgcaaaggccccaacgttgtaggcccctacgggctactacaacccttcgctgacgccataaaactcttcaccaaagagcccctaaaacccgccacatctaccatcaccctctacatcaccgccccgaccttagctctcaccatcgctcttctactatgaacccccctccccatacccaaccccctggtcaacctcaacctaggcctcctatttattctagccacctctagcctagccgtttactcaatcctctgatcagggtgagcatcaaactcaaactacgccctgatcggcgcactgcgagcagtagcccaaacaatctcatatgaagtcaccctagccatcattctactatcaacattactaataagtggctcctttaacctctccacccttatcacaacacaagaacacctctgattactcctgccatcatgacccttggccataatatgatttatctccacactagcagagaccaaccgaacccccttcgaccttgccgaaggggagtccgaactagtctcaggcttcaacatcgaatacgccgcaggccccttcgccctattcttcatagccgaatacacaaacattattataataaacaccctcaccactacaatcttcctaggaacaacatatgacgcactctcccctgaactctacacaacatattttgtcaccaagaccctacttctaacctccctgttcttatgaattcgaacagcatacccccgattccgctacgaccaactcatacacctcctatgaaaaaacttcctaccactcaccctagcattacttatatgatatgtctccatacccattacaatctccagcattccccctcaaacctaagaaatatgtctgataaaagagttactttgatagagtaaataataggagcttaaacccccttatttctaggactatgagaatcgaacccatccctgagaatccaaaattctccgtgccacctatcacaccccatcctaaagtaaggtcagctaaataagctatcgggcccataccccgaaaatgttggttatacccttcccgtactaattaatcccctggcccaacccgtcatctactctaccatctttgcaggcacactcatcacagcgctaagctcgcactgattttttacctgagtaggcctagaaataaacatgctagcttttattccagttctaaccaaaaaaataaaccctcgttccacagaagctgccatcaagtatttcctcacgcaagcaaccgcatccataatccttctaatagctatcctcttcaacaatatactctccggacaatgaaccataaccaatactaccaatcaatactcatcattaataatcataatggctatagcaataaaactaggaatagccccctttcacttctgagtcccagaggttacccaaggcacccctctgacatccggcctgcttcttctcacatgacaaaaactagcccccatctcaatcatataccaaatctctccctcactaaacgtaagccttctcctcactctctcaatcttatccatcatagcaggcagttgaggtggattaaaccaaacccagctacgcaaaatcttagcatactcctcaattacccacataggatgaataatagcagttctaccgtacaaccctaacataaccattcttaatttaactatttatattatcctaactactaccgcattcctactactcaacttaaactccagcaccacgaccctactactatctcgcacctgaaacaagctaacatgactaacacccttaattccatccaccctcctctccctaggaggcctgcccccgctaaccggctttttgcccaaatgggccattatcgaagaattcacaaaaaacaatagcctcatcatccccaccatcatagccaccatcaccctccttaacctctacttctacctacgcctaatctactccacctcaatcacactactccccatatctaacaacgtaaaaataaaatgacagtttgaacatacaaaacccaccccattcctccccacactcatcgcccttaccacgctactcctacctatctccccttttatactaataatcttatagaaatttaggttaaatacagaccaagagccttcaaagccctcagtaagttgcaatacttaatttctgtaacagctaaggactgcaaaaccccactctgcatcaactgaacgcaaatcagccactttaattaagctaagcccttactagaccaatgggacttaaacccacaaacacttagttaacagctaagcaccctaatcaactggcttcaatctacttctcccgccgccgggaaaaaaggcgggagaagccccggcaggtttgaagctgcttcttcgaatttgcaattcaatatgaaaatcacctcggagctggtaaaaagaggcctaacccctgtctttagatttacagtccaatgcttcactcagccattttacctcacccccactgatgttcgccgaccgttgactattctctacaaaccacaaagacattggaacactatacctattattcggcgcatgagctggagtcctaggcacagctctaagcctccttattcgagccgagctgggccagccaggcaaccttctaggtaacgaccacatctacaacgttatcgtcacagcccatgcatttgtaataatcttcttcatagtaatacccatcataatcggaggctttggcaactgactagttcccctaataatcggtgcccccgatatggcgtttccccgcataaacaacataagcttctgactcttacctccctctctcctactcctgctcgcatctgctatagtggaggccggagcagggacaggttgaacagtctaccctcccttagcagggaactactcccaccctggagcctccgtagacctaaccatcttctccttacacctagcaggtgtctcctctatcttaggggccatcaatttcatcacaacaattatcaatataaaaccccctgccataacccaataccaaacgcccctcttcgtctgatccgtcctaatcacagcagtcctacttctcctatctctcccagtcctagctgctggcatcactatactactaacagaccgcaacctcaacaccaccttcttcgaccccgccggaggaggagaccccattctataccaacacctattctgatttttcggtcaccctgaagtttatattcttatcctaccaggcttcggaataatctcccatattgtaacttactactccggaaaaaaagaaccatttggatacataggtatggtctgagctatgatatcaattggcttcctagggtttatcgtgtgagcacaccatatatttacagtaggaatagacgtagacacacgagcatatttcacctccgctaccataatcatcgctatccccaccggcgtcaaagtatttagctgactcgccacactccacggaagcaatatgaaatgatctgctgcagtgctctgagccctaggattcatctttcttttcaccgtaggtggcctgactggcattgtattagcaaactcatcactagacatcgtactacacgacacgtactacgttgtagcccacttccactatgtcctatcaataggagctgtatttgccatcataggaggcttcattcactgatttcccctattctcaggctacaccctagaccaaacctacgccaaaatccatttcactatcatattcatcggcgtaaatctaactttcttcccacaacactttctcggcctatccggaatgccccgacgttactcggactaccccgatgcatacaccacatgaaacatcctatcatctgtaggctcattcatttctctaacagcagtaatattaataattttcatgatttgagaagccttcgcttcgaagcgaaaagtcctaatagtagaagaaccctccataaacctggagtgactatatggatgccccccaccctaccacacattcgaagaacccgtatacataaaatctagacaaaaaaggaaggaatcgaaccccccaaagctggtttcaagccaaccccatggcctccatgactttttcaaaaaggtattagaaaaaccatttcataactttgtcaaagttaaattataggctaaatcctatatatcttaatggcacatgcagcgcaagtaggtctacaagacgctacttcccctatcatagaagagcttatcacctttcatgatcacgccctcataatcattttccttatctgcttcctagtcctgtatgcccttttcctaacactcacaacaaaactaactaatactaacatctcagacgctcaggaaatagaaaccgtctgaactatcctgcccgccatcatcctagtcctcatcgccctcccatccctacgcatcctttacataacagacgaggtcaacgatccctcccttaccatcaaatcaattggccaccaatggtactgaacctacgagtacaccgactacggcggactaatcttcaactcctacatacttcccccattattcctagaaccaggcgacctgcgactccttgacgttgacaatcgagtagtactcccgattgaagcccccattcgtataataattacatcacaagacgtcttgcactcatgagctgtccccacattaggcttaaaaacagatgcaattcccggacgtctaaaccaaaccactttcaccgctacacgaccgggggtatactacggtcaatgctctgaaatctgtggagcaaaccacagtttcatgcccatcgtcctagaattaattcccctaaaaatctttgaaatagggcccgtatttaccctatagcaccccctctaccccctctagagcccactgtaaagctaacttagcattaaccttttaagttaaagattaagagaaccaacacctctttacagtgaaatgccccaactaaatactaccgtatggcccaccataattacccccatactccttacactattcctcatcacccaactaaaaatattaaacacaaactaccacctacctccctcaccaaagcccataaaaataaaaaattataacaaaccctgagaaccaaaatgaacgaaaatctgttcgcttcattcattgcccccacaatcctaggcctacccgccgcagtactgatcattctatttccccctctattgatccccacctccaaatatctcatcaacaaccgactaatcaccacccaacaatgactaatcaaactaacctcaaaacaaatgataaccatacacaacactaaaggacgaacctgatctcttatactagtatccttaatcatttttattgccacaactaacctcctcggactcctgcctcactcatttacaccaaccacccaactatctataaacctagccatggccatccccttatgagcgggcgcagtgattataggctttcgctctaagattaaaaatgccctagcccacttcttaccacaaggcacacctacaccccttatccccatactagttattatcgaaaccatcagcctactcattcaaccaatagccctggccgtacgcctaaccgctaacattactgcaggccacctactcatgcacctaattggaagcgccaccctagcaatatcaaccattaaccttccctctacacttatcatcttcacaattctaattctactgactatcctagaaatcgctgtcgccttaatccaagcctacgttttcacacttctagtaagcctctacctgcacgacaacacataatgacccaccaatcacatgcctatcatatagtaaaacccagcccatgacccctaacaggggccctctcagccctcctaatgacctccggcctagccatgtgatttcacttccactccataacgctcctcatactaggcctactaaccaacacactaaccatataccaatgatggcgcgatgtaacacgagaaagcacataccaaggccaccacacaccacctgtccaaaaaggccttcgatacgggataatcctatttattacctcagaagtttttttcttcgcaggatttttctgagccttttaccactccagcctagcccctaccccccaattaggagggcactggcccccaacaggcatcaccccgctaaatcccctagaagtcccactcctaaacacatccgtattactcgcatcaggagtatcaatcacctgagctcaccatagtctaatagaaaacaaccgaaaccaaataattcaagcactgcttattacaattttactgggtctctattttaccctcctacaagcctcagagtacttcgagtctcccttcaccatttccgacggcatctacggctcaacattttttgtagccacaggcttccacggacttcacgtcattattggctcaactttcctcactatctgcttcatccgccaactaatatttcactttacatccaaacatcactttggcttcgaagccgccgcctgatactggcattttgtagatgtggtttgactatttctgtatgtctccatctattgatgagggtcttactcttttagtataaatagtaccgttaacttccaattaactagttttgacaacattcaaaaaagagtaataaacttcgccttaattttaataatcaacaccctcctagccttactactaataattattacattttgactaccacaactcaacggctacatagaaaaatccaccccttacgagtgcggcttcgaccctatatcccccgcccgcgtccctttctccataaaattcttcttagtagctattaccttcttattatttgatctagaaattgccctccttttacccctaccatgagccctacaaacaactaacctgccactaatagttatgtcatccctcttattaatcatcatcctagccctaagtctggcctatgagtgactacaaaaaggattagactgaaccgaattggtatatagtttaaacaaaacgaatgatttcgactcattaaactatgataatcatatttaccaaatgcccctcatttacataaatattatactagcatttaccatctcacttctaggaatactagtatatcgctcacacctcatatcctccctactatgcctagaaggaataatactatcgctgttcattatagctactctcataaccctcaacacccactccctcttagccaatattgtgcctattgccatactagtctttgccgcctgcgaagcagcggtgggcctagccctactagtctcaatctccaacacatatggcctagactacgtacataacctaaacctactccaatgctaaaactaatcgtcccaacaattatattactaccactgacatgactttccaaaaaacacataatttgaatcaacacaaccacccacagcctaattattagcatcatccctctactattttttaaccaaatcaacaacaacctatttagctgttccccaaccttttcctccgaccccctaacaacccccctcctaatactaactacctgactcctacccctcacaatcatggcaagccaacgccacttatccagtgaaccactatcacgaaaaaaactctacctctctatactaatctccctacaaatctccttaattataacattcacagccacagaactaatcatattttatatcttcttcgaaaccacacttatccccaccttggctatcatcacccgatgaggcaaccagccagaacgcctgaacgcaggcacatacttcctattctacaccctagtaggctcccttcccctactcatcgcactaatttacactcacaacaccctaggctcactaaacattctactactcactctcactgcccaagaactatcaaactcctgagccaacaacttaatatgactagcttacacaatagcttttatagtaaagatacctctttacggactccacttatgactccctaaagcccatgtcgaagcccccatcgctgggtcaatagtacttgccgcagtactcttaaaactaggcggctatggtataatacgcctcacactcattctcaaccccctgacaaaacacatagcctaccccttccttgtactatccctatgaggcataattataacaagctccatctgcctacgacaaacagacctaaaatcgctcattgcatactcttcaatcagccacatagccctcgtagtaacagccattctcatccaaaccccctgaagcttcaccggcgcagtcattctcataatcgcccacgggcttacatcctcattactattctgcctagcaaactcaaactacgaacgcactcacagtcgcatcataatcctctctcaaggacttcaaactctactcccactaatagctttttgatgacttctagcaagcctcgctaacctcgccttaccccccactattaacctactgggagaactctctgtgctagtaaccacgttctcctgatcaaatatcactctcctacttacaggactcaacatactagtcacagccctatactccctctacatatttaccacaacacaatggggctcactcacccaccacattaacaacataaaaccctcattcacacgagaaaacaccctcatgttcatacacctatcccccattctcctcctatccctcaaccccgacatcattaccgggttttcctcttgtaaatatagtttaaccaaaacatcagattgtgaatctgacaacagaggcttacgaccccttatttaccgagaaagctcacaagaactgctaactcatgcccccatgtctaacaacatggctttctcaacttttaaaggataacagctatccattggtcttaggccccaaaaattttggtgcaactccaaataaaagtaataaccatgcacactactataaccaccctaaccctgacttccctaattccccccatccttaccaccctcgttaaccctaacaaaaaaaactcatacccccattatgtaaaatccattgtcgcatccacctttattatcagtctcttccccacaacaatattcatgtgcctagaccaagaagttattatctcgaactgacactgagccacaacccaaacaacccagctctccctaagcttcaaactagactacttctccataatattcatccctgtagcattgttcgttacatggtccatcatagaattctcactgtgatatataaactcagacccaaacattaatcagttcttcaaatatctactcatcttcctaattaccatactaatcttagttaccgctaacaacctattccaactgttcatcggctgagagggcgtaggaattatatccttcttgctcatcagttgatgatacgcccgagcagatgccaacacagcagccattcaagcaatcctatacaaccgtatcggcgatatcggtttcatcctcgccttagcatgatttatcctacactccaactcatgagacccacaacaaatagcccttctaaacgctaatccaagcctcaccccactactaggcctcctcctagcagcagcaggcaaatcagcccaattaggtctccacccctgactcccctcagccatagaaggccccaccccagtctcagccctactccactcaagcactatagttgtagcaggaatcttcttactcatccgcttccaccccctagcagaaaatagcccactaatccaaactctaacactatgcttaggcgctatcaccactctgttcgcagcagtctgcgcccttacacaaaatgacatcaaaaaaatcgtagccttctccacttcaagtcaactaggactcataatagttacaatcggcatcaaccaaccacacctagcattcctgcacatctgtacccacgccttcttcaaagccatactatttatgtgctccgggtccatcatccacaaccttaacaatgaacaagatattcgaaaaataggaggactactcaaaaccatacctctcacttcaacctccctcaccattggcagcctagcattagcaggaatacctttcctcacaggtttctactccaaagaccacatcatcgaaaccgcaaacatatcatacacaaacgcctgagccctatctattactctcatcgctacctccctgacaagcgcctatagcactcgaataattcttctcaccctaacaggtcaacctcgcttccccacccttactaacattaacgaaaataaccccaccctactaaaccccattaaacgcctggcagccggaagcctattcgcaggatttctcattactaacaacatttcccccgcatcccccttccaaacaacaatccccctctacctaaaactcacagccctcgctgtcactttcctaggacttctaacagccctagacctcaactacctaaccaacaaacttaaaataaaatccccactatgcacattttatttctccaacatactcggattctaccctagcatcacacaccgcacaatcccctatctaggccttcttacgagccaaaacctgcccctactcctcctagacctaacctgactagaaaagctattacctaaaacaatttcacagcaccaaatctccacctccatcatcacctcaacccaaaaaggcataattaaactttacttcctctctttcttcttcccactcatcctaaccctactcctaatcacataacctattcccccgagcaatctcaattacaatatatacaccaacaaacaatgttcaaccagtaactactactaatcaacgcccataatcatacaaagcccccgcaccaataggatcctcccgaatcaaccctgacccctctccttcataaattattcagcttcctacactattaaagtttaccacaaccaccaccccatcatactctttcacccacagcaccaatcctacctccatcgctaaccccactaaaacactcaccaagacctcaacccctgacccccatgcctcaggatactcctcaatagccatcgctgtagtatatccaaagacaaccatcattccccctaaataaattaaaaaaactattaaacccatataacctcccccaaaattcagaataataacacacccgaccacaccgctaacaatcaatactaaacccccataaataggagaaggcttagaagaaaaccccacaaaccccattactaaacccacactcaacagaaacaaagcatacatcattattctcgcacggactacaaccacgaccaatgatatgaaaaaccatcgttgtatttcaactacaagaacaccaatgaccccaatacgcaaaactaaccccctaataaaattaattaaccactcattcatcgacctccccaccccatccaacatctccgcatgatgaaacttcggctcactccttggcgcctgcctaatcctccaaatcaccacaggactattcctagccatgcactactcaccagacgcctcaaccgccttttcatcaatcgcccacatcactcgagacgtaaattatggctgaatcatccgctaccttcacgccaatggcgcctcaatattctttatctgcctcttcctacacatcgggcgaggcctatattacggatcatttctctactcagaaacctgaaacatcggcattatcctcctgcttgcaactatagcaacagccttcataggctatgtcctcccgtgaggccaaatatcattctgaggggccacagtaattacaaacttactatccgccatcccatacattgggacagacctagttcaatgaatctgaggaggctactcagtagacagtcccaccctcacacgattctttacctttcacttcatcttgcccttcattattgcagccctagcagcactccacctcctattcttgcacgaaacgggatcaaacaaccccctaggaatcacctcccattccgataaaatcaccttccacccttactacacaatcaaagacgccctcggcttacttctcttccttctctccttaatgacattaacactattctcaccagacctcctaggcgacccagacaattataccctagccaaccccttaaacacccctccccacatcaagcccgaatgatatttcctattcgcctacacaattctccgatccgtccctaacaaactaggaggcgtccttgccctattactatccatcctcatcctagcaataatccccatcctccatatatccaaacaacaaagcataatatttcgcccactaagccaatcactttattgactcctagccgcagacctcctcattctaacctgaatcggaggacaaccagtaagctacccttttaccatcattggacaagtagcatccgtactatacttcacaacaatcctaatcctaataccaactatctccctaattgaaaacaaaatactcaaatgggcctgtccttgtagtataaactaatacaccagtcttgtaaaccggagatgaaaacctttttccaaggacaaatcagagaaaaagtctttaactccaccattagcacccaaagctaagattctaatttaaactattctctgttctttcatggggaagcagatttgggtaccacccaagtattgactcacccatcaacaaccgctatgtatttcgtacattactgccagccaccatgaatattgtacggtaccataaatacttgaccacctgtagtacataaaaacccaatccacatcaaaaccccctccccatgcttacaagcaagtacagcaatcaaccctcaactatcacacatcaactgcaactccaaagccacccctcacccactaggataccaacaaacctacccacccttaacagtacatagtacataaagccatttaccgtacatagcacattacagtcaaatcccttctcgtccccatggatgacccccctcagataggggtcccttgaccaccatcctccgtgaaatcaatatcccgcacaagagtgctactctcctcgctccgggcccataacacttgggggtagctaaagtgaactgtatccgacatctggttcctacttcagggccataaagcctaaatagcccacacgttccccttaaataagacatcacgatg

SEQ ID NO: 270 - DNA, 16570 bp, Homo sapiens mitochondrial
  3108: "n" refers to a nucleotide at position 3107 of the Cambridge Reference Sequence (CRS, Anderson et al. 1981 Nature 290:457-465), later determined to be absent from the human mtDNA sequence according to the revised CRS (rCRS, Andrews et al. 1999 Nature Genetics 23:147); "n" therefore represents a single nucleotide deletion at a position corresponding to nucleotide 3107 of SEQ ID NO:1 as provided herein.
gatcacaggtctatcaccctattaaccactcacgggagctctccatgcatttggtattttcgtctggggggtgtgcacgcgatagcattgcgagacgctggagccggagcaccctatgtcgcagtatctgtctttgattcctgcctcatcctattatttatcgcacctacgttcaatattacagacgaacatacttactaaagtgtgttaattaattaatgcttgtaagacataataataacaattgaatgtctgcacagccgctttccacacagacatcataacaaaaaattttcaccaaaccccccctcccccgccttctggccacagcacttaaacacatctctgccaaaccccaaaaacaaagaaccctaacaccagcctaaccagatttcaaattttatcttttggcggtatgcacttttaacagtcaccccccaactaacacattattttcccctctcactcccatactactaatctcatcaacacaacccccgcccatcctacccagcacacacacaccgctgctaaccccataccccgaaccaaccaaaccccaaagacaccccccacagtttatgtagcttacctcctcaaagcaatacactgaaaatgtttagacgggctcacatcaccccataaacaaataggtttggtcctagcctttctattagctcttagtaagattacacatgcaagcatccccgttccagtgagttcaccctctaaatcaccacgatcaaaagggacaagcatcaagcacgcagcaatgcagctcaaaacgcttagcctagccacacccccacgggaaacagcagtgattaacctttagcaataaacgaaagtttaactaagctatactaaccccagggttggtcaatttcgtgccagccaccgcggtcacacgattaacccaagtcaatagaagccggcgtaaagagtgttttagatcaccccctccccaataaagctaaaactcacctgagttgtaaaaaactccagttgacacaaaatagactacgaaagtggctttaacatatctgaacacacaatagctaagacccaaactgggattagataccccactatgcttagccctaaacctcaacagttaaatcaacaaaactgctcgccagaacactacgagccacagcttaaaactcaaaggacctggcggtgcttcatatccctctagaggagcctgttctgtaatcgataaaccccgatcaacctcaccacctcttgctcagcctatataccgccatcttcagcaaaccctgatgaaggctacaaagtaagcgcaagtacccacgtaaagacgttaggtcaaggtgtagcccatgaggtggcaagaaatgggctacattttctaccccagaaaactacgatagcccttatgaaacttaagggtcgaaggtggatttagcagtaaactgagagtagagtgcttagttgaacagggccctgaagcgcgtacacaccgcccgtcaccctcctcaagtatacttcaaaggacatttaactaaaacccctacgcatttatatagaggagacaagtcgtaacatggtaagtgtactggaaagtgcacttggacgaaccagagtgtagcttaacacaaagcacccaacttacacttaggagatttcaacttaacttgaccgctctgagctaaacctagccccaaacccactccaccttactaccagacaaccttagccaaaccatttacccaaataaagtataggcgatagaaattgaaacctggcgcaatagatatagtaccgcaagggaaagatgaaaaattataaccaagcataatatagcaaggactaacccctataccttctgcataatgaattaactagaaataactttgcaaggagagccaaagctaagacccccgaaaccagacgagctacctaagaacagctaaaagagcacacccgtctatgtagcaaaatagtgggaagatttataggtagaggcgacaaacctaccgagcctggtgatagctggttgtccaagatagaatcttagttcaactttaaatttgcccacagaaccctctaaatccccttgtaaatttaactgttagtccaaagaggaacagctctttggacactaggaaaaaaccttgtagagagagtaaaaaatttaacacccatagtaggcctaaaagcagccaccaattaagaaagcgttcaagctcaacacccactacctaaaaaatcccaaacatataactgaactcctcacacccaattggaccaatctatcaccctatagaagaactaatgttagtataagtaacatgaaaacattctcctccgcataagcctgcgtcagattaaaacactgaactgacaattaacagcccaatatccacaatcaaccaacaagtcattattaccctcactgtcaacccaacacaggcatgctcataaggaaaggttaaaaaaagtaaaaggaactcggcaaatcttaccccgcctgtttaccaaaaacatcacctctagcatcaccagtattagaggcaccgcctgcccagtgacacatgtttaacggccgcggtaccctaaccgtgcaaaggtagcataatcacttgttccttaaatagggacctgtatgaatggctccacgagggttcagctgtctcttacttttaaccagtgaaattgacctgcccgtgaagaggcgggcatgacacagcaagacgagaagaccctatggagctttaatttattaatgcaaacagtacctaacaaacccacaggtcctaaactaccaaacctgcattaaaaatttcggttggggcgacctcggagcagaacccaacctccgagcagtacatgctaagacttcaccagtcaaagcgaactactatactcaattgatccaataacttgaccaacggaacaagttaccctagggataacagcgcaatcctattctagagtccatatcaacaatagggtttacgacctcgatgttggatcaggacatcccaatggtgcagccgctattaaaggttcgtttgttcaacgattaaagtcctacgtgatctgagttcagaccggagtaatccaggtcggtttctatctacnttcaaattcctccctgtacgaaaggacaagagaaataaggcctacttcacaaagcgccttcccccgtaaatgatatcatctcaacttagtattatacccacacccacccaagaacagggtttgttaagatggcagagcccggtaatcgcataaaacttaaaactttacagtcagaggttcaattcctcttcttaacaacatacccatggccaacctcctactcctcattgtacccattctaatcgcaatggcattcctaatgcttaccgaacgaaaaattctaggctatatacaactacgcaaaggccccaacgttgtaggcccctacgggctactacaacccttcgctgacgccataaaactcttcaccaaagagcccctaaaacccgccacatctaccatcaccctctacatcaccgccccgaccttagctctcaccatcgctcttctactatgaacccccctccccatacccaaccccctggtcaacctcaacctaggcctcctatttattctagccacctctagcctagccgtttactcaatcctctgatcagggtgagcatcaaactcaaactacgccctgatcggcgcactgcgagcagtagcccaaacaatctcatatgaagtcaccctagccatcattctactatcaacattactaataagtggctcctttaacctctccacccttatcacaacacaagaacacctctgattactcctgccatcatgacccttggccataatatgatttatctccacactagcagagaccaaccgaacccccttcgaccttgccgaaggggagtccgaactagtctcaggcttcaacatcgaatacgccgcaggccccttcgccctattcttcatagccgaatacacaaacattattataataaacaccctcaccactacaatcttcctaggaacaacatatgacgcactctcccctgaactctacacaacatattttgtcaccaagaccctacttctaacctccctgttcttatgaattcgaacagcatacccccgattccgctacgaccaactcatacacctcctatgaaaaaacttcctaccactcaccctagcattacttatatgacatgtctccatacccattacaatctccagcattccccctcaaacctaagaaatatgtctgataaaagagttactttgatagagtaaataataggagcttaaacccccttatttctaggactatgagaatcgaacccatccctgagaatccaaaattctccgtgccacctatcacaccccatcctaaagtaaggtcagctaaataagctatcgggcccataccccgaaaatgttggttatacccttcccgtactaattaatcccctggcccaacccgtcatctactctaccatctttgcaggcacactcatcacagcgctaagctcgcactgattttttacctgagtaggcctagaaataaacatgctagcttttattccagttctaaccaaaaaaataaaccctcgttccacagaagctgccatcaagtatttcctcacgcaagcaaccgcatccataatccttctaatagctatcctcttcaacaatatactctccggacaatgaaccataaccaatactaccaatcaatactcatcattaataatcataatggctatagcaataaaactaggaatagccccctttcacttctgagtcccagaggttacccaaggcacccctctgacatccggcctgcttcttctcacatgacaaaaactagcccccatctcaatcatataccaaatctctccctcactaaacgtaagccttctcctcactctctcaatcttatccatcatagcaggcagttgaggtggattaaaccaaacccagctacgcaaaatcttagcatactcctcaattacccacataggatgaataatagcagttctaccgtacaaccctaacataaccattcttaatttaactatttatattatcctaactactaccgcattcctactactcaacttaaactccagcaccacgaccctactactatctcgcacctgaaacaagctaacatgactaacacccttgattccatccaccctcctctccctaggaggcctgcccccgctaaccggctttttgcccaaatgggccattatcgaagaattcacaaaaaacaatagcctcatcatccccaccatcatagccaccatcaccctccttaacctctacttctacctacgcctaatctactccacctcaatcacactactccccatatctaacaacgtaaaaataaaatgacagtttgaacatacaaaacccaccccattcctccccacactcatcgcccttaccacgctactcctacctatctccccttttatactaataatcttatagaaatttaggttaaatacagaccaagagccttcaaagccctcagtaagttgcaatacttaatttctgtaacagctaaggactgcaaaaccccactctgcatcaactgaacgcaaatcagccactttaattaagctaagcccttactagaccaatgggacttaaacccacaaacacttagttaacagctaagcaccctaatcaactggcttcaatctacttctcccgccgccgggaaaaaaggcgggagaagccccggcaggtttgaagctgcttcttcgaatttgcaattcaatatgaaaatcacctcggagctggtaaaaagaggcctaacccctgtctttagatttacagtccaatgcttcactcagccattttacctcacccccactgatgttcgccgaccgttgactattctctacaaaccacaaagacattggaacactatacctattattcggcgcatgagctggagtcctaggcacagctctaagcctccttattcgagccgagctgggccagccaggcaaccttctaggtaacgaccacatctacaacgttatcgtcacagcccatgcatttgtaataatcttcttcatagtaatacccatcataatcggaggctttggcaactgactagttcccctaataatcggtgcccccgatatggcgtttccccgcataaacaacataagcttctgactcttacctccctctctcctactcctgctcgcatctgctatagtggaggccggagcaggaacaggttgaacagtctaccctcccttagcagggaactactcccaccctggagcctccgtagacctaaccatcttctccttacacctagcaggtgtctcctctatcttaggggccatcaatttcatcacaacaattatcaatataaaaccccctgccataacccaataccaaacgcccctcttcgtctgatccgtcctaatcacagcagtcctacttctcctatctctcccagtcctagctgctggcatcactatactactaacagaccgcaacctcaacaccaccttcttcgaccccgccggaggaggagaccccattctataccaacacctattctgatttttcggtcaccctgaagtttatattcttatcctaccaggcttcggaataatctcccatattgtaacttactactccggaaaaaaagaaccatttggatacataggtatggtctgagctatgatatcaattggcttcctagggtttatcgtgtgagcacaccatatatttacagtaggaatagacgtagacacacgagcatatttcacctccgctaccataatcatcgctatccccaccggcgtcaaagtatttagctgactcgccacactccacggaagcaatatgaaatgatctgctgcagtgctctgagccctaggattcatctttcttttcaccgtaggtggcctgactggcattgtattagcaaactcatcactagacatcgtactacacgacacgtactacgttgtagctcacttccactatgtcctatcaataggagctgtatttgccatcataggaggcttcattcactgatttcccctattctcaggctacaccctagaccaaacctacgccaaaatccatttcactatcatattcatcggcgtaaatctaactttcttcccacaacactttctcggcctatccggaatgccccgacgttactcggactaccccgatgcatacaccacatgaaacatcctatcatctgtaggctcattcatttctctaacagcagtaatattaataattttcatgatttgagaagccttcgcttcgaagcgaaaagtcctaatagtagaagaaccctccataaacctggagtgactatatggatgccccccaccctaccacacattcgaagaacccgtatacataaaatctagacaaaaaaggaaggaatcgaaccccccaaagctggtttcaagccaaccccatggcctccatgactttttcaaaaaggtattagaaaaaccatttcataactttgtcaaagttaaattataggctaaatcctatatatcttaatggcacatgcagcgcaagtaggtctacaagacgctacttcccctatcatagaagagcttatcacctttcatgatcacgccctcataatcattttccttatctgcttcctagtcctgtatgcccttttcctaacactcacaacaaaactaactaatactaacatctcagacgctcaggaaatagaaaccgtctgaactatcctgcccgccatcatcctagtcctcatcgccctcccatccctacgcatcctttacataacagacgaggtcaacgatccctcccttaccatcaaatcaattggccaccaatggtactgaacctacgagtacaccgactacggcggactaatcttcaactcctacatacttcccccattattcctagaaccaggcgacctgcgactccttgacgttgacaatcgagtagtactcccgattgaagcccccattcgtataataattacatcacaagacgtcttgcactcatgagctgtccccacattaggcttaaaaacagatgcaattcccggacgtctaaaccaaaccactttcaccgctacacgaccgggggtatactacggtcaatgctctgaaatctgtggagcaaaccacagtttcatgcccatcgtcctagaattaattcccctaaaaatctttgaaatagggcccgtatttaccctatagcaccccctctaccccctctagagcccactgtaaagctaacttagcattaaccttttaagttaaagattaagagaaccaacacctctttacagtgaaatgccccaactaaatactaccgtatggcccaccataattacccccatactccttacactattcctcatcacccaactaaaaatattaaacacaaactaccacctacctccctcaccaaagcccataaaaataaaaaattataacaaaccctgagaaccaaaatgaacgaaaatctgttcgcttcattcattgcccccacaatcctaggcctacccgccgcagtactgatcattctatttccccctctattgatccccacctccaaatatctcatcaacaaccgactaatcaccacccaacaatgactaatcaaactaacctcaaaacaaatgataaccatacacaacactaaaggacgaacctgatctcttatactagtatccttaatcatttttattgccacaactaacctcctcggactcctgcctcactcatttacaccaaccacccaactatctataaacctagccatggccatccccttatgagcgggcgcagtgattataggctttcgctctaagattaaaaatgccctagcccacttcttaccacaaggcacacctacaccccttatccccatactagttattatcgaaaccatcagcctactcattcaaccaatagccctggccgtacgcctaaccgctaacattactgcaggccacctactcatgcacctaattggaagcgccaccctagcaatatcaaccattaaccttccctctacacttatcatcttcacaattctaattctactgactatcctagaaatcgctgtcgccttaatccaagcctacgttttcacacttctagtaagcctctacctgcacgacaacacataatgacccaccaatcacatgcctatcatatagtaaaacccagcccatgacccctaacaggggccctctcagccctcctaatgacctccggcctagccatgtgatttcacttccactccataacgctcctcatactaggcctactaaccaacacactaaccatataccaatgatggcgcgatgtaacacgagaaagcacataccaaggccaccacacaccacctgtccaaaaaggccttcgatacgggataatcctatttattacctcagaagtttttttcttcgcaggatttttctgagccttttaccactccagcctagcccctaccccccaattaggagggcactggcccccaacaggcatcaccccgctaaatcccctagaagtcccactcctaaacacatccgtattactcgcatcaggagtatcaatcacctgagctcaccatagtctaatagaaaacaaccgaaaccaaataattcaagcactgcttattacaattttactgggtctctattttaccctcctacaagcctcagagtacttcgagtctcccttcaccatttccgacggcatctacggctcaacattttttgtagccacaggcttccacggacttcacgtcattattggctcaactttcctcactatctgcctcatccgccaactaatatttcactttacatccaaacatcactttggcttcgaagccgccgcctgatactggcattttgtagatgtggtttgactatttctgtatgtctccatctattgatgagggtcttactcttttagtataaatagtaccgttaacttccaattaactagttttgacaacattcaaaaaagagtaataaacttcgccttaattttaataatcaacaccctcctagccttactactaataattattacattttgactaccacaactcaacggctacatagaaaaatccaccccttacgagtgcggcttcgaccctatattccccgcccgcgtccctttctccataaaattcttcttagtagctattaccttcttattatttgatctagaaattgccctccttttacccctaccatgagccctacaaacaactaacctgccactaatagttatgtcatccctcttattaatcatcatcctagccctaagtctggcctatgagtgactacaaaaaggattagactgagccgaattggtatatagtttaaacaaaacgaatgatttcgactcattaaattatgataatcatatttaccaaatgcccctcatttacataaatattatactagcatttaccatctcacttctaggaatactagtatatcgctcacacctcatatcctccctactatgcctagaaggaataatactatcgctgttcattatggctactctcataaccctcaacacccactccctcttagccaatattgtgcctattgccatactagtctttgccgcctgcgaagcagcggtgggcctagccctactagtctcaatctccaacacatatggcctagactacgtacataacctaaacctactccaatgctaaaactaatcgtcccaacaattatattactaccactgacatgactttccaaaaaacacataatttgaatcaacacaaccacccacagcctaattattagcatcatccctctactattttttaaccaaatcaacaacaacctatttagctgttccccaaccttttcctccgaccccctaacaacccccctcctaatactaactacctgactcctacccctcacaatcatggcaagccaacgccacttatccagtgaaccactatcacgaaaaaaactctacctctctatactaatctccctacaaatctccttaattataacattcacagccacagaactaatcatattttatatcttcttcgaaaccacacttatccccaccttggctatcatcacccgatgaggcaaccagccagaacgcctgaacgcaggcacatacttcctattctacaccctagtaggctcccttcccctactcatcgcactgatttacactcacaacaccctaggctcactaaacattctactactcactctcactgcccaagaactatcaaactcctgagccaacaacttaatatgactagcttacacaatagcttttatagtaaagatacctctttacggactccacttatgactccctaaagcccatgtcgaagcccccatcgctgggtcaatagtacttgccgcagtactcttaaaactaggcggctatggtataatacgcctcacactcattctcaaccccctgacaaaacacatagcctaccccttccttgtactatccctatgaggcataattataacaagctccatctgcctacgacaaacagacctaaaatcgctcattgcatactcttcaatcagccacatagccctcgtagtaacagccattctcatccaaaccccctgaagcttcaccggcgcagtcattctcataatcgcccacggacttacatcctcattactattctgcctagcaaactcaaactacgaacgcactcacagtcgcatcataatcctctctcaaggacttcaaactctactcccactaatagctttttgatgacttctagcaagcctcgctaacctcgccttaccccccactattaacctactgggagaactctctgtgctagtaaccacgttctcctgatcaaatatcactctcctacttacaggactcaacatactagtcacagccctatactccctctacatatttaccacaacacaatggggctcactcacccaccacattaacaacataaaaccctcattcacacgagaaaacaccctcatgttcatacacctatcccccattctcctcctatccctcaaccccgacatcattaccgggttttcctcttgtaaatatagtttaaccaaaacatcagattgtgaatctgacaacagaggcttacgaccccttatttaccgagaaagctcacaagaactgctaactcatgcccccatgtctaacaacatggctttctcaacttttaaaggataacagctatccattggtcttaggccccaaaaattttggtgcaactccaaataaaagtaataaccatgcacactactataaccaccctaaccctgacttccctaattccccccatccttaccaccctcgttaaccctaacaaaaaaaactcatacccccattatgtaaaatccattgtcgcatccacctttattatcagtctcttccccacaacaatattcatgtgcctagaccaagaagttattatctcgaactgacactgagccacaacccaaacaacccagctctccctaagcttcaaactagactacttctccataatattcatccctgtggcattgttcgttacatggtccatcatagaattctcactgtgatatataaactcagacccaaacattaatcagttcttcaaatatctactcatcttcctaattaccatactaatcttagttaccgctaacaacctattccaactgttcatcggctgagagggcgtaggaattatatccttcttgctcatcagttgatgatacgcccgagcagatgccaacacagcagccattcaagcaatcctatacaaccgtatcggcgatatcggtttcatcctcgccttagcatgatttatcctacactccaactcatgagacccacaacaaatagcccttctaaacgctaatccaagcctcaccccactactaggcctcctcctagcagcagcaggcaaatcagcccaattaggtctccacccctgactcccctcagccatagaaggccccaccccagtctcagccctactccactcaagcactatagttgtagcaggaatcttcttactcatccgcttccaccccctagcagaaaatagcccactaatccaaactctaacactatgcttaggcgctatcaccactctgttcgcagcagtctgcgcccttacacaaaatgacatcaaaaaaatcgtagccttctccacttcaagtcaactaggactcataatagttacaatcggcatcaaccaaccacacctagcattcctgcacatctgtacccacgccttcttcaaagccatactatttatgtgctccgggtccatcatccacaaccttaacaatgaacaagatattcgaaaaataggaggactactcaaaaccatacctctcacttcaacctccctcaccattggcagcctagcattagcaggaatacctttcctcacaggtttctactccaaagaccacatcatcgaaaccgcaaacatatcatacacaaacgcctgagccctatctattactctcatcgctacctccctgacaagcgcctatagcactcgaataattcttctcaccctaacaggtcaacctcgcttccccacccttactaacattaacgaaaataaccccaccctactaaaccccattaaacgcctgacagccggaagcctattcgcaggatttctcattactaacaacatttcccccgcatcccccttccaaacaacaatccccctctacctaaaactcacagccctcgctgtcactttcctaggacttctaacagccctagacctcaactacctaaccaacaaacttaaaataaaatccccactatgcacattttatttctccaacatactcggattctaccctagcatcacacaccgcacaatcccctatctaggccttcttacgagccaaaacctgcccctactcctcctagacctaacctgactagaaaagctattacctaaaacaatttcacagcaccaaatctccacctccatcatcacctcaacccaaaaaggcataattaaactttacttcctctctttcttcttcccactcatcctaaccctactcctaatcacataacctattcccccgagcaatctcaattacaatatatacaccaacaaacaatgttcaaccagtaactactactaatcaacgcccataatcatacaaagcccccgcaccaataggatcctcccgaatcaaccctgacccctctccttcataaattattcagcttcctacactattaaagtttaccacaaccaccaccccatcatactctttcacccacagcaccaatcctacctccatcgctaaccccactaaaacactcaccaagacctcaacccctgacccccatgcctcaggatactcctcaatagccatcgctgtagtatatccaaagacaaccatcattccccctaaataaattaaaaaaactattaaacccatataacctcccccaaaattcagaataataacacacccgaccacaccgctaacaatcaatactaaacccccataaataggagaaggcttagaagaaaaccccacaaaccccattactaaacccacactcaacagaaacaaagcatacatcattattctcgcacggactacaaccacgaccaatgatatgaaaaaccatcgttgtatttcaactacaagaacaccaatgaccccaatacgcaaaattaaccccctaataaaattaattaaccactcactcatcgacctccccaccccatccaacatctccgcatgatgaaacttcggctcactccttggcgcctgcctgatcctccaaatcaccacaggactattcctagccatgcactactcaccagacgcctcaaccgccttttcatcaatcgcccacatcactcgagacgtaaattatggctgaatcatccgctaccttcacgccaatggcgcctcaatattctttatctgcctcttcctacacatcgggcgaggcctatattacggatcatttctctactcagaaacctgaaacatcggcattatcctcctgcttgcaactatagcaacagccttcataggctatgtcctcccgtgaggccaaatatcattctgaggggccacagtaattacaaacttactatccgccatcccatacattgggacagacctagttcaatgaatctgaggaggctactcagtagacagtcccaccctcacacgattctttacctttcacttcatcttgcccttcattattgcagccctagcagcactccacctcctattcttgcacgaaacgggatcaaacaaccccctaggaatcacctcccattccgataaaatcaccttccacccttactacacaatcaaagacgccctcggcttacttctcttcattctctccttaatgacattaacactattctcaccagacctcctaggcgacccagacaattataccctagccaaccccttaaacacccctccccacatcaagcccgaatgatatttcctattcgcctacacaattctccgatccgtccctaacaaactaggaggcgtccttgccctattactatccatcctcatcctagcaataatccccatcctccatatatccaaacaacaaagcataatatttcgcccactaagccaatcactttattgactcctagccgcagacctcctcattctaacctgaatcggaggacaaccagtaagctacccttttaccatcattggacaagtagcatccgtactatacttcacaacaatcctaatcctaataccaactatctccctaattgaaaacaaaatactcaaatgggcctgtccttgtagtataaactaatacaccagtcttgtaaaccggagatgaaaacctttttccaaggacaaatcagagaaaaagtctttaactccaccattagcacccaaagctaagattctaatttaaactattctctgttctttcatggggaagcagatttgggtaccacccaagtattgacttacccatcaacaaccgctatgtatttcgtacattactgccagccaccatgaatattgcacggtaccataaatacttgaccacctgtagtacataaaaacccaatccacatcaaaaccccctccccatgcttacaagcaagtacagcaatcaaccctcaactatcacacatcaactgcaactccaaagccacccctcacccactaggataccaacaaacctacccacccttaacagtacatagtacataaagccatttaccgtacatagcacattacagtcaaatcccttctcgtccccatggatgacccccctcagataggggtcccttgaccaccatcctccgtgaaatcaatatcccgcacaagagtgctactctcctcgctccgggcccataacacttgggggtagctaaagtgaactgtatccgacatctggttcctacttcagggtcataaagcctaaatagcccacacgttccccttaaataagacatcacgatg

SEQ ID NO: 271 - DNA, 16570 bp, Homo sapiens mitochondrial
  3108: "n" refers to a nucleotide at position 3107 of the Cambridge Reference Sequence (CRS, Anderson et al. 1981 Nature 290:457-465), later determined to be absent from the human mtDNA sequence according to the revised CRS (rCRS, Andrews et al. 1999 Nature Genetics 23:147); "n" therefore represents a single nucleotide deletion at a position corresponding to nucleotide 3107 of SEQ ID NO:1 as provided herein.
gatcacaggtctatcaccctattaaccactcacgggagctctccatgcatttggtattttcgtctggggggtatgcacgcgatagcattgcgagacgctggagccggagcaccctatgtcgcagtatctgtctttgattcctgcctcatcctattatttatcgcacctacgttcaatattacaggcgaacatacttactaaagtgtgttaattaattaatgcttgtaggacataataataacaattgaatgtctgcacagccgctttccacacagacatcataacaaaaaatttccaccaaaccccccctcccccgccttctggccacagcacttaaacacatctctgccaaaccccaaaaacaaagaaccctaacaccagcctaaccagatttcaaattttatcttttggcggtatgcacttttaacagtcaccccccaactaacacattattttcccctcccactcccatactactaatctcatcaatacaacccccgcccatcctacccagcacacacacaccgctgctaaccccataccccgaaccaaccaaaccccaaagacaccccccacagtttatgtagcttacctcctcaaagcaatacactgaaaatgtttagacgggctcacatcaccccataaacaaataggtttggtcctagcctttctattagctcttagtaagattacacatgcaagcatccccgttccagtgagttcaccctctaaatcaccacgatcaaaagggacaagcatcaagcacgcagcaatgcagctcaaaacgcttagcctagccacacccccacgggaaacagcagtgattaacctttagcaataaacgaaagtttaactaagctatactaaccccagggttggtcaatttcgtgccagccaccgcggtcacacgattaacccaagtcaatagaagccggcgtaaagagtgttttagatcaccccctccccaataaagctaaaactcacctgagttgtaaaaaactccagttgacacaaaatagactacgaaagtggctttaacatatctgaacacacaatagctaagacccaaactgggattagataccccactatgcttagccctaaacctcaacagttaaatcaacaaaactgctcgccagaacactacgagccacagcttaaaactcaaaggacctggcggtgcttcatatccctctagaggagcctgttctgtaatcgataaaccccgatcaacctcaccacctcttgctcagcctatataccgccatcttcagcaaaccctgatgaaggctacaaagtaagcgcaagtacccacgtaaagacgttaggtcaaggtgtagcccatgaggtggcaagaaatgggctacattttctaccccagaaaactacgatagcccttatgaaacttaagggtcgaaggtggatttagcagtaaactgagagtagagtgcttagttgaacagggccctgaagcgcgtacacaccgcccgtcaccctcctcaagtatacttcaaaggacatttaactaaaacccctacgcatttatatagaggagacaagtcgtaacatggtaagtgtactggaaagtgcacttggacgaaccagagtgtagcttaacacaaagcacccaacttacacttaggagatttcaacttaacttgaccgctctgagctaaacctagccccaaacccactccaccttactaccagacaaccttagccaaaccatttacccaaataaagtataggcgatagaaattgaaacctggcgcaatagatatagtaccgcaagggaaagatgaaaaattataaccaagcataatatagcaaggactaacccctataccttctgcataatgaattaactagaaataactttgcaaggagagccaaagctaagacccccgaaaccagacgagctacctaagaacagctaaaagagcacacccgtctatgtagcaaaatagtgggaagatttataggtagaggcgacaaacctaccgagcctggtgatagctggttgtccaagatagaatcttagttcaactttaaatttgcccacagaaccctctaaatccccttgtaaatttaactgttagtccaaagaggaacagctctttggacactaggaaaaaaccttgtagagagagtaaaaaatttaacacccatagtaggcctaaaagcagccaccaattaagaaagcgttcaagctcaacacccactacctaaaaaatcccaaacatataactgaactcctcacacccaattggaccaatctatcaccctatagaagaactaatgttagtataagtaacatgaaaacattctcctccgcataagcctgcgtcagattaaaacactgaactgacaattaacagcccaatatctacaatcaaccaacaagtcattattaccctcactgtcaacccaacacaggcatgctcataaggaaaggttaaaaaaagtaaaaggaactcggcaaatcttaccccgcctgtttaccaaaaacatcacctctagcatcaccagtattagaggcaccgcctgcccagtgacacatgtttaacggccgcggtaccctaaccgtgcaaaggtagcataatcacttgttccttaaatagggacctgtatgaatggctccacgagggttcagctgtctcttacttttaaccagtgaaattgacctgcccgtgaagaggcgggcataacacagcaagacgagaagaccctatggagctttaatttattaatgcaaacagtacctaacaaacccacaggtcctaaactaccaaacctgcattaaaaatttcggttggggcgacctcggagcagaacccaacctccgagcagtacatgctaagacttcaccagtcaaagcgaactactatactcaattgatccaataacttgaccaacggaacaagttaccctagggataacagcgcaatcctattctagagtccatatcaacaatagggtttacgacctcgatgttggatcaggacatcccgatggtgcagccgctattaaaggttcgtttgttcaacgattaaagtcctacgtgatctgagttcagaccggagtaatccaggtcggtttctatctacnttcaaattcctccctgtacgaaaggacaagagaaataaggcctacttcacaaagcgccttcccccgtaaatgatatcatctcaacttagtattatacccacacccacccaagaacagggtttgttaagatggcagagcccggtaatcgcataaaacttaaaactttacagtcagaggttcaattcctcttcttaacaacatacccatggccaacctcctactcctcattgtacccattctaatcgcaatggcattcctaatgcttaccgaacgaaaaattctaggctatatacaactacgcaaaggccccaacgttgtaggcccctacgggctactacaacccttcgctgacgccataaaactcttcaccaaagagcccctaaaacccgccacatctaccatcaccctctacatcaccgccccgaccttagctctcaccatcgctcttctactatgaacccccctccccatacccaaccccctggtcaacctcaacctaggcctcctatttattctagccacctctagcctagccgtttactcaatcctctgatcagggtgagcatcaaactcaaactacgccctgatcggcgcactgcgagcagtagcccaaacaatctcatatgaagtcaccctagccatcattctactatcaacattactaataagtggctcctttaacctctccacccttatcacaacacaagaacacctctgattactcctgccatcatgacccttggccataatatgatttatctccacactagcagagaccaaccgaacccccttcgaccttgccgaaggggagtccgaactagtctcaggcttcaacatcgaatacgccgcaggccccttcgccctattcttcatagccgaatacacaaacattattataataaacaccctcaccactacaatcttcctaggaacaacatatgacgcactctcccctgaactctacacaacatattttgtcaccaagaccctacttctaacctccctgttcttatgaattcgaacagcatacccccgattccgctacgaccaactcatacacctcctatgaaaaaacttcctaccactcaccctagcattacttatatgatatgtctccatacccattacaatctccagcattccccctcaaacctaagaaatatgtctgataaaagagttactttgatagagtaaataataggagcttaaacccccttatttctaggactatgagaatcgaacccatccctgagaatccaaaattctccgtgccacctatcacaccccatcctaaagtaaggtcagctaaataagctatcgggcccataccccgaaaatgttggttatacccttcccgtactaattaatcccctggcccaacccgtcatctactctaccatctttgcaggcacactcatcacagcgctaagctcgcactgattttttacctgagtaggcctagaaataaacatgctagcttttattccagttctaaccaaaaaaataaaccctcgttccacagaagctgccatcaagtatttcctcacgcaagcaaccgcatccataatccttctaatagctatcctcttcaacaatatactctccggacaatgaaccataaccaatactaccaatcaatactcatcattaataatcataatggctatagcaataaaactaggaatagccccctttcacttctgagtcccagaggttacccaaggcacccctctgacatccggcctgcttcttctcacatgacaaaaactagcccccatctcaatcatataccaaatctctccctcactaaacgtaagccttctcctcactctctcaatcttatccatcatagcaggcagttgaggtggattaaaccaaacccagctacgcaaaatcttagcatactcctcaattacccacataggatgaataatagcagttctaccgtacaaccctaacataaccattcttaatttaactatttatattatcctaactactaccgcattcctactactcaacttaaactccagcaccacgaccctactactatctcgcacctgaaacaagctaacatgactaacacccttaattccatccaccctcctctccctaggaggcctgcccccgctaaccggctttttgcccaaatgggccattatcgaagaattcacaaaaaacaatagcctcatcatccccaccatcatagccaccatcaccctccttaacctctacttctacctacgcctaatctactccacctcaatcacactactccccatatctaacaacgtaaaaataaaatgacagtttgaacatacaaaacccaccccattcctccccacactcatcgcccttaccacgctactcctacctatctccccttttatactaataatcttatagaaatttaggttaaatacagaccaagagccttcaaagccctcagtaagttgcaatacttaatttctgtaacagctaaggactgcaaaaccccactctgcatcaactgaacgcaaatcagccactttaattaagctaagcccttactagaccaatgggacttaaacccacaaacacttagttaacagctaagcaccctaatcaactggcttcaatctacttctcccgccgccgggaaaaaaggcgggagaagccccggcaggtttgaagctgcttcttcgaatttgcaattcaatatgaaaatcacctcggagctggtaaaaagaggcctaacccctgtctttagatttacagtccaatgcttcactcagccattttacctcacccccactgatgttcgccgaccgttgactattctctacaaaccacaaagacattggaacactatacctattattcggcgcatgagctggagtcctaggcacagctctaagcctccttattcgagccgagctgggccagccaggcaaccttctaggtaacgaccacatctacaacgttatcgtcacagcccatgcatttgtaataatcttcttcatagtaatacccatcataatcggaggctttggcaactgactagttcccctaataatcggtgcccccgatatggcgtttccccgcataaacaacataagcttctgactcttacctccctctctcctactcctgctcgcatctgctatagtggaggccggagcaggaacaggttgaacagtctaccctcccttagcagggaactactcccaccctggagcctccgtagacctaaccatcttctccttacacctagcaggtgtctcctctatcttaggggccatcaatttcatcacaacaattatcaatataaaaccccctgccataacccaataccaaacgcccctcttcgtctgatccgtcctaatcacagcagtcctacttctcctatctctcccagtcctagctgctggcatcactatactactaacagaccgcaacctcaacaccaccttcttcgaccccgccggaggaggagaccccattctataccaacacctattctgatttttcggtcaccctgaagtttatattcttatcctaccaggcttcggaataatctcccatattgtaacttactactccggaaaaaaagaaccatttggatacataggtatggtctgagctatgatatcaattggcttcctagggtttatcgtgtgagcacaccatatatttacagtaggaatagacgtagacacacgagcatatttcacctccgctaccataatcatcgctatccccaccggcgtcaaagtatttagctgactcgccacactccacggaagcaatatgaaatgatctgctgcagtgctctgagccctaggattcatctttcttttcaccgtaggtggcctgactggcattgtattagcaaactcatcactagacatcgtactacacgacacgtactacgttgtagcccacttccactatgtcctatcaataggagctgtatttgccatcataggaggcttcattcactgatttcccctattctcaggctacaccctagaccaaacctacgccaaaatccatttcactatcatattcatcggcgtaaatctaactttcttcccacaacactttctcggcctatccggaatgccccgacgttactcggactaccccgatgcatacaccacatgaaacatcctatcatctgtaggctcattcatttctctaacagcagtaatattaataattttcatgatttgagaagccttcgcttcgaagcgaaaagtcctaatagtagaagaaccctccataaacctggagtgactatatggatgccccccaccctaccacacattcgaagaacccgtatacataaaatctagacaaaaaaggaaggaatcgaaccccccaaagctggtttcaagccaaccccatggcctccatgactttttcaaaaaggtattagaaaaaccatttcataactttgtcaaagttaaattataggctaaatcctatatatcttaatggcacatgcagcgcaagtaggtctacaagacgctacttcccctatcatagaagagcttatcacctttcatgatcacgccctcataatcattttccttatctgcttcctagtcctgtatgcccttttcctaacactcacaacaaaactaactaatactaacatctcagacgctcaggaaatagaaaccgtctgaactatcctgcccgccatcatcctagtcctcatcgccctcccatccctacgcatcctttacataacagacgaggtcaacgatccctcccttaccatcaaatcaattggccaccaatggtactgaacctacgagtacaccgactacggcggactaatcttcaactcctacatacttcccccattattcctagaaccaggcgacctgcgactccttgacgttgacaatcgagtagtactcccgattgaagcccccattcgtataataattacatcacaagacgtcttgcactcatgagctgtccccacattaggcttaaaaacagatgcaattcccggacgtctaaaccaaaccactttcaccgctacacgaccgggggtatactacggtcaatgctctgaaatctgtggagcaaaccacagtttcatgcccatcgtcctagaattaattcccctaaaaatctttgaaatagggcccgtatttaccctatagcaccccctctaccccctctagagcccactgtaaagctaacttagcattaaccttttaagttaaagattaagagaaccaacacctctttacagtgaaatgccccaactaaatactaccgtatggcccaccataattacccccatactccttacactattcctcatcacccaactaaaaatattaaacacaaactaccacctacctccctcaccaaagcccataaaaataaaaaattataacaaaccctgagaaccaaaatgaacgaaaatctgttcgcttcattcattgcccccacaatcctaggcctacccgccgcagtactgatcattctatttccccctctattgatccccacctccaaatatctcatcaacaaccgactaatcaccacccaacaatgactaatcaaactaacctcaaaacaaatgataaccatacacaacactaaaggacgaacctgatctcttatactagtatccttaatcatttttattgccacaactaacctcctcggactcctgcctcactcatttacaccaaccacccaactatctataaacctagccatggccatccccttatgagcgggcgcagtgattataggctttcgctctaagattaaaaatgccctagcccacttcttaccacaaggcacacctacaccccttatccccatactagttattatcgaaaccatcagcctactcattcaaccaatagccctggccgtacgcctaaccgctaacattactgcaggccacctactcatgcacctaattggaagcgccaccctagcaatatcaaccattaaccttccctctacacttatcatcttcacaattctaattctactgactattctagaaatcgctgtcgccttaatccaagcctacgttttcacacttctagtaagcctctacctgcacgacaacacataatgacccaccaatcacatgcctatcatatagtaaaacccagcccatgacccctaacaggggccctctcagccctcctaatgacctccggcctagccatgtgatttcacttccactccataacgctcctcatactaggcctactaaccaacacactaaccatataccaatgatggcgcgatgtaacacgagaaagcacataccaaggccaccacacaccacctgtccaaaaaggccttcgatacgggataatcctatttattacctcagaagtttttttcttcgcaggatttttctgagccttttaccactccagcctagcccctaccccccaattaggagggcactggcccccaacaggcatcaccccgctaaatcccctagaagtcccactcctaaacacatccgtattactcgcatcaggagtatcaatcacctgagctcaccatagtctaatagaaaacaaccgaaaccaaataattcaagcactgcttattacaattttactgggtctctattttaccctcctacaagcctcagagtacttcgagtctcccttcaccatttccgacggcatctacggctcaacattttttgtagccacaggcttccacggacttcacgtcattattggctcaactttcctcactatctgcttcatccgccaactaatatttcactttacatccaaacatcactttggcttcgaagccgccgcctgatactggcattttgtagatgtggtttgactatttctgtatgtctccatctattgatgagggtcttactcttttagtataaatagtaccgttaacttccaattaactagttttgacaacattcaaaaaagagtaataaacttcgccttaattttaataatcaacaccctcctagccttactactaataattattacattttgactaccacaactcaacggctacatagaaaaatccaccccttacgagtgcggcttcgaccctatatcccccgcccgcgtccctttctccataaaattcttcttagtagctattaccttcttattatttgatctagaaattgccctccttttacccctaccatgagccctacaaacaactaacctgccactaatagttatgtcatccctcttattaatcatcatcctagccctaagtctggcctatgagtgactacaaaaaggattagattgaaccgaattggtatatagtttaaacaaaacgaatgatttcgactcattaaattatgataatcatatttaccaaatgcccctcatttacataaatattatactagcatttaccatctcacttctaggaatactagtatatcgctcacacctcatatcctccctactatgcctagaaggaataatactatcgctgttcattatagctactctcataaccctcaacacccactccctcttagccaatattgtgcctattgccatactagtctttgccgcctgcgaagcagcggtgggcctagccctactagtctcaatctccaacacatatggcctagactacgtacataacctaaacctactccaatgctaaaactaatcgtcccaacaattatattactaccactgacatgactttccaaaaaacacataatttgaatcaacacaaccacccacagcctaattattagcatcatccctctactattttttaaccaaatcaacaacaacctatttagctgttccccaaccttttcctccgaccccctaacaacccccctcctaatactaactacctgactcctacccctcacaatcatggcaagccaacgccacttatccagtgaaccactatcacgaaaaaaactctacctctctatactaatctccctacaaatctccttaattataacattcacagccacagaactaatcatattttatatcttcttcgaaaccacacttatccccaccttggctatcatcacccgatgaggcaaccagccagaacgcctgaacgcaggcacatacttcctattctacaccctagtaggctcccttcccctactcatcgcactaatttacactcacaacaccctaggctcactaaacattctactactcactctcactgcccaagaactatcaaactcctgagccaacaacttaatatgactagcttacacaatagcttttatagtaaagatacctctttacggactccacttatgactccctaaagcccatgtcgaagcccccatcgctgggtcaatagtacttgccgcagtactcttaaaactaggcggctatggtataatacgcctcacactcattctcaaccccctgacaaaacacatagcctaccccttccttgtactatccctatgaggcataattataacaagctccatctgcctacgacaaacagacctaaaatcgctcattgcatactcttcaatcagccacatagccctcgtagtaacagccattctcatccaaaccccctgaagcttcaccggcgcagtcattctcataatcgcccacgggcttacatcctcattactattctgcctagcaaactcaaactacgaacgcactcacagtcgcatcataatcctctctcaaggacttcaaactctactcccactaatagctttttgatgacttctagcaagcctcgctaacctcgccttaccccccactattaacctactgggagaactctctgtgctagtaaccacgttctcctgatcaaatatcactctcctacttacaggactcaacatactagtcacagccctatactccctctacatatttaccacaacacaatggggctcactcacccaccacattaacaacataaaaccctcattcacacgagaaaacaccctcatgttcatacacctatcccccattctcctcctatccctcaaccccgacatcattaccgggttttcctcttgtaaatatagtttaaccaaaacatcagattgtgaatctgacaacagaggcttacgaccccttatttaccgagaaagctcacaagaactgctaactcatgcccccatgtctaacaacatggctttctcaacttttaaaggataacagctatccattggtcttaggccccaaaaattttggtgcaactccaaataaaagtaataaccatgcacactactataaccaccctaaccctgacttccctaattccccccatccttaccaccctcgttaaccctaacaaaaaaaactcatacccccattatgtaaaatccattgtcgcatccacctttattatcagtctcttccccacaacaatattcatgtgcctagaccaagaagttattatctcgaactgacactgagccacaacccaaacaacccagctctccctaagcttcaaactagactacttctccataatattcatccctgtagcattgttcgttacatggtccatcatagaattctcactgtgatatataaactcagacccaaacattaatcagttcttcaaatatctactcatcttcctaattaccatactaatcttagttaccgctaacaacctattccaactgttcatcggctgagagggcgtaggaattatatccttcttgctcatcagttgatgatacgcccgagcagatgccaacacagcagccattcaagcaatcctatacaaccgtatcggcgatatcggtttcatcctcgccttagcatgatttatcctacactccaactcatgagacccacaacaaatagcccttctaaacgctaatccaagcctcaccccactactaggcctcctcctagcagcagcaggcaaatcagcccaattaggtctccacccctgactcccctcagccatagaaggccccaccccagtctcagccctactccactcaagcactatagttgtagcaggaatcttcttactcatccgcttccaccccctagcagaaaatagcccactaatccaaactctaacactatgcttaggcgctatcaccactctgttcgcagcagtctgcgcccttacacaaaatgacatcaaaaaaatcgtagccttctccacttcaagtcaactaggactcataatagttacaatcggcatcaaccaaccacacctagcattcctgcacatctgtacccacgccttcttcaaagccatactatttatgtgctccgggtccatcatccacaaccttaacaatgaacaagatattcgaaaaataggaggactactcaaaaccatacctctcacttcaacctccctcaccattggcagcctagcattagcaggaatacctttcctcacaggtttctactccaaagaccacatcatcgaaaccgcaaacatatcatacacaaacgcctgagccctatctattactctcatcgctacctccctgacaagcgcctatagcactcgaataattcttctcaccctaacaggtcaacctcgcttccccacccttactaacattaacgaaaataaccccaccctactaaaccccattaaacgcctggcagccggaagcctattcgcaggatttctcattactaacaacatttcccccgcatcccccttccaaacaacaatccccctctacctaaaactcacagccctcgctgtcactttcctaggacttctaacagccctagacctcaactacctaaccaacaaacttaaaataaaatccccactatgcacattttatttctccaacatactcggattctaccctagcatcacacaccgcacaatcccctatctaggccttcttacgagccaaaacctgcccctactcctcctagacctaacctgactagaaaagctattacctaaaacaatttcacagcaccaaatctccacctccatcatcacctcaacccaaaaaggcataattaaactttacttcctctctttcttcttcccactcatcctaaccctactcctaatcacataacctattcccccgagcaatctcaattacaatatatacaccaacaaacaatgttcaaccagtaactactactaatcaacgcccataatcatacaaagcccccgcaccaataggatcctcccgaatcaaccctgacccctctccttcataaattattcagcttcctacactattaaagtttaccacaaccaccaccccatcatactctttcacccacagcaccaatcctacctccatcgctaaccccactaaaacactcaccaagacctcaacccctgacccccatgcctcaggatactcctcaatagccatcgctgtagtatatccaaagacaaccatcattccccctaaataaattaaaaaaactattaaacccatataacctcccccaaaattcagaataataacacacccgaccacaccgctaacaatcaatactaaacccccataaataggagaaggcttagaagaaaaccccacaaaccccattactaaacccacactcaacagaaacaaagcatacatcattattctcgcacggactacaaccacgaccaatgatatgaaaaaccatcgttgtatttcaactacaagaacaccaatgaccccaatacgcaaaactaaccccctaataaaattaattaaccactcattcatcgacctccccaccccatccaacatctccgcatgatgaaacttcggctcactccttggcgcctgcctgatcctccaaatcaccacaggactattcctagccatgcactactcaccagacgcctcaaccgccttttcatcaatcgcccacatcactcgagacgtaaattatggctgaatcatccgctaccttcacgccaatggcgcctcaatattctttatctgcctcttcctacacatcgggcgaggcctatattacggatcatttctctactcagaaacctgaaacatcggcattatcctcctgcttgcaactatagcaacagccttcataggctatgtcctcccgtgaggccaaatatcattctgaggggccacagtaattacaaacttactatccgccatcccatacattgggacagacctagttcaatgaatctgaggaggctactcagtagacagtcccaccctcacacgattctttacctttcacttcatcttgcccttcattattgcagccctagcagcactccacctcctattcttgcacgaaacgggatcaaacaaccccctaggaatcacctcccattccgataaaatcaccttccacccttactacacaatcaaagacgccctcggcttacttctcttccttctctccttaatgacattaacactattctcaccagacctcctaggcgacccagacaattataccctagccaaccccttaaacacccctccccacatcaagcccgaatgatatttcctattcgcctacacaattctccgatccgtccctaacaaactaggaggcgtccttgccctattactatccatcctcatcctagcaataatccccatcctccatatatccaaacaacaaagcataatatttcgcccactaagccaatcactttattgactcctagccgcagacctcctcattctaacctgaatcggaggacaaccagtaagctacccttttaccatcattggacaagtagcatccgtactatacttcacaacaatcctaatcctaataccaactatctccctaattgaaaacaaaatactcaaatgggcctgtccttgtagtataaactaatacaccagtcttgtaaaccggagatgaaaacctttttccaaggacaaatcagagaaaaagtctttaactccaccattagcacccaaagctaagattctaatttaaactattctctgttctttcatggggaagcagatttgggtaccacccaagtattgactcacccatcaacaaccgctatgtatttcgtacattactgccagccaccatgaatattgtacggtaccacaaatacttgaccacctgtagtacataaaaacccaatccacatcaaaaccccctccccatgcttacaagcaagtacagcaatcaaccctcaactatcacacatcaactgcaactccaaagccacccctcacccactaggataccaacaaacctacccactcttaacagtacatagtacataaagccatttaccgtacatagcacattacagtcaaatcccttctcgtccccatggatgacccccctcagataggggtcccttgaccaccatcctccgtgaaatcaatatcccgcacaagagtgctactctcctcgctccgggcccataacacttgggggtagctaaagtgaactgtatccgacatctggttcctacttcagggccataaagcctaaatagcccacacgttccccttaaataagacatcacgatg

SEQ ID NO: 272 - DNA, 16570 bp, Homo sapiens mitochondrial
  3108: "n" refers to a nucleotide at position 3107 of the Cambridge Reference Sequence (CRS, Anderson et al. 1981 Nature 290:457-465), later determined to be absent from the human mtDNA sequence according to the revised CRS (rCRS, Andrews et al. 1999 Nature Genetics 23:147); "n" therefore represents a single nucleotide deletion at a position corresponding to nucleotide 3107 of SEQ ID NO:1 as provided herein.
gatcacaggtctatcaccctattaaccactcacgggagctctccatgcatttggtattttcgtctggggggtgtgcacgcgatagcattgcgagacgctggagccggagcaccctatgtcgcagtatctgtctttgattcctgcctcattctattatttatcgcacctacgttcaatattacaggcgaacatacttactaaagtgtgttaattaattaatgcttgtaggacataataataacaattgaatgtctgcacagccgctttccacacagacatcataacaaaaaatttccaccaaaccccccctcccccgccttctggccacagcacttaaacacatctctgccaaaccccaaaaacaaagaaccctaacaccagcctaaccagatttcaaattttatcttttggcggtatgcacttttaacagtcaccccccaactaacacattattttcccctcccactcccatactactaatctcatcaatacaacccccgcccatcctacccagcacacacacaccgctgctaaccccataccccgaaccaaccaaaccccaaagacaccccccacagtttatgtagcttacctcctcaaagcaatacactgaaaatgtttagacgggctcacatcaccccataaacaaataggtttggtcctagcctttctattagctcttagtaagattacacatgcaagcatccccgttccagtgagttcaccctctaaatcaccacgatcaaaagggacaagcatcaagcacgcagcaatgcagctcaaaacgcttagcctagccacacccccacgggaaacagcagtgattaacctttagcaataaacgaaagtttaactaagctatactaaccccagggttggtcaatttcgtgccagccaccgcggtcacacgattaacccaagtcaatagaagccggcgtaaagagtgttttagatcaccccctccccaataaagctaaaactcacctgagttgtaaaaaactccagttgacacaaaatagactacgaaagtggctttaacatatctgaacacacaatagctaagacccaaactgggattagataccccactatgcttagccctaaacctcaacagttaaatcaacaaaactgctcgccagaacactacgagccacagcttaaaactcaaaggacctggcggtgcttcatatccctctagaggagcctgttctgtaatcgataaaccccgatcaacctcaccacctcttgctcagcctatataccgccatcttcagcaaaccctgatgaaggctacaaagtaagcgcaagtacccacgtaaagacgttaggtcaaggtgtagcccatgaggtggcaagaaatgggctacattttctaccccagaaaactacgatagcccttatgaaacttaagggtcgaaggtggatttagcagtaaactgagagtagagtgcttagttgaacagggccctgaagcgcgtacacaccgcccgtcaccctcctcaagtatacttcaaaggacatttaactaaaacccctacgcatttatatagaggagacaagtcgtaacatggtaagtgtactggaaagtgcacttggacgaaccagagtgtagcttaacacaaagcacccaacttacacttaggagatttcaacttaacttgaccgctctgagctaaacctagccccaaacccactccaccttactaccagacaaccttagccaaaccatttacccaaataaagtataggcgatagaaattgaaacctggcgcaatagatatagtaccgcaagggaaagatgaaaaattatagccaagcataatatagcaaggactaacccctataccttctgcataatgaattaactagaaataactttgcaaggagagccaaagctaagacccccgaaaccagacgagctacctaagaacagctaaaagagcacacccgtctatgtagcaaaatagtgggaagatttataggtagaggcgacaaacctaccgagcctggtgatagctggttgtccaagatagaatcttagttcaactttaaatttgcccacagaaccctctaaatccccttgtaaatttaactgttagtccaaagaggaacagctctttggacactaggaaaaaaccttgtagagagagtaaaaaatttaacacccatagtaggcctaaaagcagccaccaattaagaaagcgttcaagctcaacacccactacctaaaaaatcccaaacatataactgaactcctcacacccaattggaccaatctatcaccctatagaagagctaatgttagtataagtaacatgaaaacattctcctccgcataagcctgcgtcagattaaaacactgaactgacaattaacagcccaatatctacaatcaaccaacaagtcattattaccctcactgtcaacccaacacaggcatgctcataaggaaaggttaaaaaaagtaaaaggaactcggcaaatcttaccccgcctgtttaccaaaaacatcacctctagcatcaccagtattagaggcaccgcctgcccagtgacacatgtttaacggccgcggtaccctaaccgtgcaaaggtagcataatcacttgttccttaaatagggacctgtatgaatggctccacgagggttcagctgtctcttacttttaaccagtgaaattgacctgcccgtgaagaggcgggcatgacacagcaagacgagaagaccctatggagctttaatttattaatgcaaacagtacctaacaaacccacaggtcctaaactaccaaacctgcattaaaaatttcggttggggcgacctcggagcagaacccaacctccgagcagtacatgctaagacttcaccagtcaaagcgaactactatactcaattgatccaataacttgaccaacggaacaagttaccctagggataacagcgcaatcctattctagagtccatatcaacaatagggtttacgacctcgatgttggatcaggacatcccaatggtgcagccgctattaaaggttcgtttgttcaacgattaaagtcctacgtgatctgagttcagaccggagtaatccaggtcggtttctatctacnttcaaattcctccctgtacgaaaggacaagagaaataaggcctacttcacaaagcgccttcccccgtaaatgatatcatctcaacttagtattatacccacacccacccaagaacagggtttgttaagatggcagagcccggtaatcgcataaaacttaaaactttacagtcagaggttcaattcctcttcttaacaacatacccatggccaacctcctactcctcattgtacccattctaatcgcaatggcattcctaatgcttaccgaacgaaaaattctaggctatatacaactacgcaaaggccccaacgttgtaggcccctacgggctactacaacccttcgctgacgccataaaactcttcaccaaagagcccctaaaacccgccacatctaccatcaccctctacatcaccgccccgaccttagctctcaccatcgctcttctactatgaacccccctccccatacccaaccccctggtcaacctcaacctaggcctcctatttattctagccacctctagcctagccgtttactcaatcctctgatcagggtgagcatcaaactcaaactacgccctgatcggcgcactgcgagcagtagcccaaacaatctcatatgaagtcaccctagccatcattctactatcaacattactaataagtggctcctttaacctctccacccttatcacaacacaagaacacctctgattactcctgccatcatgacccttggccataatatgatttatctccacactagcagagaccaaccgaacccccttcgaccttgccgaaggggagtccgaactagtctcaggcttcaacatcgaatacgccgcaggccccttcgccctattcttcatagccgaatacacaaacattattataataaacaccctcaccactacaatcttcctaggaacaacatatgacgcactctcccctgaactctacacaacatattttgtcaccaagaccctacttctaacctccctgttcttatgaattcgaacagcatacccccgattccgctacgaccaactcatacacctcctatgaaaaaacttcctaccactcaccctagcattacttatatgatatgtctccatacccattacaatctccagcattccccctcaaacctaagaaatatgtctgataaaagagttactttgatagagtaaataataggagcttaaacccccttatttctaggactatgagaatcgaacccatccctgagaatccaaaattctccgtgccacctatcacaccccatcctaaagtaaggtcagctaaataagctatcgggcccataccccgaaaatgttggttatacccttcccgtactaattaatcccctggcccaacccgtcatctactctaccatctttgcaggcacactcatcacagcgctaagctcgcactgattttttacctgagtaggcctagaaataaacatgctagcttttattccagttctaaccaaaaaaataaaccctcgttccacagaagctgccatcaagtatttcctcacgcaagcaaccgcatccataatccttctaatagctatcctcttcaacaacatactctccggacaatgaaccataaccaatactaccaatcaatactcatcattaataatcataatggctatagcaataaaactaggaatagccccctttcacttctgagtcccagaggttacccaaggcacccctctgacatccggcctgcttcttctcacatgacaaaaactagcccccatctcaatcatataccaaatctctccctcactaaacgtaagccttctcctcactctctcaatcttatccatcatagcaggcagttgaggtggattaaaccaaacccagctacgcaaaatcttagcatactcctcaattacccacataggatgaataatagcagttctaccgtacaaccctaacataaccattcttaatttaactatttatattatcctaactactaccgcattcctactactcaacttaaactccagcaccacgaccctactactatctcgcacctgaaacaagctaacatgactaacacccttaattccatccaccctcctctccctaggaggcctgcccccgctaaccggctttttgcccaaatgggccattatcgaagaattcacaaaaaacaatagcctcatcatccccaccatcatagccaccatcaccctccttaacctctacttctacctacgcctaatctactccacctcaatcacactactccccatatctaacaacgtaaaaataaaatgacagtttgaacatacaaaacccaccccattcctccccacactcatcgcccttaccacgctactcctacctatctccccttttatactaataatcttatagaaatttaggttaaatacagaccaagagccttcaaagccctcagtaagttgcaatacttaatttctgtaacagctaaggactgcaaaaccccactctgcatcaactgaacgcaaatcagccactttaattaagctaagcccttactagaccaatgggacttaaacccacaaacacttagttaacagctaagcaccctaatcaactggcttcaatctacttctcccgccgccgggaaaaaaggcgggagaagccccggcaggtttgaagctgcttcttcgaatttgcaattcaatatgaaaatcacctcggagctggtaaaaagaggcctaacccctgtctttagatttacagtccaatgcttcactcagccattttacctcacccccactgatgttcgccgaccgttgactattctctacaaaccacaaagacattggaacactatacctattattcggcgcatgagctggagtcctaggcacagctctaagcctccttattcgagccgagctgggccagccaggcaaccttctaggtaacgaccacatctacaacgttatcgtcacagcccatgcatttgtaataatcttcttcatagtaatacccatcataatcggaggctttggcaactgactagttcccctaataatcggtgcccccgatatggcgtttccccgcataaacaacataagcttctgactcttacctccctctctcctactcctgctcgcatctgctatagtggaggccggagcaggaacaggttgaacagtctaccctcccttagcagggaactactcccaccctggagcctccgtagacctaaccatcttctccttacacctagcaggtgtctcctctatcttaggggccatcaatttcatcacaacaattatcaatataaaaccccctgccataacccaataccaaacgcccctcttcgtctgatccgtcctaatcacagcagtcctacttctcctatctctcccagtcctagctgctggtatcactatactactaacagaccgcaacctcaacaccaccttcttcgaccccgccggaggaggagaccccattctataccaacacctattctgatttttcggtcaccctgaagtttatattcttatcctaccaggcttcggaataatctcccatattgtaacttactactccggaaaaaaagaaccatttggatacataggtatggtctgagctatgatatcaattggcttcctagggtttatcgtgtgagcacaccatatatttacagtaggaatagacgtagacacacgagcatatttcacctccgctaccataatcatcgctatccccaccggcgtcaaagtatttagctgactcgccacactccacggaagcaatatgaaatgatctgctgcagtgctctgagccctaggattcatctttcttttcaccgtaggtggcctgactggcattgtattagcaaactcatcactagacatcgtactacacgacacgtactacgttgtagctcacttccactatgtcctatcaataggagctgtatttgccatcataggaggcttcattcactgatttcccctattctcaggctacaccctagaccaaacctacgccaaaatccatttcactatcatattcatcggcgtaaatctaactttcttcccacaacactttctcggcctatccggaatgccccgacgttactcggactaccccgatgcatacaccacatgaaacatcctatcatctgtaggctcattcatttctctaacagcagtaatattaataattttcatgatttgagaagccttcgcttcgaagcgaaaagtcctaatagtagaagaaccctccataaacctggagtgactatatggatgccccccaccctaccacacattcgaagaacccgtatacataaaatctagacaaaaaaggaaggaatcgaaccccccaaagctggtttcaagccaaccccatggcctccatgactttttcaaaaaggtattagaaaaaccatttcataactttgtcaaagttaaattataggctaaatcctatatatcttaatggcacatgcagcgcaagtaggtctacaagacgctacttcccctatcatagaagagcttatcacctttcatgatcacgccctcataatcattttccttatctgcttcctagtcctgtatgcccttttcctaacactcacaacaaaactaactaatactaacatctcagacgctcaggaaatagaaaccgtctgaactatcctgcccgccatcatcctagtcctcatcgccctcccatccctacgcatcctttacataacagacgaggtcaacgatccctcccttaccatcaaatcaattggccaccaatggtactgaacctacgagtacaccgactacggcggactaatcttcaactcctacatacttcccccattattcctagaaccaggcgacctgcgactccttgacgttgacaatcgagtagtactcccgattgaagcccccattcgtataataattacatcacaagacgtcttgcactcatgagctgtccccacattaggcttaaaaacagatgcaattcccggacgtctaaaccaaaccactttcaccgctacacgaccgggggtatactacggtcaatgctctgaaatctgtggagcaaaccacagtttcatgcccatcgtcctagaattaattcccctaaaaatctttgaaatagggcccgtatttaccctatagcaccccctctaccccctctagagcccactgtaaagctaacttagcattaaccttttaagttaaagattaagagaaccaacacctctttacagtgaaatgccccaactaaatactaccgtatggcccaccataattacccccatactccttacactattcctcatcacccaactaaaaatattaaacacaaactaccacctacctccctcaccaaagcccataaaaataaaaaattataacaaaccctgagaaccaaaatgaacgaaaatctgttcgcttcattcattgcccccacaatcctaggcctacccgccgcagtactgatcattctatttccccctctattgatccccacctccaaatatctcatcaacaaccgactaatcaccacccaacaatgactaatcaaactaacctcaaaacaaatgataaccatacacaacactaaaggacgaacctgatctcttatactagtatccttaatcatttttattgccacaactaacctcctcggactcctgcctcactcatttacaccaaccacccaactatctataaacctagccatggccatccccttatgagcgggcgcagtgattataggctttcgctctaagattaaaaatgccctagcccacttcttaccacaaggcacacctacaccccttatccccatactagttattatcgaaaccatcagcctactcattcaaccaatagccctggccgtacgcctaaccgctaacattactgcaggccacctactcatgcacctaattggaagcgccaccctagcaatatcaaccattaaccttccctctacacttatcatcttcacaattctaattctactgactatcctagaaatcgctgtcgccttaatccaagcctacgttttcacacttctagtaagcctctacctgcacgacaacacataatgacccaccaatcacatgcctatcatatagtaaaacccagcccatgacccctaacaggagccctctcagccctcctaatgacctccggcctagccatgtgatttcacttccactccataacgctcctcatactaggcctactaaccaacacactaaccatataccaatgatggcgcgatgtaacacgagaaagcacataccaaggccaccacacaccacctgtccaaaaaggccttcgatacgggataatcctatttattacctcagaagtttttttcttcgcaggatttttctgagccttttaccactccagcctagcccctaccccccaattaggagggcactggcccccaacaggcatcaccccgctaaatcccctagaagtcccactcctaaacacatccgtattactcgcatcaggagtatcaatcacctgagctcaccatagtctaatagaaaacaaccgaaaccaaataattcaagcactgcttattacaattttactgggtctctattttaccctcctacaagcctcagagtacttcgagtctcccttcaccatttccgacggcatctacggctcaacattttttgtagccacaggcttccacggacttcacgtcattattggctcaactttcctcactatctgcttcatccgccaactaatatttcactttacatccaaacatcactttggcttcgaagccgccgcctgatactggcattttgtagatgtggtttgactatttctgtatgtctccatctattgatgagggtcttactcttttagtataaatagtaccgttaacttccaattaactagttttgacaacattcaaaaaagagtaataaacttcgccttaattttaataatcaacaccctcctagccttactactaataattattacattttgactaccacaactcaacggctacatagaaaaatccaccccttacgagtgcggcttcgaccctatatcccccgcccgcgtccctttctccataaaattcttcttagtagctattaccttcttattatttgatctagaaattgccctccttttacccctaccatgagccctacaaacaactaacctgccactaatagttatgtcatccctcttattaatcatcatcctagccctaagtctggcctatgagtgactacaaaaaggattagactgaaccgaattggtatatagtttaaacaaaacgaatgatttcgactcattaaattatgataatcatatttaccaaatgcccctcatttacataaatattatactagcatttgccatctcacttctaggaatactagtatatcgctcacacctcatatcctccctactatgcctagaaggaataatactatcgctgttcattatagctactctcataaccctcaacacccactccctcttagccaatattgtgcctattgccatactagtctttgccgcctgcgaagcagcggtgggcctagccctactagtctcaatctccaacacatacggcctagactacgtacataacctaaacctactccaatgctaaaactaatcgtcccaacaattatattactaccactgacatgactttccaaaaaacacataatttgaatcaacacaaccacccacagcctaattattagcatcatccctctactattttttaaccaaatcaacaacaacctatttagctgttccccaaccttttcctccgaccccctaacaacccccctcctaatactaactacctgactcctacccctcacaatcatggcaagccaacgccacttatccagtgaaccactatcacgaaaaaaactctacctctctatactaatctccctacaaatctccttaattataacattcacagccacagaactaatcatattttatatcttcttcgaaaccacacttatccccaccttggctatcatcacccgatgaggcaaccagccagaacgcctgaacgcaggcacatacttcctattctacaccctagtaggctcccttcccctactcatcgcactaatttacactcacaacaccctaggctcactaaacattctactactcactctcactgcccaagaactatcaaactcctgagccaacaacttaatatgactagcttacacaatagcttttatagtaaagatacctctttacggactccacttatgactccctaaagcccatgtcgaagcccccatcgctgggtcaatagtacttgccgcagtactcttgaaactaggcggctatggtataatacgcctcacactcattctcaaccccctgacaaaacacatagcctaccccttccttgtactatccctatgaggcataattataacaagctccatctgcctacgacaaacagacctaaaatcgctcattgcatactcttcaatcagccacatagccctcgtagtaacagccattctcatccaaaccccctgaagcttcaccggcgcagtcattctcataatcgcccacggacttacatcctcattactattctgcctagcaaactcaaactacgaacgcactcacagtcgcatcataatcctctctcaaggacttcaaactctactcccactaatagctttttgatgacttctagcaagcctcgctaacctcgccttaccccccactattaacctactgggagaactctctgtgctagtaaccacgttctcctgatcaaatatcactctcctacttacaggactcaacatactagtcacagccctatactccctctacatatttaccacaacacaatggggctcactcacccaccacattaacaacataaaaccctcattcacacgagaaaacaccctcatgttcatacacctatcccccattctcctcctatccctcaaccccgacatcattaccgggttttcctcttgtaaatatagtttaaccaaaacatcagattgtgaatctgacaacagaggcttacgaccccttatttaccgagaaagctcacaagaactgctaactcatgcccccatgtctaacaacatggctttctcaacttttaaaggataacagctatccattggtcttaggccccaagaattttggtgcaactccaaataaaagtaataaccatgcacactactataaccaccctaaccctaacttccctaattccccccatccttaccaccctcgttaaccctaacaaaaaaaactcatacccccattatgtaaaatccattgtcgcatccacctttattatcagtctcttccccacaacaatattcatgtgcctagaccaagaagttattatctcgaactgacactgagccacaacccaaacaacccagctctccctaagcttcaaactagactacttctccataatattcatccctgtagcattgttcgttacatggtccatcatagaattctcactgtgatatataaactcagacccaaacattaatcagttcttcaaatatctactcatcttcctaattaccatactaatcttagttaccgctaacaacctattccaactgttcatcggctgagagggcgtaggaattatatccttcttgctcatcagttgatgatacgcccgagcagatgccaacacagcagccattcaagcaatcctatacaaccgtatcggcgatatcggtttcatcctcgccttagcatgatttatcctacactccaactcatgagacccacaacaaatagcccttctaaacgctaatccaagcctcaccccactactaggcctcctcctagcagcagcaggcaaatcagcccaattaggtctccacccctgactcccctcagccatagaaggccccaccccagtctcagccctactccactcaagcactatagttgtagcaggaatcttcttactcatccgcttccaccccctagcagaaaatagcccactaatccaaactctaacactatgcttaggcgctatcaccactctgttcgcagcagtctgcgcccttacacaaaatgacatcaaaaaaatcgtagccttctccacttcaagtcaactaggactcataatagttacaatcggcatcaaccaaccacacctagcattcctgcacatctgtacccacgccttcttcaaagccatactatttatgtgctccgggtccatcatccacaaccttaacaatgaacaagatattcgaaaaataggaggactactcaaaaccatacctctcacttcaacctccctcaccattggcagcctagcattagcaggaatacctttcctcacaggtttctactccaaagaccacatcatcgaaaccgcaaacatatcatacacaaacgcctgagccctatctattactctcatcgctacctccctgacaagcgcctatagcactcgaataattcttctcaccctaacaggtcaacctcgcttccccacccttactaacattaacgaaaataaccccaccctactaaaccccattaaacgcctggcagccggaagcctattcgcaggatttctcattactaacaacatttcccccgcatcccccttccaaacaacaatccccctctacctaaaactcacagccctcgctgtcactttcctaggacttctaacagccctagacctcaactacctaaccaacaaacttaaaataaaatccccactatgcacattttatttctccaacatactcggattctaccctagcatcatacaccgcacaatcccctatctaggccttcttacgagccaaaacctgcccctactcctcctagacctaacctgactagaaaagctattacctaaaacaatttcacagcaccaaatctccacctccatcatcacctcaacccaaaaaggcataattaaactttacttcctctctttcttcttcccactcatcctaaccctactcctgatcacataacctattcccccgagcaatctcaattacaatatatacaccaacaaacaatgttcaaccagtaactactactaatcaacgcccataatcatacaaagcccccgcaccaataggatcctcccgaatcaaccctgacccctctccttcataaattattcagcttcctacactattaaagtttaccacaaccaccaccccatcatactctttcacccacagcaccaatcctacctccatcgctaaccccactaaaacactcaccaagacctcaacccctgacccccatgcctcaggatactcctcaatagccatcgctgtagtatatccaaagacaaccatcattccccctaaataaattaaaaaaactattaaacccatataacctcccccaaaattcagaataataacacacccgaccacaccgctaacaatcaatactaaacccccataaataggagaaggcttagaagaaaaccccacaaaccccattactaaacccacactcaacagaaacaaagcatacatcattattctcgcacggactacaaccacgaccaatgatatgaaaaaccatcgttgtatttcaactacaagaacaccaatgaccccaatacgcaaaattaaccccctaataaaattaattaaccactcattcatcgacctccccaccccatccaacatctccgcatgatgaaacttcggctcactccttggcgcctgcctgatcctccaaatcaccacaggactattcctagccatgcactactcaccagacgcctcaaccgccttttcatcaatcgcccacatcactcgagacgtaaattatggctgaatcatccgctaccttcacgccaatggcgcctcaatattctttatctgcctcttcctacacatcgggcgaggcctatattacggatcatttctctactcagaaacctgaaacatcggcattatcctcctgcttgcaactatagcaacagccttcataggctatgtcctcccgtgaggccaaatatcattctgaggggccacagtaattacaaacttactatccgccatcccatacattgggacagacctagttcaatgaatctgaggaggctactcagtagacagtcccaccctcacacgattctttacctttcacttcatcttgcccttcattattgcagccctagcagcactccacctcctattcttgcacgaaacgggatcaaacaaccccctaggaatcacctcccattccgataaaatcaccttccacccttactacacaatcaaagacgccctcggcttacttctcttcctcctctccttaatgacattaacactattctcaccagacctcctaggcgacccagacaattataccctagccaaccccttaaacacccctccccacatcaagcccgaatgatatttcctattcgcctacacaattctccgatccgtccctaacaaactaggaggcgtccttgccctattactatccatcctcatcctagcaataatccccatcctccatatatccaaacaacaaagcataatatttcgcccactaagccaatcactttattgactcctagccacagacctcctcattctaacctgaatcggaggacaaccagtaagctacccttttaccatcattggacaagtagcatccgtactatacttcacaacaatcctaatcctaataccaactatctccctaattgaaaacaaaatactcaaatgggcctgtccttgtagtataaactaatacaccagtcttgtaaaccggagatgaaaacctttttccaaggacaaatcagagaaaaagtctttaactccaccattagcacccaaagctaagattctaatttaaactattctctgttctttcatggggaagcagatttgggtaccacccaagtattgactcacccatcaacaaccgctatgtatttcgtacattactgccagccaccatgaatattgtacggtaccataaatacttgaccacctgtagtacataaaaacccaatccacatcaaaaccccctccccatgcttacaagcaagtacagcaatcaaccctcaactatcacacatcaactgcaactccaaagccacccctcacccactaggataccaacaaacctacccacccttaacagtacatagtacataaagccatttaccgtacatagcacattgcagtcaaatcccctctcgtccccatggatgacccccctcagataggagtcccttgaccaccatcctccgtgaaatcaatatcccgcacaagagtgctactctcctcgctccgggcccataacacttgggggtagctaaagtgaactgtatccgacatctggttcctacttcagggccataaagcctaaatagcccacacgttccccttaaataagacatcacgatg

SEQ ID NO: 273 - DNA, 16574 bp, Homo sapiens mitochondrial
  3112: "n" refers to a nucleotide at position 3107 of the Cambridge Reference Sequence (CRS, Anderson et al. 1981 Nature 290:457-465), later determined to be absent from the human mtDNA sequence according to the revised CRS (rCRS, Andrews et al. 1999 Nature Genetics 23:147); "n" therefore represents a single nucleotide deletion at a position corresponding to nucleotide 3107 of SEQ ID NO:1 as provided herein.
gatcacaggtctatcaccctattaaccactcacgggagctctccatgcatttggtattttcgtctggggggtgtgcacgcgatagcattgcgagacgctggagccggagcaccctatgtcgcagtatctgtctttgattcctgcctcattctattatttatcgcacctacgttcaatattacaggcgaacatacctactaaagtgtgttaattaattaatgcttgtaggacataataataacaattgaatgtctgcacagccgctttccacacagacatcataacaaaaaatttccaccaaaccccccctcccccgccttctggccacagcacttaaacacatctctgccaaaccccaaaaacaaagaaccctaacaccagcctaaccagatttcaaattttatcttttggcggtatgcacttttaacagtcaccccccaactaacacattattttcccctcccactcccatactactaatctcatcaatacaacccccacccatcctacccagcacacacacaccacacgctgctaaccccataccccgaaccaaccaaaccccaaagacaccccccacagtttatgtagcttacctcctcaaagcaatacactgaaaatgtttagacgggctcacatcaccccataaacaaataggtttggtcctagcctttctattagctcttagtaagattacacatgcaagcatccccgttccagtgagttcaccctctaaatcaccacgatcaaaagggacaagcatcaagcacgcagcaatgcagctcaaaacgcttagcctagccacacccccacgggaaacagcagtgattaacctttagcaataaacgaaagtttaactaagctatactaaccccagggttggtcaatttcgtgccagccaccgcggtcacacgattaacccaagtcaatagaagccggcgtaaagagtgttttagatcaccccctccccaataaagctaaaactcacctgagttgtaaaaaactccagttgacacaaaatagactacgaaagtggctttaacatatctgaacacacaatagctaagacccaaactgggattagataccccactatgcttagccctaaacctcaacagttaaatcaacaaaactgctcgccagaacactacgagccacagcttaaaactcaaaggacctggcggtgcttcatatccctctagaggagcctgttctgtaatcgataaaccccgatcaacctcaccacctcttgctcagcctatataccgccatcttcagcaaaccctgatgaaggctacaaagtaagcgcaagtacccacgtaaagacgttaggtcaaggtgtagcccatgaggtggcaagaaatgggctacattttctaccccagaaaactacgatagcccttatgaaacttaagggtcgaaggtggatttagcagtaaactgagagtagagtgcttagttgaacagggccctgaagcgcgtacacaccgcccgtcaccctcctcaagtatacttcaaaggacatttaactaaaacccctacgcatttatatagaggagacaagtcgtaacatggtaagtgtactggaaagtgcacttggacgaaccagagtgtagcttaacacaaagcacccaacttacacttaggagatttcaacttaacttgaccgctctgagctaaacctagccccaaacccactccaccttactaccagacaaccttagccaaaccatttacccaaataaagtataggcgatagaaattgaaacctggcgcaatagatatagtaccgcaagggaaagatgaaaaattatagccaagcataatatagcaaggactaacccctataccttctgcataatgaattaactagaaataactttgcaaggagagccaaagctaagacccccgaaaccagacgagctacctaagaacagctaaaagagcacacccgtctatgtagcaaaatagtgggaagatttataggtagaggcgacaaacctaccgagcctggtgatagctggttgtccaagatagaatcttagttcaactttaaatttgcccacagaaccctctaaatccccttgtaaatttaactgttagtccaaagaggaacagctctttggacactaggaaaaaaccttgtagagagagtaaaaaatttaacacccatagtaggcctaaaagcagccaccaattaagaaagcgttcaagctcaacacccactacctaaaaaatcccaaacatataactgaactcctcacacccaattggaccaatctatcaccctatagaagaactaatgttagtataagtaacatgaaaacattctcctccgcataagcctgcgtcagactaaaacactgaactgacaattaacagcccaatatctacaatcaaccaacaagtcattattaccctcactgtcaacccaacacaggcatgctcataaggaaaggttaaaaaaagtaaaaggaactcggcaaatcttaccccgcctgtttaccaaaaacatcacctctagcatcaccagtattagaggcaccgcctgcccagtgacacatgtttaacggccgcggtaccctaaccgtgcaaaggtagcataatcacttgttccttaaatagggacctgtatgaatggctccacgagggttcagctgtctcttacttttaaccagtgaaattgacctgcccgtgaagaggcgggcatgacacagcaagacgagaagaccctatggagctttaatttattaatgcaaacagtacctaacaaacccacaggtcctaaactaccaaacctgcattaaaaatttcggttggggcgacctcggagcagaacccaacctccgagcagtacatgctaagacttcaccagtcaaagcgaactactatactcaattgatccaataacttgaccaacggaacaagttaccctagggataacagcgcaatcctattctagagtccatatcaacaatagggtttacgacctcgatgttggatcaggacatcccgatggtgcagccgctattaaaggttcgtttgttcaacgattaaagtcctacgtgatctgagttcagaccggagtaatccaggtcggtttctatctacnttcaaattcctccctgtacgaaaggacaagagaaataaggcctacttcacaaagcgccttcccccgtaaatgatatcatctcaacttagtattatacccacacccacccaagaacagggtttgttaagatggcagagcccggtaatcgcataaaacttaaaactttacagtcagaggttcaattcctcttcttaacaacatacccatggccaacctcctactcctcattgtacccattctaatcgcaatggcattcctaatgcttaccgaacgaaaaattctaggctatatacaactacgcaaaggccccaacgttgtaggcccctacgggctactacaacccttcgctgacgccataaaactcttcaccaaagagcccctaaaacccgccacatctaccatcaccctctacatcaccgccccgaccttagctctcaccatcgctcttctactatgaacccccctccccatacccaaccccctggtcaacctcaacctaggcctcctatttattctagccacctctagcctagccgtttactcaatcctctgatcagggtgagcatcaaactcaaactacgccctgatcggcgcactgcgagcagtagcccaaacaatctcatatgaagtcaccctagccatcattctactatcaacattactaataagtggctcctttaacctctccacccttatcacaacacaagaacacctctgattactcctgccatcatgacccttggccataatatgatttatctccacactagcagagaccaaccgaacccccttcgaccttgccgaaggggagtccgaactagtctcaggcttcaacatcgaatacgccgcaggccccttcgccctattcttcatagccgaatacacaaacattattataataaacaccctcaccactacaatcttcctaggaacaacatatgacgcactctcccctgaactctacacaacatattttgtcaccaagaccctacttctaacctccctgttcttatgaattcgaacagcatacccccgattccgctacgaccaactcatacacctcctatgaaaaaacttcctaccactcaccctagcattacttatatgatatgtctccatacccattacaatctccagcattccccctcaaacctaagaaatatgtctgataaaagagttactttgatagagtaaataataggagcttaaacccccttatttctaggactatgagaatcgaacccatccctgagaatccaaaattctccgtgccacctatcacaccccatcctaaagtaaggtcagctaaataagctatcgggcccataccccgaaaatgttggttatacccttcccgtactaattaatcccctggcccaacccgtcatctactctaccatctttgcaggcacactcatcacagcgctaagctcgcactgattttttacctgagtaggcctagaaataaacatgctagcttttattccagttctaaccaaaaaaataaaccctcgttccacagaagctgccatcaagtacttcctcacgcaagcaaccgcatccataatccttctaatagctatcctcttcaacaatatactctccggacaatgaaccataaccaatactaccaatcaatactcatcattaataatcataatggctatagcaataaaactaggaatagccccctttcacttctgggtcccagaggttacccaaggcacccctctgacatccggcctgcttcttctcacatgacaaaaactagcccccatctcaatcatataccaaatctctccctcactaaacgtaagccttctcctcactctctcaatcttatccatcatagcaggcagttgaggtggattaaaccaaacccagctacgcaaaatcttagcatactcctcaattacccacataggatgaataatagcagttctaccgtacaaccctaacataaccattcttaatttaactatttatattatcctaactactaccgcattcctactactcaacttaaactccagcaccacgaccctactactatctcgcacctgaaacaagctaacatgactaacacccttaattccatccaccctcctctccctaggaggcctgcccccgctaaccggctttttgcccaaatgggccattatcgaagaattcacaaaaaacaatagcctcatcatccccaccatcatagccaccatcaccctccttaacctctacttctacctacgcctaatctactccacctcaatcacactactccccatatctaacaacgtaaaaataaaatgacagtttgaacatacaaaacccaccccattcctccccacactcatcgcccttaccacgctactcctacctatctccccttttatactaataatcttatagaaatttaggttaaatacagaccaagagccttcaaagccctcagtaagttgcaatacttaatttctgtaacagctaaggactgcaaaaccccactctgcatcaactgaacgcaaatcagccactttaattaagctaagcccttactagaccaatgggacttaaacccacaaacacttagttaacagctaagcaccctaatcaactggcttcaatctacttctcccgccgccgggaaaaaaggcgggagaagccccggcaggtttgaagctgcttcttcgaatttgcaattcaatatgaaaatcacctcggagctggtaaaaagaggcctaacccctgtctttagatttacagtccaatgcttcactcagccattttacctcacccccactgatgttcgccgaccgttgactattctctacaaaccacaaagacattggaacactatacctattattcggcgcatgagctggagtcctaggcacagccctaagcctccttattcgagccgagctgggccagccaggcaaccttctgggtaacgaccacatctacaacgttatcgtcacagcccatgcatttgtaataatcttcttcatagtaatacccatcataatcggaggctttggcaactggctagttcccctaataatcggtgcccccgatatggcgtttccccgcataaacaacataagcttctgactcttacctccctctctcctactcctgctcgcatctgctatagtggaggccggagcaggaacaggttgaacagtctaccctcccttagcagggaactactcccaccctggagcctccgtagacctaaccatcttctccttacacctagcaggtgtctcctctatcttaggggccatcaatttcatcacaacaattatcaatataaaaccccctgccataacccaataccaaacgcccctcttcgtctgatccgtcctaatcacagcagtcctacttctcctatctctcccagtcctagctgctggcatcactatactactaacagaccgcaacctcaacaccaccttcttcgaccccgccggaggaggagaccccattctataccaacacctattctgatttttcggtcaccctgaagtttatattcttatcctaccaggcttcggaataatctcccatattgtaacttactactccggaaaaaaagaaccatttggatacataggtatggtctgagctatgatatcaattggcttcctagggtttatcgtgtgagcacaccatatatttacagtaggaatagacgtagacacacgagcatatttcacctccgctaccataatcatcgctatccccaccggcgtcaaagtatttagctgactcgccacactccacggaagcaatatgaaatgatctgctgcagtgctctgagccctaggattcatctttcttttcaccgtaggtggcctgactggcattgtattagcaaactcatcactagacatcgtactacacgacacgtactacgttgtagctcacttccactatgtcctatcaataggagctgtatttgccatcataggaggcttcattcactgatttcccctattctcaggctacaccctagaccaaacctacgccaaaatccatttcactatcatattcatcggcgtaaatctaactttcttcccacaacactttctcggcctatccggaatgccccgacgttactcggactaccccgatgcatacaccacatgaaacatcctatcatctgtaggctcattcatttctctaacagcagtaatattaataattttcatgatttgagaagccttcgcttcgaagcgaaaagtcctaatagtagaagaaccctccataaacctggagtgactatatggatgccccccaccctaccacacattcgaagaacccgtatacataaaatctagacaaaaaaggaaggaatcgaaccccccaaagctggtttcaagccaaccccatggcctccatgactttttcaaaaaggtattagaaaaaccatttcataactttgtcaaagttaaattataggctaaatcctatatatcttaatggcacatgcagcgcaagtaggtctacaagacgctacttcccctatcatagaagagcttatcacctttcatgatcacgccctcataatcattttccttatctgcttcctagtcctgtatgcccttttcctaacactcacaacaaaactaactaatactaacatctcagacgctcaggaaatagaaaccgtctgaactatcctgcccgccatcatcctagtcctcatcgccctcccatccctacgcatcctttacataacagacgaggtcaacgatccctcccttaccatcaaatcaattggccaccaatggtactgaacctacgagtacaccgactacggcggactaatcttcaactcctacatacttcccccattattcctagaaccaggcgacctgcgactccttgacgttgacaatcgagtagtactcccgattgaagcccccattcgtataataattacatcacaagacgtcttgcactcatgagctgtccccacattaggcttaaaaacagatgcaattcccggacgtctaaaccaaaccactttcaccgctacacgaccgggggtatactacggtcaatgctctgaaatctgtggagcaaaccacagtttcatgcccatcgtcctagaattaattcccctaaaaatctttgaaatagggcccgtatttaccctatagcaccccctctaccccctctagagcccactgtaaagctaacttagcattaaccttttaagttaaagattaagagaaccaacacctctttacagtgaaatgccccaactaaatactaccgtatggcccaccataattacccccatactccttacactattcctcatcacccaactaaaaatattaaacacaaactaccacctacctccctcaccaaagcccataaaaataaaaaattataacaaaccctgagaaccaaaatgaacgaaaatctgttcgcttcattcattgcccccacaatcctaggcctacccgccgcagtactgatcattctatttccccctctattgatccccacctccaaatatctcatcaacaaccgactaatcaccacccaacaatgactaatcaaactaacctcaaaacaaatgataaccatacacaacactaaaggacgaacctgatctcttatactagtatccttaatcatttttattgccacaactaacctcctcggactcctgcctcactcatttacaccaaccacccaactatctataaacctagccatggccatccccttatgagcgggcgcagtgattataggctttcgctctaagattaaaaatgccctagcccacttcttaccacaaggcacacctacaccccttatccccatactagttattatcgaaaccatcagcctactcattcaaccaatagccctggccgtacgcctaaccgctaacattactgcaggccacctactcatgcacctaattggaagcgccaccctagcaatagcaaccattaaccttccctctacacttatcatcttcacaattctaattctactgactatcctagaaatcgctgtcgccttaatccaagcctacgttttcacacttctagtaagcctctacctgcacgacaacacataatgacccaccaatcacatgcctatcatatagtaaaacccagcccatgacccctaacaggggccctctcagccctcctaatgacctccggcctagccatgtgatttcacttccactccataacgctcctcatactaggcctactaaccaacacactaaccatataccaatgatggcgcgatgtaacacgagaaagcacataccaaggccaccacacaccacctgtccaaaaaggccttcgatacgggataatcctatttattacctcagaagtttttttcttcgcaggatttttctgagccttttaccactccagcctagcccctaccccccaattaggagggcactggcccccaacaggcatcaccccgctaaatcccctagaagtcccactcctaaacacatccgtattactcgcatcaggagtatcaatcacctgagctcaccatagtctaatagaaaacaaccgaaaccaaataattcaagcactgcttattacaattttactgggtctctattttaccctcctacaagcctcagagtacttcgagtctcccttcaccatttccgacggcatctacggctcaacattttttgtagccacaggcttccacggacttcacgtcattattggctcaactttcctcactatctgcttcatccgccaactaatatttcactttacatccaaacatcactttggcttcgaagccgccgcctgatactggcattttgtagatgtggtttgactatttctgtatgtctccatctattgatgagggtcttactcttttagtataaatagtaccgttaacttccaattaactagttttgacaacattcaaaaaagagtaataaacttcgccttaattttaataatcaacaccctcctagccttactactaataattattacattttgactaccacaactcaacggctacatagaaaaatccaccccttacgagtgcggcttcgaccctatatcccccgcccgcgtccctttctccataaaattcttcttagtagctattaccttcttattatttgatctagaaattgccctccttttacccctaccatgagccctacaaacaactaacctgccactaatagttatgtcatccctcttattaatcatcatcctagccctaagtctggcctatgagtgactacaaaaaggattagactgaaccgaattggtatatagtttaaacaaaacgaatgatttcgactcattaaattatgataatcatatttaccaaatgcccctcatttacataaatattatactagcatttaccatctcacttctaggaatactagtatatcgctcacacctcatatcctccctactatgcctagaaggaataatactatcgctgttcattatagctactctcataaccctcaacacccactccctcttagccaatattgtgcctattgccatactagtctttgccgcctgcgaagcagcggtgggcctagccctactagtctcaatctccaacacatatggcctagactacgtacataacctaaacctactccaatgctaaaactaatcgtcccaacaattatattactaccactgacatgactttccaaaaaacacataatttgaatcaacacaaccacccacagcctaattattagcatcatccctctactattttttaaccaaatcaacaacaacctacttagctgttccccaaccttttcctccgaccccctaacaacccccctcctaatactaactacctgactcctacccctcacaatcatggcaagccaacgccacttatccagtgaaccactatcacgaaaaaaactctacctctctatactaatctccctacaaatctccttaattataacattcacagccacagaactaatcatattttatatcttcttcgaaaccacacttatccccaccttggctatcatcacccgatgaggcaaccagccagaacgcctgaacgcaggcacatacttcctattctacaccctagtaggctcccttcccctactcatcgcactaatttacactcacaacaccctaggctcactaaacattctactactcactctcactgcccaagaactatcaaactcctgagctaacaacttaatatgactagcttacacaatagcttttatagtaaagatacctctttacggactccacttatgactccctaaagcccatgtcgaagcccccatcgctgggtcaatagtacttgccgcagtactcttgaaactaggcggctatggtataatacgcctcacactcattctcaaccccctgacaaaacacatagcctaccccttccttgtactatccctatgaggcataattataacaagctccatctgcctacgacaaacagacctaaaatcgctcattgcatactcttcaatcagccacatagccctcgtagtaacagccattctcatccaaaccccctgaagcttcaccggcgcagtcattctcataatcgcccacggacttacatcctcattactattctgcctagcaaactcaaactacgaacgcactcacagtcgcatcataatcctctctcaaggacttcaaactctactcccactaatagctttttgatgacttctagcaagcctcgctaacctcgccttaccccccactattaacctactgggagaactctctgtgctagtaaccacgttctcctgatcaaatatcactctcctacttacaggactcaacatactagtcacagccctatactccctctacatatttaccacaacacaatggggctcactcacccaccacattaacaacataaaaccctcattcacacgagaaaacaccctcatgttcatacacctatcccccattctcctcctatccctcaaccccgacatcattaccgggttttcctcttgtaaatatagtttaaccaaaacatcagattgtgaatctgacaacagaggcttacgaccccttatttaccgagaaagctcacaagaactgctaactcatgcccccatgtctaacaacatggctttctcaacttttaaaggataacagctatccattggtcttaggccccaagaattttggtgcaactccaaataaaagtaataaccatgcacactactataaccaccctaaccctaacttccctaattccccccatccttaccaccctcgttaaccctaacaaaaaaaactcatacccccattatgtaaaatccattgtcgcatccacctttattatcagtctcttccccacaacaatattcatgtgcctagaccaagaagttattatctcgaactgacactgagccacaacccaaacaacccagctctccctaagcttcaaactagactacttctccataatattcatccctgtagcattgttcgttacatggtccatcatagaattctcactgtgatatataaactcagacccaaacattaatcagttcttcaaatatctactcatcttcctaattaccatactaatcttagttaccgctaacaacctattccaactgttcatcggctgagagggcgtaggaattatatccttcttgctcatcagttgatgatacgcccgagcagatgccaacacagcagccattcaagcaatcctatacaaccgtatcggcgatatcggtttcatcctcgccttagcatgatttatcctacactccaactcatgagacccacaacaaatagcccttctaaacgctaatccaagcctcaccccactactaggcctcctcctagcagcagcaggcaaatcagcccaattaggtctccacccctgactcccctcagccatagaaggccccaccccagtctcagccctactccactcaagcactatagttgtagcaggaatcttcttactcatccgcttccaccccctagcagaaaatagcccactaatccaaactctaacactatgcttaggcgctatcaccactctgttcgcagcagtctgcgcccttacacaaaatgacatcaaaaaaatcgtagccttctccacttcaagtcaactaggactcataatagttacaatcggcatcaaccaaccacacctagcattcctgcacatctgtacccacgccttcttcaaagccatactatttatgtgctccgggtccatcatccacaaccttaacaatgaacaagatattcgaaaaataggaggactactcaaaaccatacctctcacttcaacctccctcaccattggcagcctagcattagcaggaatacctttcctcacaggtttctactccaaagaccacatcatcgaaaccgcaaacatatcatacacaaacgcctgagccctatctattactctcatcgctacctccctgacaagcgcctatagcactcgaataattcttctcaccctaacaggtcaacctcgcttccccacccttactaacattaacgaaaataaccccaccctactaaaccccattaaacgcctggcagccggaagcctattcgcaggatttctcattactaacaacatttcccccgcatcccccttccaaacaacaatccccctctacctaaaactcacagccctcgctgtcactttcctaggacttctaacagccctagacctcaactacctaaccaacaaacttaaaataaaatccccactatgcacattttatttctccaacatactcggattctaccctagcatcacacaccgcacaatcccctatctaggccttcttacgagcctaaacctgcccctactcctcctagacctaacctgactagaaaagctattacctaaaacaatttcacagcaccaaatctccacctccatcatcacctcaacccaaaaaggcataattaaactttacttcctctctttcttcttcccactcatcctaaccctactcctaatcacataacctattcccccgagcaatctcaattacaatatatacaccaacaaacaatgttcaaccagtaactactactaatcaacgcccataatcatacaaagcccccgcaccaataggatcctcccgaatcaaccctgacccctctccttcataaattattcagcttcctacactattaaagtttaccacaaccaccaccccatcatactctttcacccacagcaccaatcctacctccatcgctaaccccactaaaacactcaccaagacctcaacccctgacccccatgcctcaggatactcctcaatagccatcgctgtagtatatccaaagacaaccatcattccccctaaataaattaaaaaaactattaaacccatataacctcccccaaaattcagaataataacacacccgaccacaccgctaacaatcaatactaaacccccataaataggagaaggcttagaagaaaatcccacaaaccccattactaaacccacactcaacagaaacaaagcatacatcattattctcgcacggactacaaccacgaccaatgatatgaaaaaccatcgttgtatttcaactacaagaacaccaatgaccccaatacgcaaaattaaccccctaataaaattaattaaccactcattcatcgacctccccaccccatccaacatctccgcatgatgaaacttcggctcactccttggcgcctgtctgatcctccaaatcaccacaggactattcctagccatgcactactcaccagacgcctcaaccgccttttcatcaatcgcccacatcactcgagacgtaaattatggctgaatcatccgctaccttcacgccaatggcgcctcaatattctttatctgcctcttcctacacatcgggcgaggcctatattacggatcatttctctactcagaaacctgaaacatcggcattatcctcctgcttgcaactatagcaacagccttcataggctatgtcctcccgtgaggccaaatatcattctgaggggccacagtaattacaaacttactatccgccatcccatacattgggacagacctagttcaatgaatctgaggaggctactcagtagacagtcccaccctcacacgattctttacctttcacttcatcttgcccttcattattgcagccctagcagcactccacctcctattcttgcacgaaacgggatcaaacaaccccctaggaatcacctcccattccgataaaatcaccttccacccttactacacaatcaaagacgccctcggcttacttctcttccttctctccttaatgacattaacactattctcaccagacctcctaggcgacccagacaattataccctagccaaccccttaaacacccctccccacatcaagcccgaatgatatttcctattcgcctacacaattctccgatccgtccctaacaaactaggaggcgtccttgccctattactatccatcctcatcctagcaataatccccatcctccatatatccaaacaacaaagcataacatttcgcccactaagccaatcactttattgactcctagccgcagacctcctcattctaacctgaatcggaggacaaccagtaagctacccttttaccatcattggacaagtagcatccgtactatacttcacaacaatcctaatcctaataccaactatctccctaattgaaaacaaaatactcaaatgggcctgtccttgtagtataaactaatacaccagtcttgtaaaccggagatgaaaacctttttccaaggacaaatcagagaaaaagtctttaactccaccattagcacccaaagctaagattctaatttaaactattctctgttctttcatggggaagcagatttgggtaccacccaagtattgactcacccatcaacaaccgctatgtatttcgtacattactgccagccaccatgaatattgtacggtaccataaatacttgaccacctgtagtacataaaaacccaatccacattaaaaccccctccccatgcttacaagcaagtacagcaatcaaccctcaactatcacacatcaactgcaactccaaagccacccctcacccactaggataccaacaaacctacccacccttaacagtacatagtacataaagccatttaccgtacatagcacattacagtcaaatcccctctcgtccccatggatgacccccctcagataggggtcccttgaccaccatcctccgtgaaatcaatatcccgcacaagagtgctactctcctcgctccgggcccataacacttgggggtagctaaagtgaactgtatccgacatctggttcctacttcagggccataaagcctaaatagcccacacgttccccttaaataagacatcacgatg

SEQ ID NO: 274 - DNA, 16570 bp, Homo sapiens mitochondrial
  3108: "n" refers to a nucleotide at position 3107 of the Cambridge Reference Sequence (CRS, Anderson et al. 1981 Nature 290:457-465), later determined to be absent from the human mtDNA sequence according to the revised CRS (rCRS, Andrews et al. 1999 Nature Genetics 23:147); "n" therefore represents a single nucleotide deletion at a position corresponding to nucleotide 3107 of SEQ ID NO:1 as provided herein.
gatcacaggtctatcaccctattaaccactcacgggagctctccatgcatttggtattttcgtctggggggtgtgcacgcgatagcattgcgagacgctggagccggagcaccctatgtcgcagtatctgtctttgattcctgcctcatcctattatttatcgcacctacgttcaatattacaggcgaacatacttactaaagtgtgttaattaattaatgcttgtaggacataataataacaattgaatgtctgcacagccgctttccacacagacatcataacaaaaaatttccaccaaaccccccctcccccgccttctggccacagcacttaaacacatctctgccaaaccccaaaaacaaagaaccctaacaccagcctaaccagatttcaaattttatcttttggcggtatgcacttttaacagtcaccccccaactaacacattattttcccctcccactcccatactactaatctcatcaatacaacccccgcccatcctacccagcacacacacaccgctgctaaccccataccccgaaccaaccaaaccccaaagacaccccccacagtttatgtagcttacctcctcaaagcaatacactgaaaatgtttagacgggctcacatcaccccataaacaaataggtttggtcctagcctttctattagctcttagtaagattacacatgcaagcatccccgttccagtgagttcaccctctaaatcaccacgatcaaaagggacaagcatcaagcacgcagcaatgcagctcaaaacgcttagcctagccacacccccacgggaaacagcagtgattaacctttagcaataaacgaaagtttaactaagctatactaaccccagggttggtcaatttcgtgccagccaccgcggtcacacgattaacccaagtcaatagaagccggcgtaaagagtgttttagatcaccccctccccaataaagctaaaactcacctgagttgtaaaaaactccagttgacacaaaatagactacgaaagtggctttaacatatctgaacacacaatagctaagacccaaactgggattagataccccactatgcttagccctaaacctcaacagttaaatcaacaaaactgctcgccagaacactacgagccacagcttaaaactcaaaggacctggcggtgcttcatatccctctagaggagcctgttctgtaatcgataaaccccgatcaacctcaccacctcttgctcagcctatataccgccatcttcagcaaaccctgatgaaggctacaaagtaagcgcaagtacccacgtaaagacgttaggtcaaggtgtagcccatgaggtggcaagaaatgggctacattttctaccccagaaaactacgatagcccttatgaaacttaagggtcgaaggtggatttagcagtaaactgagagtagagtgcttagttgaacagggccctgaagcgcgtacacaccgcccgtcaccctcctcaagtatacttcaaaggacatttaactaaaacccctacgcatttatatagaggagacaagtcgtaacatggtaagtgtactggaaagtgcacttggacgaaccagagtgtagcttaacacaaagcacccaacttacacttaggagatttcaacttaacttgaccgctctgagctaaacctagccccaaacccactccaccttactaccagacaaccttagccaaaccatttacccaaataaagtataggcgatagaaattgaaacctggcgcaatagatatagtaccgcaagggaaagatgaaaaattataaccaagcataatatagcaaggactaacccctataccttctgcataatgaattaactagaaataactttgcaaggagagccaaagctaagacccccgaaaccagacgagctacctaagaacagctaaaagagcacacccgtctatgtagcaaaatagtgggaagatttataggtagaggcgacaaacctaccgagcctggtgatagctggttgtccaagatagaatcttagttcaactttaaatttgcccacagaaccctctaaatccccttgtaaatttaactgttagtccaaagaggaacagctctttggacactaggaaaaaaccttgtagagagagtaaaaaatttaacacccatagtaggcctaaaagcagccaccaattaagaaagcgttcaagctcaacacccactacctaaaaaatcccaaacatataactgaactcctcacacccaattggaccaatctatcaccctatagaagaactaatgttagtataagtaacatgaaaacattctcctccgcataagcctgcgtcagattaaaacactgaactgacaattaacagcccaatatctacaatcaaccaacaagtcattattaccctcactgtcaacccaacacaggcatgctcataaggaaaggttaaaaaaagtaaaaggaactcggcaaatcttaccccgcctgtttaccaaaaacatcacctctagcatcaccagtattagaggcaccgcctgcccagtgacacatgtttaacggccgcggtaccctaaccgtgcaaaggtagcataatcacttgttccttaaatagggacctgtatgaatggctccacgagggttcagctgtctcttacttttaaccagtgaaattgacctgcccgtgaagaggcgggcataacacagcaagacgagaagaccctatggagctttaatttattaatgcaaacagtacctaacaaacccacaggtcctaaactaccaaacctgcattaaaaatttcggttggggcgacctcggagcagaacccaacctccgagcagtacatgctaagacttcaccagtcaaagcgaactactatactcaattgatccaataacttgaccaacggaacaagttaccctagggataacagcgcaatcctattctagagtccatatcaacaatagggtttacgacctcgatgttggatcaggacatcccaatggtgcagccgctattaaaggttcgtttgttcaacgattaaagtcctacgtgatctgagttcagaccggagtaatccaggtcggtttctatctacnttcaaattcctccctgtacgaaaggacaagagaaataaggcctacttcacaaagcgccttcccccgtaaatgatatcatctcaacttagtattatacccacacccacccaagaacagggtttgttaagatggcagagcccggtaatcgcataaaacttaaaactttacagtcagaggttcaattcctcttcttaacaacatacccatggccaacctcctactcctcattgtacccattctaatcgcaatggcattcctaatgcttaccgaacgaaaaattctaggctatatacaactacgcaaaggccccaacgttgtaggcccctacgggctactacaacccttcgctgacgccataaaactcttcaccaaagagcccctaaaacccgccacatctaccatcaccctctacatcaccgccccgaccttagctctcaccatcgctcttctactatgaacccccctccccatacccaaccccctggtcaacctcaacctaggcctcctatttattctagccacctctagcctagccgtttactcaatcctctgatcagggtgagcatcaaactcaaactacgccctgatcggcgcactgcgagcagtagcccaaacaatctcatatgaagtcaccctagccatcattctactatcaacattactaataagtggctcctttaacctctccacccttatcacaacacaagaacacctctgattactcctgccatcatgacccttggccataatatgatttatctccacactagcagagaccaaccgaacccccttcgaccttgccgaaggggagtccgaactagtctcaggcttcaacatcgaatacgccgcaggccccttcgccctattcttcatagccgaatacacaaacattattataataaacaccctcaccactacaatcttcctaggaacaacatatgacgcactctcccctgaactctacacaacatattttgtcaccaagaccctacttctaacctccctgttcttatgaattcgaacagcatacccccgattccgctacgaccaactcatacacctcctatgaaaaaacttcctaccactcaccctagcattacttatatgatatgtctccatacccattacaatctccagcattccccctcaaacctaagaaatatgtctgataaaagagttactttgatagagtaaataataggagcttaaacccccttatttctaggactatgagaatcgaacccatccctgagaatccaaaattctccgtgccacctatcacaccccatcctaaagtaaggtcagctaaataagctatcgggcccataccccgaaaatgttggttatacccttcccgtactaattaatcccctggcccaacccgtcatctactctaccatctttgcaggcacactcatcacagcgctaagctcgcactgattttttacctgagtaggcctagaaataaacatgctagcttttattccagttctaaccaaaaaaataaaccctcgttccacagaagctgccatcaagtatttcctcacgcaagcaaccgcatccataatccttctaatagctatcctcttcaacaatatactctccggacaatgaaccataaccaatactaccaatcaatactcatcattaataatcataatggctatagcaataaaactaggaatagccccctttcacttctgagtcccagaggttacccaaggcacccctctgacatccggcctgcttcttctcacatgacaaaaactagcccccatctcaatcatataccaaatctctccctcactaaacgtaagccttctcctcactctctcaatcttatccatcatagcaggcagttgaggtggattaaaccaaacccagctacgcaaaatcttagcatactcctcaattacccacataggatgaataatagcagttctaccgtacaaccctaacataaccattcttaatttaactatttatattatcctaactactaccgcattcctactactcaacttaaactccagcaccacgaccctactactatctcgcacctgaaacaagctaacatgactaacacccttaattccatccaccctcctctccctaggaggcctgcccccgctaaccggctttttgcccaaatgggccattatcgaagaattcacaaaaaacaatagcctcatcatccccaccatcatagccaccatcaccctccttaacctctacttctacctacgcctaatctactccacctcaatcacactactccccatatctaacaacgtaaaaataaaatgacagtttgaacatacaaaacccaccccattcctccccacactcatcgcccttaccacgctactcctacctatctccccttttatactaataatcttatagaaatttaggttaaatacagaccaagagccttcaaagccctcagtaagttgcaatacttaatttctgtaacagctaaggactgcaaaaccccactctgcatcaactgaacgcaaatcagccactttaattaagctaagcccttactagaccaatgggacttaaacccacaaacacttagttaacagctaagcaccctaatcaactggcttcaatctacttctcccgccgccgggaaaaaaggcgggagaagccccggcaggtttgaagctgcttcttcgaatttgcaattcaatatgaaaatcacctcggagctggtaaaaagaggcctaacccctgtctttagatttacagtccaatgcttcactcagccattttacctcacccccactgatgttcgccgaccgttgactattctctacaaaccacaaagacattggaacactatacctattattcggcgcatgagctggagtcctaggcacagctctaagcctccttattcgagccgagctgggccagccaggcaaccttctaggtaacgaccacatctacaacgttatcgtcacagcccatgcatttgtaataatcttcttcatagtaatacccatcataatcggaggctttggcaactgactagttcccctaataatcggtgcccccgatatggcgtttccccgcataaacaacataagcttctgactcttacctccctctctcctactcctgctcgcatctgctatagtggaggccggagcaggaacaggttgaacagtctaccctcccttagcagggaactactcccaccctggagcctccgtagacctaaccatcttctccttacacctagcaggtgtctcctctatcttaggggccatcaatttcatcacaacaattatcaatataaaaccccctgccataacccaataccaaacgcccctcttcgtctgatccgtcctaatcacagcagtcctacttctcctatctctcccagtcctagctgctggcatcactatactactaacagaccgcaacctcaacaccaccttcttcgaccccgccggaggaggagaccccattctataccaacacctattctgatttttcggtcaccctgaagtttatattcttatcctaccaggcttcggaataatctcccatattgtaacttactactccggaaaaaaagaaccatttggatacataggtatggtctgagctatgatatcaattggcttcctagggtttatcgtgtgagcacaccatatatttacagtaggaatagacgtagacacacgagcatatttcacctccgctaccataatcatcgctatccccaccggcgtcaaagtatttagctgactcgccacactccacggaagcaatatgaaatgatctgctgcagtgctctgagccctaggattcatctttcttttcaccgtaggtggcctgactggcattgtattagcaaactcatcactagacatcgtactacacgacacgtactacgttgtagcccacttccactatgtcctatcaataggagctgtatttgccatcataggaggcttcattcactgatttcccctattctcaggctacaccctagaccaaacctacgccaaaatccatttcactatcatattcatcggcgtaaatctaactttcttcccacaacactttctcggcctatccggaatgccccgacgttactcggactaccccgatgcatacaccacatgaaacatcctatcatctgtaggctcattcatttctctaacagcagtaatattaataattttcatgatttgagaagccttcgcttcgaagcgaaaagtcctaatagtagaagaaccctccataaacctggagtgactatatggatgccccccaccctaccacacattcgaagaacccgtatacataaaatctagacaaaaaaggaaggaatcgaaccccccaaagctggtttcaagccaaccccatggcctccatgactttttcaaaaaggtattagaaaaaccatttcataactttgtcaaagttaaattataggctaaatcctatatatcttaatggcacatgcagcgcaagtaggtctacaagacgctacttcccctatcatagaagagcttatcacctttcatgatcacgccctcataatcattttccttatctgcttcctagtcctgtatgcccttttcctaacactcacaacaaaactaactaatactaacatctcagacgctcaggaaatagaaaccgtctgaactatcctgcccgccatcatcctagtcctcatcgccctcccatccctacgcatcctttacataacagacgaggtcaacgatccctcccttaccatcaaatcaattggccaccaatggtactgaacctacgagtacaccgactacgggggactaatcttcaactcctacatacttcccccattattcctagaaccaggggacctgcgactccttgacgttgacaatcgagtagtactcccgattgaagcccccattcgtataataattacatcacaagacgtcttgcactcatgagctgtccccacattaggcttaaaaacagatgcaattcccggacgtctaaaccaaaccactttcaccgctacacgaccgggggtatactacggtcaatgctctgaaatctgtggagcaaaccacagtttcatgcccatcgtcctagaattaattcccctaaaaatctttgaaatagggcccgtatttaccctatagcaccccctctaccccctctagagcccactgtaaagctaacttagcattaaccttttaagttaaagattaagagaaccaacacctctttacagtgaaatgccccaactaaatactaccgtatggcccaccataattacccccatactccttacactattcctcatcacccaactaaaaatattaaacacaaactaccacctacctccctcaccaaagcccataaaaataaaaaattataacaaaccctgagaaccaaaatgaacgaaaatctgttcgcttcattcattgcccccacaatcctaggcctacccgccgcagtactgatcattctatttccccctctattgatccccacctccaaatatctcatcaacaaccgactaatcaccacccaacaatgactaatcaaactaacctcaaaacaaatgataaccatacacaacactaaaggacgaacctgatctcttatactagtatccttaatcatttttattgccacaactaacctcctcggactcctgcctcactcatttacaccaaccacccaactatctataaacctagccatggccatccccttatgagcgggcgcagtgattataggctttcgctctaagattaaaaatgccctagcccacttcttaccacaaggcacacctacaccccttatccccatactagttattatcgaaaccatcagcctactcattcaaccaatagccctggccgtacgcctaaccgctaacattactgcaggccacctactcatgcacctaattggaagcgccaccctagcaatatcaaccattaaccttccctctacacttatcatcttcacaattctaattctactgactatcctagaaatcgctgtcgccttaatccaagcctacgttttcacacttctagtaagcctctacctgcacgacaacacataatgacccaccaatcacatgcctatcatatagtaaaacccagcccatgacccctaacaggggccctctcagccctcctaatgacctccggcctagccatgtgatttcacttccactccataacgctcctcatactaggcctactaaccaacacactaaccatataccaatgatggcgcgatgtaacacgagaaagcacataccaaggccaccacacaccacctgtccaaaaaggccttcgatacgggataatcctatttattacctcagaagtttttttcttcgcaggatttttctgagccttttaccactccagcctagcccctaccccccaattaggagggcactggcccccaacaggcatcaccccgctaaatcccctagaagtcccactcctaaacacatccgtattactcgcatcaggagtatcaatcacctgagctcaccatagtctaatagaaaacaaccgaaaccaaataattcaagcactgcttattacaattttactgggtctctattttaccctcctacaagcctcagagtacttcgagtctcccttcaccatttccgacggcatctacggctcaacattttttgtagccacaggcttccacggacttcacgtcattattggctcaactttcctcactatctgcttcatccgccaactaatatttcactttacatccaaacatcactttggcttcgaagccgccgcctgatactggcattttgtagatgtggtttgactatttctgtatgtctccatctattgatgagggtcttactcttttagtataaatagtaccgttaacttccaattaactagttttgacaacattcaaaaaagagtaataaacttcgccttaattttaataatcaacaccctcctagccttactactaataattattacattttgactaccacaactcaacggctacatagaaaaatccaccccttacgagtgcggcttcgaccctatatcccccgcccgcgtccctttctccataaaattcttcttagtagctattaccttcttattatttgatctagaaattgccctccttttacccctaccatgagccctacaaacaactaacctgccactaatagttatgtcatccctcttattaatcatcatcctagccctaagtctggcctatgagtgactacaaaaaggattagactgaaccgaattggtatatagtttaaacaaaacgaatgatttcgactcattaaattatgataatcatatttaccaaatgcccctcatttacataaatattatactagcatttaccatctcacttctaggaatactagtatatcgctcacacctcatatcctccctactatgcctagaaggaataatactatcgctgttcattatagctactctcataaccctcaacacccactccctcttagccaatattgtgcctattgccatactagtctttgccgcctgcgaagcagcggtgggcctagccctactagtctcaatctccaacacatatggcctagactacgtacataacctaaacctactccaatgctaaaactaatcgtcccaacaattatattactaccactgacatgactttccaaaaaacacataatttgaatcaacacaaccacccacagcctaattattagcatcatccctctactattttttaaccaaatcaacaacaacctatttagctgttccccaaccttttcctccgaccccctaacaacccccctcctaatactaactacctgactcctacccctcacaatcatggcaagccaacgccacttatccagtgaaccactatcacgaaaaaaactctacctctctatactaatctccctacaaatctccttaattataacattcacagccacagaactaatcatattttatatcttcttcgaaaccacacttatccccaccttggctatcatcacccgatgaggcaaccagccagaacgcctgaacgcaggcacatacttcctattctacaccctagtaggctcccttcccctactcatcgcactaatttacactcacaacaccctaggctcactaaacattctactactcactctcactgcccaagaactatcaaactcctgagccaacaacttaatatgactagcttacacaatagcttttatagtaaagatacctctttacggactccacttatgactccctaaagcccatgtcgaagcccccatcgctgggtcaatagtacttgccgcagtactcttaaaactaggcggctatggtataatacgcctcacactcattctcaaccccctgacaaaacacatagcctaccccttccttgtactatccctatgaggcataattataacaagctccatctgcctacgacaaacagacctaaaatcgctcattgcatactcttcaatcagccacatagccctcgtagtaacagccattctcatccaaaccccctgaagcttcaccggcgcagtcattctcataatcgcccacgggcttacatcctcattactattctgcctagcaaactcaaactacgaacgcactcacagtcgcatcataatcctctctcaaggacttcaaactctactcccactaatagctttttgatgacttctagcaagcctcgctaacctcgccttaccccccactattaacctactgggagagctctctgtgctagtaaccacgttctcctgatcaaatatcactctcctacttacaggactcaacatactagtcacagccctatactccctctacatatttaccacaacacaatggggctcactcacccaccacattaacaacataaaaccctcattcacacgagaaaacaccctcatgttcatacacctatcccccattctcctcctatccctcaaccccgacatcattaccgggttttcctcttgtaaatatagtttaaccaaaacatcagattgtgaatctgacaacagaggcttacgaccccttatttaccgagaaagctcacaagaactgctaactcatgcccccatgtctaacaacatggctttctcaacttttaaaggataacagctatccattggtcttaggccccaaaaattttggtgcaactccaaataaaagtaataaccatgcacactactataaccaccctaaccctgacttccctaattccccccatccttaccaccctcgttaaccctaacaaaaaaaactcatacccccattatgtaaaatccattgtcgcatccacctttattatcagtctcttccccacaacaatattcatgtgcctagaccaagaagttattatctcgaactgacactgagccacaacccaaacaacccagctctccctaagcttcaaactagactacttctccataatattcatccctgtagcattgttcgttacatggtccatcatagaattctcactgtgatatataaactcagacccaaacattaatcagttcttcaaatatctactcatcttcctaattaccatactaatcttagttaccgctaacaacctattccaactgttcatcggctgagagggcgtaggaattatatccttcttgctcatcagttgatgatacgcccgagcagatgccaacacagcagccattcaagcaatcctatacaaccgtatcggcgatatcggtttcatcctcgccttagcatgatttatcctacactccaactcatgagacccacaacaaatagcccttctaaacgctaatccaagcctcaccccactactaggcctcctcctagcagcagcaggcaaatcagcccaattaggtctccacccctgactcccctcagccatagaaggccccaccccagtctcagccctactccactcaagcactatagttgtagcaggaatcttcttactcatccgcttccaccccctagcagaaaatagcccactaatccaaactctaacactatgcttaggcgctatcaccactctgttcgcagcagtctgcgcccttacacaaaatgacatcaaaaaaatcgtagccttctccacttcaagtcaactaggactcataatagttacaatcggcatcaaccaaccacacctagcattcctgcacatctgtacccacgccttcttcaaagccatactatttatgtgctccgggtccatcatccacaaccttaacaatgaacaagatattcgaaaaataggaggactactcaaaaccatacctctcacttcaacctccctcaccattggcagcctagcattagcaggaatacctttcctcacaggtttctactccaaagaccacatcatcgaaaccgcaaacatatcatacacaaacgcctgagccctatctattactctcatcgctacctccctgacaagcgcctatagcactcgaataattcttctcaccctaacaggtcaacctcgcttccccacccttactaacattaacgaaaataaccccaccctactaaaccccattaaacgcctggcagccggaagcctattcgcaggatttctcattactaacaacatttcccccgcatcccccttccaaacaacaatccccctctacctaaaactcacagccctcgctgtcactttcctaggacttctaacagccctagacctcaactacctaaccaacaaacttaaaataaaatccccactatgcacattttatttctccaacatactcggattctaccctagcatcacacaccgcacaatcccctatctaggccttcttacgagccaaaacctgcccctactcctcctagacctaacctgactagaaaagctattacctaaaacaatttcacagcaccaaatctccacctccatcatcacctcaacccaaaaaggcataattaaactttacttcctctctttcttcttcccactcatcctaaccctactcctaatcacataacctattcccccgagcaatctcaattacaatatatacaccaacaaacaatgttcaaccagtaactactactaatcaacgcccataatcatacaaagcccccgcaccaataggatcctcccgaatcaaccctgacccctctccttcataaattattcagcttcctacactattaaagtttaccacaaccaccaccccatcatactctttcacccacagcaccaatcctacctccatcgctaaccccactaaaacactcaccaagacctcaacccctgacccccatgcctcaggatactcctcaatagccatcgctgtagtatatccaaagacaaccatcattccccctaaataaattaaaaaaactattaaacccatataacctcccccaaaattcagaataataacacacccgaccacaccgctaacaatcaatactaaacccccataaataggagaaggcttagaagaaaaccccacaaaccccattactaaacccacactcaacagaaacaaagcatacatcattattctcgcacggactacaaccacgaccaatgatatgaaaaaccatcgttgtatttcaactacaagaacaccaatgaccccaatacgcaaaactaaccccctaataaaattaattaaccactcattcatcgacctccccaccccatccaacatctccgcatgatgaaacttcggctcactccttggcgcctgcctgatcctccaaatcaccacaggactattcctagccatgcactactcaccagacgcctcaaccgccttttcatcaatcgcccacatcactcgagacgtaaattatggctgaatcatccgctaccttcacgccaatggcgcctcaatattctttatctgcctcttcctacacatcgggcgaggcctatattacggatcatttctctactcagaaacctgaaacatcggcattatcctcctgcttgcaactatagcaacagccttcataggctatgtcctcccgtgaggccaaatatcattctgaggggccacagtaattacaaacttactatccgccatcccatacattgggacagacctagttcaatgaatctgaggaggctactcagtagacagtcccaccctcacacgattctttacctttcacttcatcttgcccttcattattgcagccctagcagcactccacctcctattcttgcacgaaacgggatcaaacaaccccctaggaatcacctcccattccgataaaatcaccttccacccttactacacaatcaaagacgccctcggcttacttctcttccttctctccttaatgacattaacactattctcaccagacctcctaggcgacccagacaattataccctagccaaccccttaaacacccctccccacatcaagcccgaatgatatttcctattcgcctacacaattctccgatccgtccctaacaaactaggaggcgtccttgccctattactatccatcctcatcctagcaataatccccatcctccatatatccaaacaacaaagcataatatttcgcccactaagccaatcactttattgactcctagccgcagacctcctcattctaacctgaatcggaggacaaccagtaagctacccttttaccatcattggacaagtagcatccgtactatacttcacaacaatcctaatcctaataccaactatctccctaattgaaaacaaaatactcaaatgggcctgtccttgtagtataaactaatacaccagtcttgtaaaccggagatgaaaacctttttccaaggacaaatcagagaaaaagtctttaactccaccattagcacccaaagctaagattctaatttaaactattctctgttctttcatggggaagcagatttgggtaccacccaagtattgactcacccatcaacaaccgctatgtatttcgtacattactgccagccaccatgaatattgtacggtaccataaatacttgaccacctgtagtacatcaaaacccaatccacatcaaaaccccccccccatgcttacaagcaagtacagcaatcaaccctcaactatcacacatcaactgcaactccaaagccacccctcacccactaggataccaacaaacctacccacccttaacagtacatagtacataaagccatttaccgtacatagcacattacagtcaaatcccttctcgtccccatggatgacccccctcagataggggtcccttgaccaccatcctccgtgaaatcaatatcccgcacaagagtgctactctcctcgctccgggcccataacacttgggggtagctaaagtgaactgtatccgacatctggttcctacttcagggccataaagcctaaatagcccacacgttccccttaaataagacatcacgatg

SEQ ID NO: 275 - DNA, 16571 bp, Homo sapiens mitochondrial
  3109: "n" refers to a nucleotide at position 3107 of the Cambridge Reference Sequence (CRS, Anderson et al. 1981 Nature 290:457-465), later determined to be absent from the human mtDNA sequence according to the revised CRS (rCRS, Andrews et al. 1999 Nature Genetics 23:147); "n" therefore represents a single nucleotide deletion at a position corresponding to nucleotide 3107 of SEQ ID NO:1 as provided herein.
gatcacaggtctatcaccctattaaccactcacgggagctctccatgcatttggtattttcgtctggggggtatgcacgcgatagcattgcgagacgctggagccggagcaccctatgtcgcagtatctgtctttgattcctgcctcatcctattatttatcgcacctacgttcaatattacaggcgaacatacttactaaagcgtgttaattaattaatgcttgtaggacataataacaacaattgaatgtctgcacagccgctttccacacagacatcataacaaaaaatttccaccaaaccccccctcccccccgcttctggccacagcacttaaacacatctctgccaaaccccaaaaacaaagaaccctaacaccagcctaaccagatttcaaattttatcttttggcggtatgcacttttaacagtcaccccccaactaacacattattttcccctcccactcccatactactaatctcatcaatacaacccccgcccatcctacccagcacacacacaccgctgctaaccccataccccgaaccaaccaaaccccaaagacaccccccacagtttatgtagcttacctcctcaaagcaatacactgaaaatgtttagacgggctcacatcaccccataaacaaataggtttggtcctagcctttctattagctcttagtaagattacacatgcaagcatccccgttccagtgagttcaccctctaaatcaccacgatcaaaagggacaagcatcaagcacgcagcaatgcagctcaaaacgcttagcctagccacacccccacgggaaacagcagtgattaacctttagcaataaacgaaagtttaactaagctatactaaccccagggttggtcaatttcgtgccagccaccgcggtcacacgattaacccaagtcaatagaagccggcgtaaagagtgttttagatcaccccctccccaataaagctaaaactcacctgagttgtaaaaaactccagttgacacaaaatagactacgaaagtggctttaacatatctgaacacacaatagctaagacccaaactgggattagataccccactatgcttagccctaaacctcaacagttaaatcaacaaaactgctcgccagaacactacgagccacagcttaaaactcaaaggacctggcggtgcttcatatccctctagaggagcctgttctgtaatcgataaaccccgatcaacctcaccacctcttgctcagcctatataccgccatcttcagcaaaccctgatgaaggctacaaagtaagcgcaagtacccacgtaaagacgttaggtcaaggtgtagcccatgaggtggcaagaaatgggctacattttctaccccagaaaactacgatagcccttatgaaacttaagggtcgaaggtggatttagcagtaaactgagagtagagtgcttagttgaacagggccctgaagcgcgtacacaccgcccgtcaccctcctcaagtatacttcaaaggacatttaactaaaacccctacgcatttatatagaggagacaagtcgtaacatggtaagtgtactggaaagtgcacttggacgaaccagagtgtagcttaacacaaagcacccaacttacacttaggagatttcaacttaacttgaccgctctgagctaaacctagccccaaacccactccaccttactaccagacaaccttagccaaaccatttacccaaataaagtataggcgatagaaattgaaacctggcgcaatagatatagtaccgcaagggaaagatgaaaaattataaccaagcataatatagcaaggactaacccctataccttctgcataatgaattaactagaaataactttgcaaggagagccaaagctaagacccccgaaaccagacgagctacctaagaacagctaaaagagcacacccgtctatgtagcaaaatagtgggaagatttataggtagaggcgacaaacctaccgagcctggtgatagctggttgtccaagatagaatcttagttcaactttaaatttgcccacagaaccctctaaatccccttgtaaatttaactgttagtccaaagaggaacagctctttggacactaggaaaaaaccttgtagagagagtaaaaaatttaacacccatagtaggcctaaaagcagccaccaattaagaaagcgttcaagctcaacacccactacctaaaaaatcccaaacatataactgaactcctcacacccaattggaccaatctatcaccctatagaagaactaatgttagtataagtaacatgaaaacattctcctccgcataagcctgcgtcagattaaaacactgaactgacaattaacagcccaatatctacaatcaaccaacaagtcattattaccctcactgtcaacccaacacaggcatgctcataaggaaaggttaaaaaaagtaaaaggaactcggcaaatcttaccccgcctgtttaccaaaaacatcacctctagcatcaccagtattagaggcaccgcctgcccagtgacacatgtttaacggccgcggtaccctaaccgtgcaaaggtagcataatcacttgttccttaaatagggacctgtatgaatggctccacgagggttcagctgtctcttacttttaaccagtgaaattgacctgcccgtgaagaggcgggcataacacagcaagacgagaagaccctatggagctttaatttattaatgcaaacagtacctaacaaacccacaggtcctaaactaccaaacctgcattaaaaatttcggttggggcgacctcggagcagaacccaacctccgagcagtacatgctaagacttcaccagtcaaagcgaactactatactcaattgatccaataacttgaccaacggaacaagttaccctagggataacagcgcaatcctattctagagtccatatcaacaatagggtttacgacctcgatgttggatcaggacatcccgatggtgcagccgctattaaaggttcgtttgttcaacgattaaagtcctacgtgatctgagttcagaccggagtaatccaggtcggtttctatctacnttcaaattcctccctgtacgaaaggacaagagaaataaggcctacttcacaaagcgccttcccccgtaaatgatatcatctcaacttagtattatacccacacccacccaagaacagggtttgttaagatggcagagcccggtaatcgcataaaacttaaaactttacagtcagaggttcaattcctcttcttaacaacatacccatggccaacctcctactcctcattgtacccattctaatcgcaatggcattcctaatgcttaccgaacgaaaaattctaggctatatacaactacgcaaaggccccaacgttgtaggcccctacgggctactacaacccttcgctgacgccataaaactcttcaccaaagagcccctaaaacccgccacatctaccatcaccctctacatcaccgccccgaccttagctctcaccatcgctcttctactatgaacccccctccccatacccaaccccctggtcaacctcaacctaggcctcctatttattctagccacctctagcctagccgtttactcaatcctctgatcagggtgagcatcaaactcaaactacgccctgatcggcgcactgcgagcagtagcccaaacaatctcatatgaagtcaccctagccatcattctactatcaacattactaataagtggctcctttaacctctccacccttatcacaacacaagaacacctctgattactcctgccatcatgacccttggccataatatgatttatctccacactagcagagaccaaccgaacccccttcgaccttgccgaaggagagtccgaactagtctcaggcttcaacatcgaatacgccgcaggccccttcgccctattcttcatagccgaatacacaaacattattataataaacaccctcaccactacaatcttcctaggaacaacatatgacgcactctcccctgaactctacacaacatattttgtcaccaagaccctacttctaacctccctgttcttatgaattcgaacagcatacccccgattccgctacgaccaactcatacacctcctatgaaaaaacttcctaccactcaccctagcattacttatatgatatgtctccatacccattacaatctccagcattccccctcaaacctaagaaatatgtctgataaaagagttactttgatagagtaaataataggagcttaaacccccttatttctaggactatgagaatcgaacccatccctgagaatccaaaattctccgtgccacctatcacaccccatcctaaagtaaggtcagctaaataagctatcgggcccataccccgaaaatgttggttatacccttcccgtactaattaatcccctggcccaacccgtcatctactctaccatctttgcaggcacactcatcacagcgctaagctcgcactgattttttacctgagtaggcctagaaataaacatgctagcttttattccagttctaaccaaaaaaataaaccctcgttccacagaagctgccatcaagtatttcctcacgcaagcaaccgcatccataatccttctaatagctatcctcttcaacaatatactctccggacaatgaaccatgaccaatactaccaatcaatactcatcattaataatcataatggctatagcaataaaactaggaatagccccctttcacttctgagtcccagaggttacccaaggcacccctctgacatccggcctgcttcttctcacatgacaaaaactagcccccatctcaatcatataccaaatctctccctcactaaacgtaagccttctcctcactctctcaatcttatccatcatagcaggcagttgaggtggattaaaccaaacccagctacgcaaaatcttagcatactcctcaattacccacataggatgaataatagcagttctaccgtacaaccctaacataaccattcttaatttaactatttatattatcctaactactaccgcattcctactactcaacttaaactccagcaccacgaccctactactatctcgcacctgaaacaagctaacatgactaacacccttaattccatccaccctcctctccctaggaggcctgcccccgctaaccggctttttgcccaaatgggccattatcgaagaattcacaaaaaacaatagcctcatcatccccaccatcatagccaccatcaccctccttaacctctacttctacctacgcctaatctactccacctcaatcacactactccccatatctaacaacgtaaaaataaaatgacagtttgaacatacaaaacccaccccattcctccccacactcatcgcccttaccacgctactcctacctatctccccttttatactaataatcttatagaaatttaggttaaatacagaccaagagccttcaaagccctcagtaagttgcaatacttaatttctgtaacagctaaggactgcaaaaccccactctgcatcaactgaacgcaaatcagccactttaattaagctaagcccttactagaccaatgggacttaaacccacaaacacttagttaacagctaagcaccctaatcaactggcttcaatctacttctcccgccgccgggaaaaaaggcgggagaagccccggcaggtttgaagctgcttcttcgaatttgcaattcaatatgaaaatcacctcggagctggtaaaaagaggcctaacccctgtctttagatttacagtccaatgcttcactcagccattttacctcacccccactgatgttcgccgaccgttgactattctctacaaaccacaaagacattggaacactatacctattattcggcgcatgagctggagtcctaggcacagctctaagcctccttattcgagccgagctgggccagccaggcaaccttctaggtaacgaccacatctacaacgttatcgtcacagcccatgcatttgtaataatcttcttcatagtaatacccatcataatcggaggctttggcaactgactagttcccctaataatcggtgcccccgatatggcgtttccccgcataaacaacataagcttctgactcttacctccctctctcctactcctgctcgcatctgctatagtggaggccggagcaggaacaggttgaacagtctaccctcccttagcagggaactactcccaccctggagcctccgtagacctaaccatcttctccttacacctagcaggtgtctcctctatcttaggggccatcaatttcatcacaacaattatcaatataaaaccccctgccataacccaataccaaacgcccctcttcgtctgatccgtcctaatcacagcagtcctacttctcctatctctcccagtcctagctgctggcatcactatactactaacagaccgcaacctcaacaccaccttcttcgaccccgccggaggaggagaccccattctataccaacacctattctgatttttcggtcaccctgaagtttatattcttatcctaccaggcttcggaataatctcccatattgtaacttactactccggaaaaaaagaaccatttggatacataggtatggtctgagctatgatatcaattggcttcctagggtttatcgtgtgagcacaccatatatttacagtaggaatagacgtagacacacgagcatatttcacctccgctaccataatcatcgctatccccaccggcgtcaaagtatttagctgactcgccacactccacggaagcaatatgaaatgatctgctgcagtgctctgagccctaggattcatctttcttttcaccgtaggtggcctgactggcattgtattagcaaactcatcactagacatcgtactacacgacacgtactacgttgtagcccacttccactatgtcctatcaataggagctgtatttgccatcataggaggcttcattcactgatttcccctattctcaggctacaccctagaccaaacctacgccaaaatccatttcactatcatattcatcggcgtaaatctaactttcttcccacaacactttctcggcctatccggaatgccccgacgttactcggactaccccgatgcatacaccacatgaaacatcctatcatctgtaggctcattcatttctctaacagcagtaatattaataattttcatgatttgagaagccttcgcttcgaagcgaaaagtcctaatagtagaagaaccctccataaacctggagtgactatatggatgccccccaccctaccacacattcgaagaacccgtatacataaaatctagacaaaaaaggaaggaatcgaaccccccaaagctggtttcaagccaaccccatggcctccatgactttttcaaaaaggtattagaaaaaccatttcataactttgtcaaagttaaattataggctaaatcctatatatcttaatggcacatgcagcgcaagtaggtctacaagacgctacttcccctatcatagaagagcttatcacctttcatgatcacgccctcataatcattttccttatctgcttcctagtcctgtatgcccttttcctaacactcacaacaaaactaactaatactaacatctcagacgctcaggaaatagaaaccgtctgaactatcctgcccgccatcatcctagtcctcatcgccctcccatccctacgcatcctttacataacagacgaggtcaacgatccctcccttaccatcaaatcaattggccaccaatggtactgaacctacgagtacaccgactacggcggactaatcttcaactcctacatacttcccccattattcctagaaccaggcgacctgggactccttgacgttgacaatcgagtagtactcccgattgaagcccccattcgtataataattacatcacaagacgtcttgcactcatgagctgtccccacattaggcttaaaaacagatgcaattcccggacgtctaaaccaaaccactttcaccgctacacgaccgggggtatactacggtcaatgctctgaaatctgtggagcaaaccacagtttcatgcccatcgtcctagaattaattcccctaaaaatctttgaaatagggcccgtatttaccctatagcaccccctctaccccctctagagcccactgtaaagctaacttagcattaaccttttaagttaaagattaagagaaccaacacctctttacagtgaaatgccccaactaaatactaccgtatggcccaccataattacccccatactccttacactattcctcatcacccaactaaaaatattaaacacaaactaccacctacctccctcaccaaagcccataaaaataaaaaattataacaaaccctgagaaccaaaatgaacgaaaatctgttcgcttcattcattgcccccacaatcctaggcctacccgccgcagtactgatcattctatttccccctctattgatccccacctccaaatatctcatcaacaaccgactaatcaccacccaacaatgactaatcaaactaacctcaaaacaaatgataaccatacacaacactaaaggacgaacctgatctcttatactagtatccttaatcatttttattgccacaactaacctcctcggactcctgcctcactcatttacaccaaccacccaactatctataaacctagccatggccatccccttatgagcgggcgcagtgattataggctttcgctctaagattaaaaatgccctagcccacttcttaccacaaggcacacctacaccccttatccccatactagttattatcgaaaccatcagcctactcattcaaccaatagccctggccgtacgcctaaccgctaacattactgcaggccacctactcatgcacctaattggaagcgccaccctagcaatatcaaccattaaccttccctctacacttatcatcttcacaattctaattctactgactatcctagaaatcgctgtcgccttaatccaagcctacgttttcacacttctagtaagcctctacctgcacgacaacacataatgacccaccaatcacatgcctatcatatagtaaaacccagcccatgacccctaacaggggccctctcagccctcctaatgacctccggcctagccatgtgatttcacttccactccataacgctcctcatactaggcctactaaccaacacactaaccatataccaatgatgacgcgatgtaacacgagaaagcacataccaaggccaccacacaccacctgtccaaaaaggccttcgatacgggataatcctatttattacctcagaagtttttttcttcgcaggatttttctgagccttttaccactccagcctagcccctaccccccaattaggagggcactggcccccaacaggcatcaccccgctaaatcccctagaagtcccactcctaaacacatccgtattactcgcatcaggagtatcaatcacctgagctcaccatagtctaatagaaaacaaccgaaaccaaataattcaagcactgcttattacaattttactgggtctctattttaccctcctacaagcctcagagtacttcgagtctcccttcaccatttccgacggcatctacggctcaacattttttgtagccacaggcttccacggacttcacgtcattattggctcaactttcctcactatctgcttcatccgccaactaatatttcactttacatccaaacatcactttggcttcgaagccgccgcctgatactggcattttgtagatgtggtttgactatttctgtatgtctccatctattgatgagggtcttactcttttagtataaatagtaccgttaacttccaattaactagttttgacaacattcaaaaaagagtaataaacttcgccttaattttaataatcaacaccctcctagccttactactaataattattacattttgactaccacaactcaacggctacatagaaaaatccaccccttacgagtgcggcttcgaccctatatcccccgcccgcgtccctttctccataaaattcttcttagtagctattaccttcttattatttgatctagaaattgccctccttttacccctaccatgagccctacaaacaactaacctgccactaatagttatgtcatccctcttattaatcatcatcctagccctaagtctggcctatgagtgactacaaaaaggattagactgaaccgaattggtatatagtttaaacaaaacgaatgatttcgactcattaaattatgataatcatatttaccaaatgcccctcatttacataaatattatactagcatttaccatctcacttctaggaatactagtatatcgctcacacctcatatcctccctactatgcctagaaggaataatactatcgctattcattatagctactctcataaccctcaacacccactccctcttagccaatattgtgcctattgccatactagtctttgccgcctgcgaagcagcggtgggcctagccctactagtctcaatctccaacacatatggcctagactacgtacataacctaaacctactccaatgctaaaactaatcgtcccaacaattatattactaccactgacatgactttccaaaaaacacataatttgaatcaacacaaccacccacagcctaattattagcatcatccctctactattttttaaccaaatcaacaacaacctatttagctgttccccaaccttttcctccgaccccctaacaacccccctcctaatactaactacctgactcctacccctcacaatcatggcaagccaacgccacttatccagtgaaccactatcacgaaaaaaactctacctctctatactaatctccctacaaatctccttaattataacattcacagccacagaactaatcatattttatatcttcttcgaaaccacacttatccccaccttggctatcatcacccgatgaggcaaccagccagaacgcctgaacgcaggcacatacttcctattctacaccctagtaggctcccttcccctactcatcgcactaatttacactcacaacaccctaggctcactaaacattctactactcactctcactgcccaagaactatcaaactcctgagccaacaacttaatatgactagcttacacaatagcttttatagtaaagatacctctttacggactccacttatgactccctaaagcccatgtcgaagcccccatcgctgggtcaatagtacttgccgcagtactcttaaaactaggcggctatggtataatacgcctcacactcattctcaaccccctgacaaaacacatagcctaccccttccttgtactatccctatgaggcataattataacaagctccatctgcctacgacaaacagacctaaaatcgctcattgcatactcttcaatcagccacatagccctcgtagtaacagccattctcatccaaaccccctgaagcttcaccggcgcagtcattctcataatcgcccacgggcttacatcctcattactattctgcctagcaaactcaaactacgaacgcactcacagtcgcatcataatcctctctcaaggacttcaaactctactcccactaatagctttttgatgacttctagcaagcctcgctaacctcgccttaccccccactattaacctactgggagaactctctgtgctagtaaccacgttctcctgatcaaatatcactctcctacttacaggactcaacatactagtcacagccctatactccctctacatatttaccacaacacaatggggctcactcacccaccacattaacaacataaaaccctcattcacacgagaaaacaccctcatgttcatacacctatcccccattctcctcctatccctcaaccccgacatcattaccgggttttcctcttgtaaatatagtttaaccaaaacatcagattgtgaatctgacaacagaggcttacgaccccttatttaccgagaaagctcacaagaactgctaactcatgcccccatgtctaacaacatggctttctcaacttttaaaggataacagctatccattggtcttaggccccaaaaattttggtgcaactccaaataaaagtaataaccatgcacactactataaccaccctaaccctgacttccctaattccccccatccttaccaccctcgttaaccctaacaaaaaaaactcatacccccattatgtaaaatccattgtcgcatccacctttattatcagtctcttccccacaacaatattcatgtgcctagaccaagaagttattatctcgaactgacactgagccacaacccaaacaacccagctctccctaagcttcaaactagactacttctccataatattcatccctgtagcattgttcgttacatggtccatcatagaattctcactgtgatatataaactcagacccaaacattaatcagttcttcaaatatctactcatcttcctaattaccatactaatcttagttaccgctaacaacctattccaactgttcatcggctgagagggcgtaggaattatatccttcttgctcatcagttgatgatacgcccgagcagatgccaacacagcagccattcaagcaatcctatacaaccgtatcggcgatatcggtttcatcctcgccttagcatgatttatcctacactccaactcatgagacccacaacaaatagcccttctaaacgctaatccaagcctcaccccactactaggcctcctcctagcagcagcaggcaaatcagcccaattaggtctccacccctgactcccctcagccatagaaggccccaccccagtctcagccctactccactcaagcactatagttgtagcaggaatcttcttactcatccgcttccaccccctagcagaaaatagcccactaatccaaactctaacactatgcttaggcgctatcaccactctgttcgcagcagtctgcgcccttacacaaaatgacatcaaaaaaatcgtagccttctccacttcaagtcaactaggactcataatagttacaatcggcatcaaccaaccacacctagcattcctgcacatctgtacccacgccttcttcaaagccatactatttatgtgctccgggtccatcatccacaaccttaacaatgaacaagatattcgaaaaataggaggactactcaaaaccatacctctcacttcaacctccctcaccattggcagcctagcattagcaggaatacctttcctcacaggtttctactccaaagaccacatcatcgaaaccgcaaacatatcatacacaaacgcctgagccctatctattactctcatcgctacctccctgacaagcgcctatagcactcgaataattcttctcaccctaacaggtcaacctcgcttccccacccttactaacattaacgaaaataaccccaccctactaaaccccattaaacgcctggcagccggaagcctattcgcaggatttctcattactaacaacatttcccccgcatcccccttccaaacaacaatccccctctacctaaaactcacagccctcgctgtcactttcctaggacttctaacagccctagacctcaactacctaaccaacaaacttaaaataaaatccccactatgcacattttatttctccaacatactcggattctaccctagcatcacacaccggacaatcccctatctaggccttcttacgagccaaaacctgcccctactcctcctagacctaacctgactagaaaagctattacctaaaacaatttcacagcaccaaatctccacctccatcatcacctcaacccaaaaaggcataattaaactttacttcctctctttcttcttcccactcatcctaaccctactcctaatcacataacctattcccccgagcaatctcaattacaatatatacaccaacaaacaatgttcaaccagtaactactactaatcaacgcccataatcatacaaagcccccgcaccaataggatcctcccgaatcaaccctgacccctctccttcataaattattcagcttcctacactattaaagtttaccacaaccaccaccccatcatactctttcacccacagcaccaatcctacctccatcgctaaccccactaaaacactcaccaagacctcaacccctgacccccatgcctcaggatactcctcaatagccatcgctgtagtatatccaaagacaaccatcattccccctaaataaattaaaaaaactattaaacccatataacctcccccaaaattcagaataataacacacccgaccacaccgctaacaatcaatactaaacccccataaataggagaaggcttagaagaaaaccccacaaaccccattactaaacccacactcaacagaaacaaagcatacatcattattctcgcacggactacaaccacgaccaatgatatgaaaaaccatcgttgtatttcaactacaagaacaccaatgaccccaatacgcaaaactaaccccctaataaaattaattaaccactcattcatcgacctccccaccccatccaacatctccgcatgatgaaacttcggctcactccttggcgcctgcctgatcctccaaatcaccacaggactattcctagccatgcactactcaccagacgcctcaaccgccttttcatcaatcgcccacatcactcgagacgtaaattatggctgaatcatccgctaccttcacgccaatggcgcctcaatattctttatctgcctcttcctacacatcgggcgaggcctatattacggatcatttctctactcagaaacctgaaacatcggcattatcctcctgcttgcaactatagcaacagccttcataggctatgtcctcccgtgaggccaaatatcattctgaggggccacagtaattacaaacttactatccgccatcccatacattgggacagacctagttcaatgaatctgaggaggctactcagtagacagtcccaccctcacacgattctttacctttcacttcatcttgcccttcattattgcagccctagcagcactccacctcctattcttgcacgaaacgggatcaaacaaccccctaggaatcacctcccattccgataaaatcaccttccacccttactacacaatcaaagacgccctcggcttacttctcttccttctctccttaatgacattaacactattctcaccagacctcctaggcgacccagacaattataccctagccaaccccttaaacacccctccccacatcaagcccgaatgatatttcctattcgcctacacaattctccgatccgtccctaacaaactaggaggcgtccttgccctattactatccatcctcatcctagcaataatccccatcctccatatatccaaacaacaaagcataatatttcgcccactaagccaatcactttattgactcctagccgcagacctcctcattctaacctgaatcggaggacaaccagtaagctacccttttaccatcattggacaagtagcatccgtactatacttcacaacaatcctaatcctaataccaactatctccctaattgaaaacaaaatactcaaatgggcctgtccttgtagtataaactaatacaccagtcttgtaaaccggagatgaaaacctttttccaaggacaaatcagagaaaaagtctttaactccaccattagcacccaaagctaagattctaatttaaactattctctgttctttcatggggaagcagatttgggtaccacccaagtattgactcacccatcaacaaccgctatgtatttcgtacattactgccagccaccatgaatattgtacggtaccataaatacttgaccacctgtagtacataaaaacccaatccacatcaaaaccccctccccatgcttacaagcaagtacagcaatcaaccctcaactatcacacatcaactgcaactccaaagccacccctcacccactaggataccaacaaacctacccacccttaacagtacatagtacataaagccatttaccgtacatagcacattacagtcaaatcccttctcgcccccatggatgacccccctcagataggggtcccttgaccaccatcctccgtgaaatcaatatcccgcacaagagtgctactctcctcgctccgggcccataacacttgggggtagctaaggtgaactgtatccgacatctggttcctacttcagggtcataaagcctaaatagcccacacgttccccttaaataagacatcacgatg

SEQ ID NO: 276 - DNA, 16571 bp, Homo sapiens mitochondrial
  3109: "n" refers to a nucleotide at position 3107 of the Cambridge Reference Sequence (CRS, Anderson et al. 1981 Nature 290:457-465), later determined to be absent from the human mtDNA sequence according to the revised CRS (rCRS, Andrews et al. 1999 Nature Genetics 23:147); "n" therefore represents a single nucleotide deletion at a position corresponding to nucleotide 3107 of SEQ ID NO:1 as provided herein.
gatcacaggtctatcaccctattaaccactcacgggagctctccatgcatttggtattttcgtctggggggtgtgcacgcgatagcattgcgagacgctggagccggagcaccctatgtcgcagtatctgtctttgattcctgcctcatcctattatttatcgcacctacgttcaatattacaggcgaacatacttactaaagtgtgttaattaattaatgcttgtaggacataataataacaattgaatgtctgcacagccgctttccacacagacatcataacaaaaaatttccaccaaaccccccctcccccccgcttctggccacagcacttaaacacatctctgccaaaccccaaaaacaaagaaccctaacaccagcctaaccagatttcaaattttatcttttggcggtatgcacttttaacagtcaccccccaactaacacattattttcccctcccactcccatactactaatctcatcaatacaacccccgcccatcctacccagcacacacacaccgctgctaaccccataccccgaaccaaccaaaccccaaagacaccccccacagtttatgtagcttacctcctcaaagcaatacactgaaaatgtttagacgggctcacatcaccccataaacaaataggtttggtcctagcctttctattagctcttagtaagattacacatgcaagcatccccgttccagtgagttcaccctctaaatcaccacgatcaaaagggacaagcatcaagcacgcagcaatgcagctcaaaacgcttagcctagccacacccccacgggaaacagcagtgattaacctttagcaataaacgaaagtttaactaagctatactaaccccagggttggtcaatttcgtgccagccaccgcggtcacacgattaacccaagtcaatagaagccggcgtaaagagtgttttagatcaccccctccccaataaagctaaaactcacctgagttgtaaaaaactccagttgacacaaaatagactacgaaagtggctttaacatatctgaacacacaatagctaagacccaaactgggattagataccccactatgcttagccctaaacctcaacagttaaatcaacaaaactgctcgccagaacactacgagccacagcttaaaactcaaaggacctggcggtgcttcatatccctctagaggagcctgttctgtaatcgataaaccccgatcaacctcaccacctcttgctcagcctatataccgccatcttcagcaaaccctgatgaaggctacaaagtaagcgcaagtacccacgtaaagacgttaggtcaaggtgtagcccatgaggtggcaagaaatgggctacattttctaccccagaaaactacgatagcccttatgaaacttaagggtcgaaggtggatttagcagtaaactgagagtagagtgcttagttgaacagggccctgaagcgcgtacacaccgcccgtcaccctcctcaagtatacttcaaaggacatttaactaaaacccctacgcatttatatagaggagacaagtcgtaacatggtaagtgtactggaaagtgcacttggacgaaccagagtgtagcttaacacaaagcacccaacttacacttaggagatttcaacttaacttgaccgctctgagctaaacctagccccaaacccactccaccttactaccagacaaccttagccaaaccatttacccaaataaagtataggcgatagaaattgaaacctggcgcaatagatatagtaccgcaagggaaagatgaaaaattataaccaagcataatatagcaaggactaacccctataccttctgcataatgaattaactagaaataactttgcaaggagagccaaagctaagacccccgaaaccagacgagctacctaagaacagctaaaagagcacacccgtctatgtagcaaaatagtgggaagatttataggtagaggcgacaaacctaccgagcctggtgatagctggttgtccaagatagaatcttagttcaactttaaatttgcccacagaaccctctaaatccccttgtaaatttaactgttagtccaaagaggaacagctctttggacactaggaaaaaaccttgtagagagagtaaaaaatttaacacccatagtaggcctaaaagcagccaccaattaagaaagcgttcaagctcaacacccactacctaaaaaatcccaaacatataactgaactcctcacacccaattggaccaatctatcaccctatagaagaactaatgttagtataagtaacatgaaaacattctcctccgcataagcctgcgtcagattaaaacactgaactgacaattaacagcccaatatctacaatcaaccaacaagtcattattaccctcactgtcaacccaacacaggcatgctcataaggaaaggttaaaaaaagtaaaaggaactcggcaaatcttaccccgcctgtttaccaaaaacatcacctctagcatcaccagtattagaggcaccgcctgcccagtgacacatgtttaacggccgcggtaccctaaccgtgcaaaggtagcataatcacttgttccttaaatagggacctgtatgaatggctccacgagggttcagctgtctcttacttttaaccagtgaaattgacctgcccgtgaagaggcgggcataacacagcaagacgagaagaccctatggagctttaatttattaatgcaaacagtacctaacaaacccacaggtcctaaactaccaaacctgcattaaaaatttcggttggggcgacctcggagcagaacccaacctccgagcagtacatgctaagacttcaccagtcaaagcgaactactatactcaattgatccaataacttgaccaacggaacaagttaccctagggataacagcgcaatcctattctagagtccatatcaacaatagggtttacgacctcgatgttggatcaggacatcccaatggtgcagccgctattaaaggttcgtttgttcaacgattaaagtcctacgtgatctgagttcagaccggagtaatccaggtcggtttctatctacnttcaaattcctccctgtacgaaaggacaagagaaataaggcctacttcacaaagcgccttcccccgtaaatgatatcatctcaacttagtattatacccacacccacccaagaacagggtttgttaagatggcagagcccggtaatcgcataaaacttaaaactttacagtcagaggttcaattcctcttcttaacaacatacccatggccaacctcctactcctcattgtacccattctaatcgcaatggcattcctaatgcttaccgaacgaaaaattctaggctatatacaactacgcaaaggccccaacgttgtaggcccctacgggctactacaacccttcgctgacgccataaaactcttcaccaaagagcccctaaaacccgccacatctaccatcaccctctacatcaccgccccgaccttagctctcaccatcgctcttctactatgaacccccctccccatacccaaccccctggtcaacctcaacctaggcctcctatttattctagccacctctagcctagccgtttactcaatcctctgatcagggtgagcatcaaactcaaactacgccctgatcggcgcactgcgagcagtagcccaaacaatctcatatgaagtcaccctagccatcattctactatcaacattactaataagtggctcctttaacctctccacccttatcacaacacaagaacacctctgattactcctgccatcatgacccttggccataatatgatttatctccacactagcagagaccaaccgaacccccttcgaccttgccgaaggggagtccgaactagtctcaggcttcaacatcgaatacgccgcaggccccttcgccctattcttcatagccgaatacacaaacattattataataaacaccctcaccactacaatcttcctaggaacaacatatgacgcactctcccctgaactctacacaacatattttgtcaccaagaccctacttctaacctccctgttcttatgaattcgaacagcatacccccgattccgctacgaccaactcatacacctcctatgaaaaaacttcctaccactcaccctagcattacttatatgatatgtctccatacccattacaatctccagcattccccctcaaacctaagaaatatgtctgataaaagagttactttgatagagtaaataataggagcttaaacccccttatttctaggactatgagaatcgaacccatccctgagaatccaaaattctccgtgccacctatcacaccccatcctaaagtaaggtcagctaaataagctatcgggcccataccccgaaaatgttggttatacccttcccgtactaattaatcccctggcccaacccgtcatctactctaccatctttgcaggcacactcatcacagcgctaagctcgcactgattttttacctgagtaggcctagaaataaacatgctagcttttattccagttctaaccaaaaaaataaaccctcgttccacagaagctgccatcaagtatttcctcacgcaagcaaccgcatccataatccttctaatagctatcctcttcaacaatatactctccggacaatgaaccataaccaatactaccaatcaatactcatcattaataatcataatggctatagcaataaaactaggaatagccccctttcacttctgagtcccagaggttacccaaggcacccctctgacatccggcctgcttcttctcacatgacaaaaactagcccccatctcaatcatataccaaatctctccctcactaaacgtaagccttctcctcactctctcaatcttatccatcatagcaggcagttgaggtggattaaaccaaacccagctacgcaaaatcttagcatactcctcaattacccacataggatgaataatagcagttctaccgtacaaccctaacataaccattcttaatttaactatttatattatcctaactactaccgcattcctactactcaacttaaactccagcaccacgaccctactactatctcgcacctgaaacaagctaacatgactaacacccttaattccatccaccctcctctccctaggaggcctgcccccgctaaccggctttttgcccaaatgggccattatcgaagaattcacaaaaaacaatagcctcatcatccccaccatcatagccaccatcaccctccttaacctctacttctacctacgcctaatctactccacctcaatcacactactccccatatctaacaacgtaaaaataaaatgacagtttgaacatacaaaacccaccccattcctccccacactcatcgcccttaccacgctactcctacctatctccccttttatactaataatcttatagaaatttaggttaaatacagaccaagagccttcaaagccctcagtaagttgcaatacttaatttctgtaacagctaaggactgcaaaaccccactctgcatcaactgaacgcaaatcagccactttaattaagctaagcccttactagaccaatgggacttaaacccacaaacacttagttaacagctaagcaccctaatcaactggcttcaatctacttctcccgccgccgggaaaaaaggcgggagaagccccggcaggtttgaagctgcttcttcgaatttgcaattcaatatgaaaatcacctcggagctggtaaaaagaggcctaacccctgtctttagatttacagtccaatgcttcactcagccattttacctcacccccactgatgttcgccgaccgttgactattctctacaaaccacaaagacattggaacactatacctattattcggcgcatgagctggagtcctaggcacagctctaagcctccttattcgagccgagctgggccagccaggcaaccttctaggtaacgaccacatctacaacgttatcgtcacagcccatgcatttgtaataatcttcttcatagtaatacccatcataatcggaggctttggcaactgactagttcccctaataatcggtgcccccgatatggcgtttccccgcataaacaacataagcttctgactcttacctccctctctcctactcctgctcgcatctgctatagtggaggccggagcaggaacaggttgaacagtctaccctcccttagcagggaactactcccaccctggagcctccgtagacctaaccatcttctccttacacctagcaggtgtctcctctatcttaggggccatcaatttcatcacaacaattatcaatataaaaccccctgccataacccaataccaaacgcccctcttcgtctgatccgtcctaatcacagcagtcctacttctcctatctctcccagtcctagctgctggcatcactatactactaacagaccgcaacctcaacaccaccttcttcgaccccgccggaggaggagaccccattctataccaacacctattctgatttttcggtcaccctgaagtttatattcttatcctaccaggcttcggaataatctcccatattgtaacttactactccggaaaaaaagaaccatttggatacataggtatggtctgagctatgatatcaattggcttcctagggtttatcgtgtgagcacaccatatatttacagtaggaatagacgtagacacacgagcatatttcacctccgctaccataatcatcgctatccccaccggcgtcaaagtatttagctgactcgccacactccacggaagcaatatgaaatgatctgctgcagtgctctgagccctaggattcatctttcttttcaccgtaggtggcctgactggcattgtattagcaaactcatcactagacatcgtactacacgacacgtactacgttgtagcccacttccactatgtcctatcaataggagctgtatttgccatcataggaggcttcattcactgatttcccctattctcaggctacaccctagaccaaacctacgccaaaatccatttcactatcatattcatcggcgtaaatctaactttcttcccacaacactttctcggcctatccggaatgccccgacgttactcggactaccccgatgcatacaccacatgaaacatcctatcatctgtaggctcattcatttctctaacagcagtaatattaataattttcatgatttgagaagccttcgcttcgaagcgaaaagtcctaatagtagaagaaccctccataaacctggagtgactatatggatgccccccaccctaccacacattcgaagaacccgtatacataaaatctagacaaaaaaggaaggaatcgaaccccccaaagctggtttcaagccaaccccatggcctccatgactttttcaaaaaggtattagaaaaaccatttcataactttgtcaaagttaaattataggctaaatcctatatatcttaatggcacatgcagcgcaagtaggtctacaagacgctacttcccctatcatagaagagcttatcacctttcatgatcacgccctcataatcattttccttatctgcttcctagtcctgtatgcccttttcctaacactcacaacaaaactaactaatactaacatctcagacgctcaggaaatagaaaccgtctgaactatcctgcccgccatcatcctagtcctcatcgccctcccatccctacgcatcctttacataacagacgaggtcaacgatccctcccttaccatcaaatcaattggccaccaatggtactgaacctacgagtacaccgactacggcggactaatcttcaactcctacatacttcccccattattcctagaaccaggcgacctgcgactccttgacgttgacaatcgagtagtactcccgattgaagcccccattcgtataataattacatcacaagacgtcttgcactcatgagctgtccccacattaggcttaaaaacagatgcaattcccggacgtctaaaccaaaccactttcaccgctacacgaccgggggtatactacggtcaatgctctgaaatctgtggagcaaaccacagtttcatgcccatcgtcctagaattaattcccctaaaaatctttgaaatagggcccgtatttaccctatagcaccccctctaccccctctagagcccactgtaaagctaacttagcattaaccttttaagttaaagattaagagaaccaacacctctttacagtgaaatgccccaactaaatactaccgtatggcccaccataattacccccatactccttacactattcctcatcacccaactaaaaatattaaacacaaactaccacctacctccctcaccaaagcccataaaaataaaaaattataacaaaccctgagaaccaaaatgaacgaaaatctgttcgcttcattcattgcccccacaatcctaggcctacccgccgcagtactgatcattctatttccccctctattgatccccacctccaaatatctcatcaacaaccgactaatcaccacccaacaatgactaatcaaactaacctcaaaacaaatgataaccatacacaacactaaaggacgaacctgatctcttatactagtatccttaatcatttttattgccacaactaacctcctcggactcctgcctcactcatttacaccaaccacccaactatctataaacctagccatggccatccccttatgagcgggcgcagtgattataggctttcgctctaagattaaaaatgccctagcccacttcttaccacaaggcacacctacaccccttatccccatactagttattatcgaaaccatcagcctactcattcaaccaatagccctggccgtacgcctaaccgctaacattactgcaggccacctactcatgcacctaattggaagcgccaccctagcaatatcaaccattaaccttccctctacacttatcatcttcacaattctaattctactgactatcctagaaatcgctgtcgccttaatccaagcctacgttttcacacttctagtaagcctctacctgcacgacaacacataatgacccaccaatcacatgcctatcatatagtaaaacccagcccatgacccctaacaggggccctctcagccctcctaatgacctccggcctagccatgtgatttcacttccactccataacgctcctcatactaggcctactaaccaacacactaaccatataccaatgatggcgcgatgtaacacgagaaagcacataccaaggccaccacacaccacctgtccaaaaaggccttcgatacgggataatcctatttattacctcagaagtttttttcttcgcaggatttttctgagccttttaccactccagcctagcccctaccccccaattaggagggcactggcccccaacaggcatcaccccgctaaatcccctagaagtcccactcctaaacacatccgtattactcgcatcaggagtatcaatcacctgagctcaccatagtctaatagaaaacaaccgaaaccaaataattcaagcactgcttattacaattttactgggtctctattttaccctcctacaagcctcagagtacttcgagtctcccttcaccatttccgacggcatctacggctcaacattttttgtagccacaggcttccacggacttcacgtcattattggctcaactttcctcactatctgcttcatccgccaactaatatttcactttacatccaaacatcactttggcttcgaagccgccgcctgatactggcattttgtagatgtggtttgactatttctgtatgtctccatctattgatgagggtcttactcttttagtataaatagtaccgttaacttccaattaactagttttgacaacattcaaaaaagagtaataaacttcgccttaattttaataatcaacaccctcctagccttactactaataattattacattttgactaccacaactcaacggctacatagaaaaatccaccccttacgagtgcggcttcgaccctatatcccccgcccgcgtccctttctccataaaattcttcttagtagctattaccttcttattatttgatctagaaattgccctccttttacccctaccatgagccctacaaacaactaacctgccactaatagttatgtcatccctcttattaatcatcatcctagccctaagtctggcctatgagtgactacaaaaaggattagactgaaccgaattggtatatagtttaaacaaaacgaatgatttcgactcattaaattatgataatcatatttaccaaatgcccctcatttacataaatattatactagcatttaccatctcacttctaggaatactagtatatcgctcacacctcatatcctccctactatgcctagaaggaataatactatcgctgttcattatagctactctcataaccctcaacacccactccctcttagccaatattgtgcctattgccatactagtctttgccgcctgcgaagcagcggtgggcctagccctactagtctcaatctccaacacatatggcctagactacgtacataacctaaacctactccaatgctaaaactaatcgtcccaacaattatattactaccactgacatgactttccaaaaaacacataatttgaatcaacacaaccacccacagcctaattattagcatcatccctctactattttttaaccaaatcaacaacaacctatttagctgttccccaaccttttcctccgaccccctaacaacccccctcctaatactaactacctgactcctacccctcacaatcatggcaagccaacgccacttatccagtgaaccactatcacgaaaaaaactctacctctctatactaatctccctacaaatctccttaattataacattcacagccacagaactaatcatattttatatcttcttcgaaaccacacttatccccaccttggctatcatcacccgatgaggcaaccagccagaacgcctgaacgcaggcacatacttcctattctacaccctagtaggctcccttcccctactcatcgcactaatttacactcacaacaccctaggctcactaaacattctactactcactctcactgcccaagaactatcaaactcctgagccaacaacttaatatgactagcttacacaatagcttttatagtaaagatacctctttacggactccacttatgactccctaaagcccatgtcgaagcccccatcgctgggtcaatagtacttgccgcagtactcttaaaactaggcggctatggtataatacgcctcacactcattctcaaccccctgacaaaacacatagcctaccccttccttgtactatccctatgaggcataattataacaagctccatctgcctacgacaaacagacctaaaatcgctcattgcatactcttcaatcagccacatagccctcgtagtaacagccattctcatccaaaccccctgaagcttcaccggcgcagtcattctcataatcgcccacgggcttacatcctcattactattctgcctagcaaactcaaactacgaacgcactcacagtcgcatcataatcctctctcaaggacttcaaactctactcccactaatagctttttgatgacttctagcaagcctcgctaacctcgccttaccccccactattaacctactgggagaactctctgtgctagtaaccacgttctcctgatcaaatatcactctcctacttacaggactcaacatactagtcacagccctatactccctctacatatttaccacaacacaatggggctcactcacccaccacattaacaacataaaaccctcattcacacgagaaaacaccctcatgttcatacacctatcccccattctcctcctatccctcaaccccgacatcattaccgggttttcctcttgtaaatatagtttaaccaaaacatcagattgtgaatctgacaacagaggcttacgaccccttatttaccgagaaagctcacaagaactgctaactcatgcccccatgtctaacaacatggctttctcaacttttaaaggataacagctatccattggtcttaggccccaaaaattttggtgcaactccaaataaaagtaataaccatgcacactactataaccaccctaaccctgacttccctaattccccccatccttaccaccctcgttaaccctaacaaaaaaaactcatacccccattatgtaaaatccattgtcgcatccacctttattatcagtctcttccccacaacaatattcatgtgcctagaccaagaagttattatctcgaactgacactgagccacaacccaaacaacccagctctccctaagcttcaaactagactacttctccataatattcatccctgtagcattgttcgttacatggtccatcatagaattctcactgtgatatataaactcagacccaaacattaatcagttcttcaaatatctactcatcttcctaattaccatactaatcttagttaccgctaacaacctattccaactgttcatcggctgagagggcgtaggaattatatccttcttgctcatcagttgatgatacgcccgagcagatgccaacacagcagccattcaagcaatcctatacaaccgtatcggcgatatcggtttcatcctcgccttagcatgatttatcctacactccaactcatgagacccacaacaaatagcccttctaaacgctaatccaagcctcaccccactactaggcctcctcctagcagcagcaggcaaatcagcccaattaggtctccacccctgactcccctcagccatagaaggccccaccccagtctcagccctactccactcaagcactatagttgtagcaggaatcttcttactcatccgcttccaccccctagcagaaaatagcccactaatccaaactctaacactatgcttaggcgctatcaccactctgttcgcagcagtctgcgcccttacacaaaatgacatcaaaaaaatcgtagccttctccacttcaagtcaactaggactcataatagttacaatcggcatcaaccaaccacacctagcattcctgcacatctgtacccacgccttcttcaaagccatactatttatgtgctccgggtccatcatccacaaccttaacaatgaacaagatattcgaaaaataggaggactactcaaaaccatacctctcacttcaacctccctcaccattggcagcctagcattagcaggaatacctttcctcacaggtttctactccaaagaccacatcatcgaaaccgcaaacatatcatacacaaacgcctgagccctatctattactctcatcgctacctccctgacaagcgcctatagcactcgaataattcttctcaccctaacaggtcaacctcgcttccccacccttactaacattaacgaaaataaccccaccctactaaaccccattaaacgcctggcagccggaagcctattcgcaggatttctcattactaacaacatttcccccgcatcccccttccaaacaacaatccccctctacctaaaactcacagccctcgctgtcactttcctaggacttctaacagccctagacctcaactacctaaccaacaaacttaaaataaaatccccactatgcacattttatttctccaacatactcggattctaccctagcatcacacaccgcacaatcccctatctaggccttcttacgagccaaaacctgcccctactcctcctagacctaacctgactagaaaagctattacctaaaacaatttcacagcaccaaatctccacctccatcatcacctcaacccaaaaaggcataattaaactttacttcctctctttcttcttcccactcatcctaaccctactcctaatcacataacctattcccccgagcaatctcaattacaatatatacaccaacaaacaatgttcaaccagtaactactactaatcaacgcccataatcatacaaagcccccgcaccaataggatcctcccgaatcaaccctgacccctctccttcataaattattcagcttcctacactattaaagtttaccacaaccaccaccccatcatactctttcacccacagcaccaatcctacctccatcgctaaccccactaaaacactcaccaagacctcaacccctgacccccatgcctcaggatactcctcaatagccatcgctgtagtatatccaaagacaaccatcattccccctaaataaattaaaaaaactattaaacccatataacctcccccaaaattcagaataataacacacccgaccacaccgctaacaatcaatactaaacccccataaataggagaaggcttagaagaaaaccccacaaaccccattactaaacccacactcaacagaaacaaagcatacatcattattctcgcacggactacaaccacgaccaatgatatgaaaaaccatcgttgtatttcaactacaagaacaccaatgaccccaatacgcaaaactaaccccctaataaaattaattaaccactcattcatcgacctccccaccccatccaacatctccgcatgatgaaacttcggctcactccttggcgcctgcctgatcctccaaatcaccacaggactattcctagccatgcactactcaccagacgcctcaaccgccttttcatcaatcgcccacatcactcgagacgtaaattatggctgagtcatccgctaccttcacgccaatggcgcctcaatattctttatctgcctcttcctacacatcgggcgaggcctatattacggatcatttctctactcagaaacctgaaacatcggcattatcctcctgcttgcaactatagcaacagccttcataggctatgtcctcccgtgaggccaaatatcattctgaggggccacagtaattacaaacttactatccgccatcccatacattgggacagacctagttcaatgaatctgaggaggctactcagtagacagtcccaccctcacacgattctttacctttcacttcatcttgcccttcattattgcagccctagcagcactccacctcctattcttgcacgaaacgggatcaaacaaccccctaggaatcacctcccattccgataaaatcaccttccacccttactacacaatcaaagacgccctcggcttacttctcttccttctctccttaatgacattaacactattctcaccagacctcctaggcgacccagacaattataccctagccaaccccttaaacacccctccccacatcaagcccgaatgatatttcctattcgcctacacaattctccgatccgtccctaacaaactaggaggcgtccttgccctattactatccatcctcatcctagcaataatccccatcctccatatatccaaacaacaaagcataatatttcgcccactaagccaatcactttattgactcctagccgcagacctcctcattctaacctgaatcggaggacaaccagtaagctacccttttaccatcattggacaagtagcatccgtactatacttcacaacaatcctaatcctaataccaactatctccctaattgaaaacaaaatactcaaatgggcctgtccttgtagtataaactaatacaccagtcttgtaaaccggagatgaaaacctttttccaaggacaaatcagagaaaaagtctttaactccaccattagcacccaaagctaagattctaatttaaactattctctgttctttcatggggaagcagatttgggtgccacccaagtattgactcacccatcaacaaccgctatgtatttcgtacattactgccagccaccatgaatattgtacggtaccataaatacttgaccacctgtagtacatgaaaacccaatccacatcaaaaccccctccccatgcttacaagcaagtacagcaatcaaccctcaactatcacacatcaactgcaactccaaagccacccctcacccactaggataccaacaaacctacccacccttaacagtacatagtacataaagccatttaccgtacatagcacattacagtcaaatcccttctcgtccccatggatgacccccctcagataggggtcccttgaccaccatcctccgtgaaatcaatatcccgcacaagagtgctactctcctcgctccgggcccataacacttgggggtagctaaagtgaactgtatccgacatctggttcctacttcagggccatagagcctaaatagcccacacgttccccttaaataagacatcacgatg

SEQ ID NO: 277 - DNA, 16570 bp, Homo sapiens mitochondrial
  3108: "n" refers to a nucleotide at position 3107 of the Cambridge Reference Sequence (CRS, Anderson et al. 1981 Nature 290:457-465), later determined to be absent from the human mtDNA sequence according to the revised CRS (rCRS, Andrews et al. 1999 Nature Genetics 23:147); "n" therefore represents a single nucleotide deletion at a position corresponding to nucleotide 3107 of SEQ ID NO:1 as provided herein.
gatcacaggtctatcaccctattaaccactcacgggagctctccatgcatttggtattttcgtctggggggtgtgcacgcgatagcattgcgagacgctggagccggagcaccctatgtcgcagtatctgtctttgattcctgcctcatcccattatttatcgcacctacgttcaatattacaggcgaacatacctactaaagtgtgttaattaattaatgcttgtaggacataataataacaattgaatgtctgcacagccgctttccacacagacatcataacaaaaaatttccaccaaaccccccctcccccgccttctggccacagcacttaaacacatctctgccaaaccccaaaaacaaagaaccctaacaccagcctaaccagatttcaaattttatcttttggcggtatgcacttttaacagtcaccccccaactaacacattattttcccctcccactcccatactactaatctcatcaatacaacccccgcccatcctacccagcacacacacaccgctgctaaccccataccccgaaccaaccaaaccccaaagacaccccccacagtttatgtagcttacctcctcaaagcaatacactgaaaatgtttagacgggctcacatcaccccataaacaaataggtttggtcctagcctttctattagctcttagtaagattacacatgcaagcatccccattccagtgagttcaccctctaaatcaccacgatcaaaagggacaagcatcaagcacgcagcaatgcagctcaaaacgcttagcctagccacacccccacgggaaacagcagtgattaacctttagcaataaacgaaagtttaactaagctatactaaccccagggttggtcaatttcgtgccagccaccgcggtcacacgattaacccaagtcaatagaagccggcgtaaagagtgttttagatcaccccctccccaataaagctaaaactcacctgagttgtaaaaaactccagttgacacaaaatagactacgaaagtggctttaacatatctgaacacacaatagctaagacccaaactgggattagataccccactatgcttagccctaaacctcaacagttaaatcaacaaaactgctcgccagaacactacgagccacagcttaaaactcaaaggacctggcggtgcttcatatccctctagaggagcctgttctgtaatcgataaaccccgatcaacctcaccacctcttgctcagcctatataccgccatcttcagcaaaccctgatgaaggctacaaagtaagcgcaagtacccacgtaaagacgttaggtcaaggtgtagcccatgaggtggcaagaaatgggctacattttctaccccagaaaactacgatagcccttatgaaacttaagggtcgaaggtggatttagcagtaaactgagagtagagtgcttagttgaacagggccctgaagcgcgtacacaccgcccgtcaccctcctcaagtatacttcaaaggacatttaactaaaacccctacgcatttatatagaggagacaagtcgtaacatggtaagtgtactggaaagtgcacttggacgaaccagagtgtagcttaacacaaagcacccaacttacacttaggagatttcaacttaacttgaccgctctgagctaaacctagccccaaacccactccaccttactaccagacaaccttagccaaaccatttacccaaataaagtataggcgatagaaattgaaacctggcgcaatagatatagtaccgcaagggaaagatgaaaaattataaccaagcataatatagcaaggactaacccctataccttctgcataatgaattaactagaaataactttgcaaggagaaccaaagctaagacccccgaaaccagacgagctacctaagaacagctaaaagagcacacccgtctatgtagcaaaatagtgggaagatttataggtagaggcgacaaacctaccgagcctggtgatagctggttgtccaagatagaatcttagttcaactttaaatttgcccacagaaccctctaaatccccttgtaaatttaactgttagtccaaagaggaacagctctttggacactaggaaaaaaccttgtagagagagtaaaaaatttaacacccatagtaggcctaaaagcagccaccaattaagaaagcgttcaagctcaacacccactacctaaaaaatcccaaacatataactgaactcctcacacccaattggaccaatctatcaccctatagaagaactaatgttagtataagtaacatgaaaacattctcctccgcataagcctgcgtcagattaaaacactgaactgacaattaacagcccaatatctacaatcaaccaacaagtcattattaccctcactgtcaacccaacacaggcatgctcataaggaaaggttaaaaaaagtaaaaggaactcggcaaatcttaccccgcctgtttaccaaaaacatcacctctagcatcaccagtattagaggcaccgcctgcccagtgacacatgtttaacggccgcggtaccctaaccgtgcaaaggtagcataatcacttgttccttaaatagggacctgtatgaatggctccacgagggttcagctgtctcttacttttaaccagtgaaattgacctgcccgtgaagaggcgggcatgacacagcaagacgagaagaccctatggagctttaatttattaatgcaaacagtacctaacaaacccacaggtcctaaactaccaaacctgcattaaaaatttcggttggggcgacctcggagcagaacccaacctccgagcagtacatgctaagacttcaccagtcaaagcgaactactatactcaattgatccaataacttgaccaacggaacaagttaccctagggataacagcgcaatcctattctagagtccatatcaacaatagggtttacgacctcgatgttggatcaggacatcccgatggtgcagccgctattaaaggttcgtttgttcaacgattaaagtcctacgtgatctgagttcagaccggagtaatccaggtcggtttctatctacnttcaaattcctccctgtacgaaaggacaagagaaataaggcctacttcacaaagcgccttcccccgtaaatgatatcatctcaacttagtattatacccacacccacccaagaacagggtttgttaagatggcagagcccggtaatcgcataaaacttaaaactttacagtcagaggttcaattcctcttcttaacaacatacccatggccaacctcctactcctcattgtacccattctaatcgcaatggcattcctaatgcttaccgaacgaaaaattctaggctatatacaactacgcaaaggccccaacgttgtaggcccctacgggctactacaacccttcgctgacgccataaaactcttcaccaaagagcccctaaaacccgccacatctaccatcaccctctacatcaccgccccgaccttagctctcaccatcgctcttctactatgaacccccctccccatacccaaccccctggtcaacctcaacctaggcctcctatttattctagccacctctagcctagccgtttactcaatcctctgatcagggtgagcatcaaactcaaactacgccctgatcggcgcactgcgagcagtagcccaaacaatctcatatgaagtcaccctagccatcattctactatcaacattactaataagtggctcctttaacctctccacccttatcacaacacaagaacacctctgattactcctgccatcatgacccttggccataatatgatttatctccacactagcagagaccaaccgaacccccttcgaccttgccgaaggggagtccgaactagtctcaggcttcaacatcgaatacgccgcaggccccttcgccctattcttcatagccgaatacacaaacattattataataaacaccctcaccactacaatcttcctaggaacaacatatgacgcactctcccctgaactctacacaacatattttgtcaccaagaccctacttctaacctccctgttcttatgaattcgaacagcatacccccgattccgctacgaccaactcatacacctcctatgaaaaaacttcctaccactcaccctagcattacttatatgacatgtctccatacccattacaatctccagcattccccctcaaacctaagaaatatgtctgataaaagagttactttgatagagtaaataataggagcttaaacccccttatttctaggactatgagaatcgaacccatccctgagaatccaaaattctccgtgccacctatcacaccccatcctaaagtaaggtcagctaaataagctatcgggcccataccccgaaaatgttggttatacccttcccgtactaattaatcccctggcccaacccgtcatctactctaccatctttgcaggcacactcatcacagcgctaagctcgcactgattttttacctgagtaggcctagaaataaacatgctagcttttattccagttctaaccaaaaaaataaaccctcgttccacagaagctgccatcaagtatttcctcacgcaagcaaccgcatccataatccttctaatagctatcctcttcaacaatatactctccggacaatgaaccataaccaatactaccaatcaatactcatcattaataatcataatggctatagcaataaaactaggaatagccccctttcacttctgagtcccagaggttacccaaggcacccctctgacatccggcctgcttcttctcacatgacaaaaactagcccccatctcaatcatataccaaatctctccctcactagacgtaagccttctcctcactctctcaatcttatccatcatagcaggcagttgaggtggattaaaccaaacccagctacgcaaaatcttagcatactcctcaattacccacataggatgaataatagcagttctaccgtacaaccctaacataaccattcttaatttaactatttatattatcctaactactaccgcattcctactactcaacttaaactccagcaccacgaccctactactatctcgcacctgaaacaagctaacatgactaacacccttaattccatccaccctcctctccctaggaggcctgcccccgctaaccggctttttgcccaaatgggccattatcgaagaattcacaaaaaacaatagcctcatcatccccaccatcatagccaccatcaccctccttaacctctacttctacctacgcctaatctactccacctcaatcacactactccccatatctaacaacgtaaaaataaaatgacagtttgaacatacaaaacccaccccattcctccccacactcatcgcccttaccacgctactcctacctatctccccttttatactaataatcttatagaaatttaggttaaatacagaccaagagccttcaaagccctcagtaagttgcaatacttaatttctgtaacagctaaggactgcaaaaccccactctgcatcaactgaacgcaaatcagccactttaattaagctaagcccttactagaccaatgggacttaaacccacaaacacttagttaacagctaagcaccctaatcaactggcttcaatctacttctcccgccgccgggaaaaaaggcgggagaagccccggcaggtttgaagctgcttcttcgaatttgcaattcaatatgaaaatcacctcggagctggtaaaaagaggcctaacccctgtctttagatttacagtccaatgcttcactcagccattttacctcacccccactgatgttcgccgaccgttgactattctctacaaaccacaaagacattggaacactatacctattattcggcgcatgagctggagtcctaggcacagctctaagcctccttattcgagccgagctgggccagccaggcaaccttctaggtaacgaccacatctacaacgttatcgtcacagcccatgcatttgtaataatcttcttcatagtaatacccatcataatcggaggctttggcaactgactagttcccctaataatcggtgcccccgatatggcgtttccccgcataaacaacataagcttctgactcttacctccctctctcctactcctgctcgcatctgctatagtggaggccggagcaggaacaggttgaacagtctaccctcccttagcagggaactactcccaccccggagcctccgtagacctaaccatcttctccttacacctagcaggtgtctcctctatcttaggggccatcaatttcatcacaacaattatcaatataaaaccccctgccataacccaataccaaacgcccctcttcgtctgatccgtcctaatcacagcagtcctacttctcctatctctcccagtcctagctgctggcatcactatactactaacagaccgcaacctcaacaccaccttcttcgaccccgccggaggaggagaccccattctataccaacacctattctgatttttcggtcaccctgaagtttatattcttatcctaccaggcttcggaataatctcccatattgtaacttactactccggaaaaaaagaaccatttggatacataggtatggtctgagctatgatatcaattggcttcctagggtttatcgtgtgagcacaccatatatttacagtaggaatagacgtagacacacgagcatatttcacctccgctaccataatcatcgctatccccaccggcgtcaaagtatttagctgactcgccacactccacggaagcaatatgaaatgatctgctgcagtgctctgagccctaggattcatctttcttttcaccgtaggtggcctgactggcattgtattagcaaactcatcactagacatcgtactacacgacacgtactacgttgtagctcacttccactatgtcctatcaataggagctgtatttgccatcataggaggcttcattcactgatttcccctattctcaggctacaccctagaccaaacctacgccaaaatccatttcactatcatattcatcggcgtaaatctaactttcttcccacaacactttctcggcctatccggaatgccccgacgttactcggactaccccgatgcatacaccacatgaaacatcctatcatctgtaggctcattcatttctctaacagcagtaatattaataattttcatgatttgagaagccttcgcttcgaagcgaaaagtcctaatagtagaagaaccctccataaacctggagtgactatatggatgccccccaccctaccacacattcgaagaacccgtatacataaaatctagacaaaaaaggaaggaatcgaaccccccaaagctggtttcaagccaaccccatggcctccatgactttttcaaaaaggtattagaaaaaccatttcataactttgtcaaagttaaattataggctaaatcctatatatcttaatggcacatgcagcgcaagtaggtctacaagacgctacttcccctatcatagaagagcttatcacctttcatgatcacgccctcataatcattttccttatctgcttcctagtcctgtatgcccttttcctaacactcacaacaaaactaactaatactaacatctcagacgctcaggaaatagaaaccgtctgaactatcctgcccgccatcatcctagtcctcatcgccctcccatccctacgcatcctttacataacagacgaggtcaacgatccctcccttaccatcaaatcaattggccaccaatggtactgaacctacgagtacaccgactacggcggactaatcttcaactcctacatacttcccccattattcctagaaccaggcgacctgcgactccttgacgttgacaatcgagtagtactcccgattgaagcccccattcgtataataattacatcacaagacgtcttgcactcatgagctgtccccacattaggcttaaaaacagatgcaattcccggacgtctaaaccaaaccactttcaccgctacacgaccgggggtatactacggtcaatgctctgaaatctgtggagcaaaccacagtttcatgcccatcgtcctagaattaattcccctaaaaatctttgaaatagggcccgtatttaccctatagcaccccctctaccccctctagagcccactgtaaagctaacttagcattaaccttttaagttaaagattaagagaaccaacacctctttacagtgaaatgccccaactaaatactaccgtatggcccaccataattacccccatactccttacactattcctcatcacccaactaaaaatattaaacacaaactaccacctacctccctcaccaaagcccataaaaataaaaaattataacaaaccctgagaaccaaaatgaacgaaaatctgttcgcttcattcattgcccccacaatcctaggcctacccgccgcagtactgatcattctatttccccctctattgatccccacctccaaatatctcatcaacaaccgactaatcaccacccaacaatgactaatcaaactaacctcaaaacaaataataaccatacacaacactaaaggacgaacctgatctcttatactagtatccttaatcatttttattgccacaactaacctcctcggactcctgcctcactcatttacaccaaccacccaactatctataaacctagccatggccatccccttatgagcgggcgcagtgattataggctttcgctctaagattaaaaatgccctagcccacttcttaccacaaggcacacctacaccccttatccccatactagttattatcgaaaccatcagcctactcattcaaccaatagccctggccgtacgcctaaccgctaacattactgcaggccacctactcatgcacctaattggaagcgccaccctagcaatatcaaccattaaccttccctctacacttatcatcttcacaattctaattctactgactatcctagaaatcgctgtcgccttaatccaagcctacgttttcacacttctagtaagcctctacctgcacgacaacacataatgacccaccaatcacatgcctatcatatagtaaaacccagcccatgacccctaacaggggccctctcagccctcctaatgacctccggcctagccatgtgatttcacttccactccataacgctcctcatactaggcctactaaccaacacactaaccatataccaatgatggcgcgatgtaacacgagaaagcacataccaaggccaccacacaccacctgtccaaaaaggccttcgatacgggataatcctatttattacctcagaagtttttttcttcgcaggatttttctgagccttttaccactccagcctagcccctaccccccaattaggagggcactggcccccaacaggcatcaccccgctaaatcccctagaagtcccactcctaaacacatccgtattactcgcatcaggagtatcaatcacctgagctcaccatagtctaatagaaaacaaccgaaaccaaataattcaagcactgcttattacaattttactgggtctctattttaccctcctacaagcctcagagtacttcgagtctcccttcaccatttccgacggcatctacggctcaacattttttgtagccacaggcttccacggacttcacgtcattattggctcaactttcctcactatctgcttcatccgccaactaatatttcactttacatccaaacaccactttggcttcgaagccgccgcctgatactggcattttgtagatgtggtttgactatttctgtatgtctccatctattgatgagggtcttactcttttagtataaatagtaccgttaacttccaattaactagttttgacaacattcaaaaaagagtaataaacttcgccttaattttaataatcaacaccctcctagccttactactaataattattacattttgactaccacaactcaacggctacatagaaaaatccaccccttacgagtgcggcttcgaccctatatcccccgcccgcgtccctttctccataaaattcttcttagtagctattaccttcttattatttgatctagaaattgccctccttttacccctaccatgagccctacaaacaactaacctgccactaatagttatgtcatccctcttattaatcatcatcctagccctaagtctggcctatgagtgactacaaaaaggattagactgaaccgaattggtatatagtttaaacaaaacgaatgatttcgactcattaaattatgataatcatatctaccaaatgcccctcatttacataaatattatactagcatttaccatctcacttctaggaatactagtatatcgctcacacctcatatcctccctactatgcctagaaggaataatactatcgctgttcattatagctactctcataaccctcaacacccactccctcttagccaatattgtgcctattgccatactagtctttgccgcctgcgaagcagcggtgggcctagccctactagtctcaatctccaacacatatggcctagactacgtacataacctaaacctactccaatgctaaaactaatcgtcccaacaattatattactaccactgacatgactttccaaaaaacacataatttgaatcaacacaaccacccacagcctaattattagcatcatccctctactattttttaaccaaatcaacaacaacctatttagctgttccccaaccttttcctccgaccccctaacaacccccctcctaatactaactacctgactcctacccctcacaatcatggcaagccaacgccacttatccagtgaaccactatcacgaaaaaaactctacctctctatactaatctccctacaaatctccttaattataacattcacagccacagaactaatcatattttatatcttcttcgaaaccacacttatccccaccttggctatcatcacccgatgaggcaaccagccagaacgcctgaacgcaggcacatacttcctattctacaccctagtaggctcccttcccctactcatcgcactgatttacactcacaacaccctaggctcactaaacattctactactcactctcactgcccaagaactatcaaactcctgagccaacaacttaatatgactagcttacacaatagcttttatagtaaagatacctctttacggactccacttatgactccctaaagcccatgtcgaagcccccatcgctgggtcaatagtacttgccgcagtactcttaaaactaggcggctatggtataatacgcctcacactcattctcaaccccctgacaaaacacatagcctaccccttccttgtactatccctatgaggcataattataacaagctccatctgcctacgacaaacagacctaaaatcgctcattgcatactcttcaatcagccacatagccctcgtagtaacagccattctcatccaaaccccctgaagcttcaccggcgcagtcattctcataatcgcccacggacttacatcctcattactattctgcctagcaaactcaaactacgaacgcactcacagtcgcatcataatcctctctcaaggacttcaaactctactcccactaatagctttttgatgacttctagcaagcctcgctaacctcgccttaccccccactattaacctactgggagaactctctgtgctagtaaccacgttctcctgatcaaatatcactctcctacttacaggactcaacatactagtcacagccctatactccctctacatatttaccacaacacaatggggctcactcacccaccacattaacaacataaaaccctcattcacacgagaaaacaccctcatgttcatacacctatcccccattctcctcctatccctcaaccccgacatcattaccgggttttcctcttgtaaatatagtttaaccaaaacatcagattgtgaatctgacaacagaggcttacgaccccttatttaccgagaaagctcacaagaactgctaactcatgcccccatgtctaacaacatggctttctcaacttttaaaggataacagctatccattggtcttaggccccaaaaattttggtgcaactccaaataaaagtaataaccatgcacactactataaccaccctaaccctgacttccctaattccccccatccttaccaccctcgttaaccctaacaaaaaaaactcatacccccattatgtaaaatccattgtcgcatccacctttattatcagtctcttccccacaacaatattcatgtgcctagaccaagaagttattatctcgaactgacactgagccacaacccaaacaacccagctctccctaagcttcaaactagactacttctccataatattcatccctgtagcattgttcgttacatggtcaatcatagaattctcactgtgatatataaactcagacccaaacattaatcagttcttcaaatatctactcatcttcctaattaccatactaatcttagttaccgctaacaacctattccaactgttcatcggctgagagggcgtaggaattatatccttcttgctcatcagttgatgatacgcccgagcagatgccaacacagcagccattcaagcaatcctatacaaccgtatcggcgatatcggtttcatcctcgccttagcatgatttatcctacactccaactcatgagacccacaacaaatagcccttctaaacgctaatccaagcctcaccccactactaggcctcctcctagcagcagcaggcaaatcagcccaattaggtctccacccctgactcccctcagccatagaaggccccaccccagtctcagccctactccactcaagcactatagttgtagcaggaatcttcttactcatccgcttccaccccctagcagaaaatagcccactaatccaaactctaacactatgcttaggcgctatcaccactctgttcgcagcagtctgcgcccttacacaaaatgacatcaaaaaaatcgtagccttctccacttcaagtcaactaggactcataatagttacaatcggcatcaaccaaccacacctagcattcctgcacatctgtacccacgccttcttcaaagccatactatttatgtgctccggatccatcatccacaaccttaacaatgaacaagatattcgaaaaataggaggactactcaaaaccatacctctcacttcaacctccctcaccattggcagcctagcattagcaggaatacctttcctcacaggtttctactccaaagaccacatcatcgaaaccgcaaacatatcatacacaaacgcctgagccctatctattactctcatcgctacctccctgacaagcgcctatagcactcgaataattcttctcaccctaacaggtcaacctcgcttccccacccttactaacattaacgaaaataaccccaccctactaaaccccattaaacgcctggcagccggaagcctattcgcaggatttctcattactaacaacatttcccccgcatcccccttccaaacaacaatccccctctacctaaaactcacagccctcgctgtcactttcctaggacttctaacagccctagacctcaactacctaaccaacaaacttaaaataaaatccccactatgcacattttatttctccaacatactcggattctaccctagcatcacacaccgcacaatcccctatctaggccttcttacgagccaaaacctgcccctactcctcctagacctaacctgactagaaaagctattacctaaaacaatttcacagcaccaaatctccacctccatcatcacctcaacccaaaaaggcataattaaactttacttcctctctttcttcttcccactcatcctaaccctactcctaatcacataacctattcccccgagcaatctcaattacaatatatacaccaacaaacaatgttcaaccagtaactactactaatcaacgcccataatcatacaaagcccccgcaccaataggatcctcccgaatcaaccctgacccctctccttcataaattattcagcttcctacactattaaagtttaccacaaccaccaccccatcatactctttcacccacagcaccaatcctacctccatcgctaaccccactaaaacactcaccaagacctcaacccctgacccccatgcctcaggatactcctcaatagccatcgctgtagtatatccaaagacaaccatcattccccctaaataaattaaaaaaactattaaacccatataacctcccccaaaattcagaataataacacacccgaccacaccgctaacaatcaatactaaacccccataaataggagaaggcttagaagaaaaccccacaaaccccattactaaacccacactcaacagaaacaaagcatacatcattattctcgcacggactacaaccacgaccaatgatatgaaaaaccatcgttgtatttcaactacaagaacaccaatgaccccaatacgcaaaattaaccccctaataaaattaattaaccactcattcatcgacctccccaccccatccaacatctccgcatgatgaaacttcggctcactccttggcgcctgcctgatcctccaaatcaccacaggactattcctagccatacactactcaccagacgcctcaaccgccttttcatcaatcgcccacatcactcgagacgtaaattatggctgaatcatccgctaccttcacgccaatggcgcctcaatattctttatctgcctcttcctacacatcgggcgaggcctatattacggatcatttctctactcagaaacctgaaacatcggcattatcctcctgcttgcaactatagcaacagccttcataggctatgtcctcccgtgaggccaaatatcattctgaggggccacagtaattacaaacttactatccgccatcccatacattgggacagacctagttcaatgaatctgaggaggctactcagtagacagtcccaccctcacacgattctttacctttcacttcatcttgcccttcattattgcagccctagcagcactccacctcctattcttgcacgaaacgggatcaaacaaccccctaggaatcacctcccattccgataaaatcaccttccacccttactacacaatcaaagacgccctcggcttacttctcttcattctctccttaatgacattaacactattctcaccagacctcctaggcgacccagacaattataccctagccaaccccttaaacacccctccccacatcaagcccgaatgatatttcctattcgcctacacaattctccgatccgtccctaacaagctaggaggcgtccttgccctattactatccatcctcatcctagcaataatccccatcctccatatatccaaacaacaaagcataatatttcgcccactaagccaatcactttattgactcctagccgcagacctcctcattctaacctgaatcggaggacaaccagtaagctacccttttaccatcattggacaagtagcatccgtactatacttcacaacaatcctaatcctaataccaactatctccctaattgaaaacaaaatactcaaatgggcctgtccttgtagtataaactaatacaccagtcttgtaaaccgaagatgaaaacctttttccaaggacaaatcagagaaaaagtctttaactccaccattagcacccaaagctaagattctaatttaaactattctctgttctttcatggggaagcagatttgggtaccacccaagtattgactcacccatcaacaaccgctatgtatttcgtacattactgccagccaccatgaatattgcacggtaccataaatacttgaccacctgtagtacatagaaacccaatccacatcaaaacctcccccccatgcttacaagcaagtacagcaatcaaccctcaactatcacacatcaactgcaactccaaagccacccctcacccactaggataccaacaaacctacccatccttaacagtacatagtacataaagccatttaccgtacatagcacattacagtcaaatcccttctcgtccccatggatgacccccctcagataggggtcccttgaccaccatcctccgtgaaatcaatatcccgcacaagagtgctactctcctcgctccgggcccataacacttgggggtagctaaagtgaactgtatccgacatctggttcctacttcagggccataaagcctaaatagcccacacgttccccttaaataagacatcacgatg

SEQ ID NO: 278 - DNA, 16570 bp, Homo sapiens mitochondrial
  3108: "n" refers to a nucleotide at position 3107 of the Cambridge Reference Sequence (CRS, Anderson et al. 1981 Nature 290:457-465), later determined to be absent from the human mtDNA sequence according to the revised CRS (rCRS, Andrews et al. 1999 Nature Genetics 23:147); "n" therefore represents a single nucleotide deletion at a position corresponding to nucleotide 3107 of SEQ ID NO:1 as provided herein.
gatcacaggtctatcaccctattaaccactcacgggagctctccatgcatttggtattttcgtctggggggtgtgcacgcgatagcattgcgagacgctggagccggagcaccctatgtcgcagtatctgtctttgattcctgcctcatcctattatttatcgcacctacgttcaatattacaggcgaacatacttactaaagtgtgttaattaattaatgcttgtaggacataataataacaattgaatgtctgcacagccgctttccacacagacatcataacaaaaaatttccaccaaaccccccctcccccgccttctggccacagcacttaaacacatctctgccaaaccccaaaaacaaagaaccctaacaccagcctaaccagatttcaaattttatcttttggcggtatgcacttttaacagtcaccccccaactaacacattattttcccctcccactcccatactactaatctcatcaatacaacccccgcccatcctacccagcacacacacaccgctgctaaccccataccccgaaccaaccaaaccccaaagacaccccccacagtttatgtagcttacctcctcaaagcaatacactgaaaatgtttagacgggctcacatcaccccataaacaaataggtttggtcctagcctttctattagctcttagtaagattacacatgcaagcatccccgttccagtgagttcaccctctaaatcaccacgatcaaaagggacaagcatcaagcacgcagcaatgcagctcaaaacgcttagcctagccacacccccacgggaaacagcagtgattaacctttagcaataaacgaaagtttaactaagctatactaaccccagggttggtcaatttcgtgccagccaccgcggtcacacgattaacccaagtcaatagaagccggcgtaaagagtgttttagatcaccccctccccaataaagctaaaactcacctgagttgtaaaaaactccagttgacacaaaatagactacgaaagtggctttaacatatctgaacacacaatagctaagacccaaactgggattagataccccactatgcttagccctaaacctcaacagttaaatcaacaaaactgctcgccagaacactacgagccacagcttaaaactcaaaggacctggcggtgcttcatatccctctagaggagcctgttctgtaatcgataaaccccgatcaacctcaccacctcttgctcagcctatataccgccatcttcagcaaaccctgatgaaggctacaaagtaagcgcaagtacccacgtaaagacgttaggtcaaggtgtagcccatgaggtggcaagaaatgggctacattttctaccccagaaaactacgatagcccttatgaaacttaagggtcgaaggtggatttagcagtaaactgagagtagagtgcttagttgaacagggccctgaagcgcgtacacaccgcccgtcaccctcctcaagtatacttcaaaggacatttaactaaaacccctacgcatttatatagaggagacaagtcgtaacatggtaagtgtactggaaagtgcacttggacgaaccagagtgtagcttaacacaaagcacccaacttacacttaggagatttcaacttaacttgaccgctctgagctaaacctagccccaaacccactccaccttactaccagacaaccttagccaaaccatttacccaaataaagtataggcgatagaaattgaaacctggcgcaatagatatagtaccgcaagggaaagatgaaaaattataaccaagcataatatagcaaggactaacccctataccttctgcataatgaattaactagaaataactttgcaaggagagccaaagctaagacccccgaaaccagacgagctacctaagaacagctaaaagagcacacccgtctatgtagcaaaatagtgggaagatttataggtagaggcgacaaacctaccgagcctggtgatagctggttgtccaagatagaatcttagttcaactttaaatttgcccacagaaccctctaaatccccttgtaaatttaactgttagtccaaagaggaacagctctttggacactaggaaaaaaccttgtagagagagtaaaaaatttaacacccatagtaggcctaaaagcagccaccaattaagaaagcgttcaagctcaacacccactacctaaaaaatcccaaacatataactgaactcctcacacccaattggaccaatctatcaccctatagaagaactaatgttagtataagtaacatgaaaacattctcctccgcataagcctgcgtcagattaaaacactgaactgacaattaacagcccaatatctacaatcaaccaacaagtcattattaccctcactgtcaacccaacacaggcatgctcataaggaaaggttaaaaaaagtaaaaggaactcggcaaatcttaccccgcctgtttaccaaaaacatcacctctagcatcaccagtattagaggcaccgcctgcccagtgacacatgtttaacggccgcggtaccctaaccgtgcaaaggtagcataatcacttgttccttaaatagggacctgtatgaatggctccacgagggttcagctgtctcttacttttaaccagtgaaattgacctgcccgtgaagaggcgggcatgacacagcaagacgagaagaccctatggagctttaatttattaatgcaaacagtacctaacaaacccacaggtcctaaactaccaaacctgcattaaaaatttcggttggggcgacctcggagcagaacccaacctccgagcagtacatgctaagacttcaccagtcaaagcgaactactatactcaattgatccaataacttgaccaacggaacaagttaccctagggataacagcgcaatcctattctagagtccatatcaacaatagggtttacgacctcgatgttggatcaggacatcccgatggtgcagccgctattaaaggttcgtttgttcaacgattaaagtcctacgtgatctgagttcagaccggagtaatccaggtcggtttctatctacnttcaaattcctccctgtacgaaaggacaagagaaataaggcctacttcacaaagcgccttcccccgtaaatgatatcatctcaacttagcattatacccacacccacccaagaacagggtttgttaagatggcagagcccggtaatcgcataaaacttaaaactttacagtcagaggttcaattcctcttcttaacaacatacccatggccaacctcctactcctcattgtacccattctaatcgcaatggcattcctaatgcttaccgaacgaaaaattctaggctatatacaactacgcaaaggccccaacgttgtaggcccctacgggctactacaacccttcgctgacgccataaaactcttcaccaaagagcccctaaaacccgccacatctaccatcaccctctacatcaccgccccgaccttagctctcaccatcgctcttctactatgaacccccctccccatacccaaccccctggtcaacctcaacctaggcctcctatttattctagccacctctagcctagccgtttactcaatcctctgatcagggtgagcatcaaactcaaactacgccctgatcggcgcactgcgagcagtagcccaaacaatctcatatgaagtcaccctagccatcattctactatcaacattactaataagtggctcctttaacctctccacccttatcacaacacaagaacacctctgattactcctgccatcatgacccttggccataatatgatttatctccacactagcagagaccaaccgaacccccttcgaccttgccgaaggggagtccgaactagtctcaggcttcaacatcgaatacgccgcaggccccttcgccctattcttcatagccgaatacacaaacattattataataaacaccctcaccactacaatcttcctaggaacaacatatgacgcactctcccctgaactctacacaacatattttgtcaccaagaccctacttctaacctccctgttcttatgaattcgaacagcatacccccgattccgctacgaccaactcatacacctcctatgaaaaaacttcctaccactcaccctagcattacttatatgatatgtctccatacccattacaatctccagcattccccctcaaacctaagaaatatgtctgataaaagagttactttgatagagtaaataataggagcttaaacccccttatttctaggactatgagaatcgaacccatccctgagaatccaaaattctccgtgccacctatcacaccccatcctaaagtaaggtcagctaaataagctatcgggcccataccccgaaaatgttggttatacccttcccgtactaattaatcccctggcccaacccgtcatctactctaccatctttgcaggcacactcatcacagcgctaagctcgcactgattttttacctgagtaggcctagaaataaacatgctagcttttattccagttctaaccaaaaaaataaaccctcgttccacagaagctgccatcaagtatttcctcacgcaagcaaccgcatccataatccttctaatagctatcctcttcaacaatatactctccggacaatgaaccataaccaatactaccaatcaatactcatcattaataatcataatggctatagcaataaaactaggaatagccccctttcacttctgagtcccagaggttacccaaggcacccctctgacatccggcctgcttcttctcacatgacaaaaactagcccccatctcaatcatataccaaatctctccctcactaaacgtaagccttctcctcactctctcaatcttatccatcatagcaggcagttgaggtggattaaaccaaacccagctacgcaaaatcttagcatactcctcaattacccacataggatgaataatagcagttctaccgtacaaccctaacataaccattcttaatttaactatttatattatcctaactactaccgcattcctactactcaacttaaactccagcaccacgaccctactactatctcgcacctgaaacaagctaacatgactaacacccttaattccatccaccctcctctccctaggaggcctgcccccgctaaccggctttttgcccaaatgggccattatcgaagaattcacaaaaaacaatagcctcatcatccccaccatcatagccaccatcaccctccttaacctctacttctacctacgcctaatctactccacctcaatcacactactccccatatctaacaacgtaaaaataaaatgacagtttgaacatacaaaacccaccccattcctccccacactcatcgcccttaccacgctactcctacctatctccccttttatactaataatcttatagaaatttaggttaaatacagaccaagagccttcaaagccctcagtaagttgcaatacttaatttctgtaacagctaaggactgcaaaaccccactctgcatcaactgaacgcaaatcagccactttaattaagctaagcccttactagaccaatgggacttaaacccacaaacacttagttaacagctaagcaccctaatcaactggcttcaatctacttctcccgccgccgggaaaaaaggcgggagaagccccggcaggtttgaagctgcttcttcgaatttgcaattcaatatgaaaatcacctcggagctggtaaaaagaggcctaacccctgtctttagatttacagtccaatgcttcactcagccattttacctcacccccactgatgttcgccgaccgttgactattctctacaaaccacaaagacattggaacactatacctattattcggcgcatgagctggagtcctaggcacagctctaagcctccttattcgagccgagctgggccagccaggcaaccttctaggtaacgaccacatctacaacgttatcgtcacagcccatgcatttgtaataatcttcttcatagtaatacccatcataatcggaggctttggcaactgactagttcccctaataatcggtgcccccgatatggcgtttccccgcataaacaacataagcttctgactcttacctccctctctcctactcctgctcgcatctgctatagtggaggccggagcaggaacaggttgaacagtctaccctcccttagcagggaactactcccaccctggagcctccgtagacctaaccatcttctccttacacctagcaggtgtctcctctatcttaggggccatcaatttcatcacaacaattatcaatataaaaccccctgccataacccaataccaaacgcccctcttcgtctgatccgtcctaatcacagcagtcctacttctcctatctgtcccagtcctagctgctggcatcactatactactaacagaccgcaacctcaacaccaccttcttcgaccccgccggaggaggagaccccattctataccaacacctattctgatttttcggtcaccctgaagtttatattcttatcctaccaggcttcggaataatctcccatattgtaacttactactccggaaaaaaagaaccatttggatacataggtatggtctgagctatgatatcaattggcttcctagggtttatcgtgtgagcacaccatatatttacagtaggaatagacgtagacacacgagcatatttcacctccgctaccataatcatcgctatccccaccggcgtcaaagtatttagctgactcgccacactccacggaagcaatatgaaatgatctgctgcagtgctctgagccctaggattcatctttcttttcaccgtaggtggcctgactggcattgtattagcaaactcatcactagacatcgtactacacgacacgtactacgttgtagctcacttccactatgtcctatcaataggagctgtatttgccatcataggaggcttcattcactgatttcccctattctcaggctacaccctagaccaaacctacgccaaaatccatttcactatcatattcatcggcgtaaatctaactttcttcccacaacactttctcggcctatccggaatgccccgacgttactcggactaccccgatgcatacaccacatgaaacatcctatcatctgtaggctcattcatttctctaacagcagtaatattaataattttcatgatttgagaagccttcgcttcgaagcgaaaagtcctaatagtagaagaaccctccataaacctggagtgactatatggatgccccccaccctaccacacattcgaagaacccgtatacataaaatctagacaaaaaaggaaggaatcgaaccccccaaagctggtttcaagccaaccccatggcctccatgactttttcaaaaaggtattagaaaaaccatttcataactttgtcaaagttaaattataggctaaatcctatatatcttaatggcacatgcagcgcaagtaggtctacaagacgctacttcccctatcatagaagagcttatcacctttcatgatcacgccctcataatcattttccttatctgcttcctagtcctgtatgcccttttcctaacactcacaacaaaactaactaatactaacatctcagacgctcaggaaatagaaaccgtctgaactatcctgcccgccatcatcctagtcctcatcgccctcccatccctacgcatcctttacataacagacgaggtcaacgatccctcccttaccatcaaatcaattggccaccaatggtactgaacctacgagtacaccgactacggcggactaatcttcaactcctacatacttcccccattattcctagaaccaggcgacctgggactccttgacgttgacaatcgagtagtactcccgattgaagcccccattcgtataataattacatcacaagacgtcttgcactcatgagctgtccccacattaggcttaaaaacagatgcaattcccggacgtctaaaccaaaccactttcaccgctacacgaccgggggtatactacggtcaatgctctgaaatctgtggagcaaaccacagtttcatgcccatcgtcctagaattaattcccctaaaaatctttgaaatagggcccgtatttaccctatagcaccccctctaccccctctagagcccactgtaaagctaacttagcattaaccttttaagttaaagattaagagaaccaacacctctttacagtgaaatgccccaactaaatactaccgtatggcccaccataattacccccatactccttacactattcctcatcacccaactaaaaatattaaacacaaactaccacctacctccctcaccaaagcccataaaaataaaaaattataacaaaccctgagaaccaaaatgaacgaaaatctgttcgcttcattcattgcccccacaatcctaggcctacccgccgcagtactgatcattctatttccccctctattgatccccacctccaaatatctcatcaacaaccgactaatcaccacccaacaatgactaatcaaactaacctcaaaacaaatgataaccatacacaacactaaaggacgaacctgatctcttatactagtatccttaatcatttttattgccacaactaacctcctcggactcctgcctcactcatttacaccaaccacccaactatctataaacctagccatggccatccccttatgagcgggcgcagtaattataggctttcgctctaagattaaaaatgccctagcccacttcttaccacaaggcacacctacaccccttatccccatactagttattatcgaaaccatcagcctactcattcaaccaatagccctggccgtacgcctaaccgctaacattactgcaggccacctactcatgcacctaattggaagcgccaccctagcaatatcaaccattaaccttccctctacacttatcatcttcacaattctaattctactgactatcctagaaatcgctgtcgccttaatccaagcctacgttttcacacttctagtaagcctctacctgcacgacaacacataatgacccaccaatcacatgcctatcatatagtaaaacccagcccatgacccctaacaggggccctctcagccctcctaatgacctccggcctagccatgtgatttcacttccactccataacgctcctcatactaggcctactaaccaacacactaaccatataccaatgatggcgcgatgtaacacgagaaagcacataccaaggccaccacacaccacctgtccaaaaaggccttcgatacgggataatcctatttattacctcagaaatttttttcttcgcaggatttttctgagccttttaccactccagcctagcccctaccccccaattaggagggcactggcccccaacaggcatcaccccgctaaatcccctagaagtcccactcctaaacacatccgtattactcgcatcaggagtatcaatcacctgagctcaccatagtctaatagaaagcaaccgaaaccaaataattcaagcactgcttattacaattttactgggtctctattttaccctcctacaagcctcagagtacttcgagtctcccttcaccatttccgacggcatctacggctcaacattttttgtagccacaggcttccacggacttcacgtcattattggctcaactttcctcactatctgcttcatccgccaactaatatttcactttacatccaaacatcactttggcttcgaagccgccgcctgatactggcattttgtagatgtggtttgactatttctgtatgtctccatctattgatgagggtcttactcttttagtataaatagtaccgttaacttccaattaactagttttgacaacattcaaaaaagagtaataaacttcgccttaattttaataatcaacaccctcctagccttactactaataattattacattttgactaccacaactcaacggctacatagaaaaatccaccccttacgagtgcggcttcgaccctatatcccccgcccgcgtccctttctccataaaattcttcttagtagctattaccttcttattatttgatctagaaattgccctccttttacccctaccatgagccctacaaacaactaacctgccactaatagttatgtcatccctcttattaatcatcatcctagccctaagtctggcctatgagtgactacaaaaaggattagactgaaccgaattggtatatagtttaaacaaaacgaatgatttcgactcattaaattatgataatcatatttaccaaatgcccctcatttacataaatattatactagcatttaccatctcacttctaggaatactagtatatcgctcacacctcatatcctccctactatgcctagaaggaataatactatcgctgttcattatagctactctcataaccctcaacacccactccctcttagccaatattgtgcctattgccatactagtctttgccgcctgcgaagcagcggtgggcctagccctactagtctcaatctccaacacatatggcctagactacgtacataacctaaacctactccaatgctaaaactaatcgtcccaacaattatattactaccactgacatgactttccaaaaaacacataatttgaatcaacacaaccacccacagcctaattattagcatcatccctctactattttttaaccaaatcaacaacaacctatttagctgttccccaaccttttcctccgaccccctaacaacccccctcctaatactaactacctgactcctacccctcacaatcatggcaagccaacgccacttatccagtgaaccactatcacgaaaaaaactctacctctctatactaatctccctacaaatctccttaattataacattcacagccacagaactaatcatattttatatcttcttcgaaaccacacttatccccaccttggctatcatcacccgatgaggcaaccagccagaacgcctgaacgcaggcacatacttcctattctacaccctagtaggctcccttcccctactcatcgcactaatttacactcacaacaccctaggctcactaaacattctactactcactctcactgcccaagaactatcaaactcctgagccaacaacttaatatgactagcttacacaatagcttttatagtaaagatacctctttacggactccacttatgactccctaaagcccatgtcgaagcccccatcgctgggtcaatagtacttgccgcagtactcttgaaactaggcggctatggtataatacgcctcacactcattctcaaccccctgacaaaacacatagcctaccccttccttgtactatccctatgaggcataattataacaagctccatctgcctacgacaaacagacctaaaatcgctcattgcatactcttcaatcagccacatagccctcgtagtaacagccattctcatccaaaccccctgaagcttcaccggcgcagtcattctcataatcgcccacggacttacatcctcattactattctgcctagcaaactcaaactacgaacgcactcacagtcgcatcataatcctctctcaaggacttcaaactctactcccactaatagctttttgatgacttctagcaagcctcgctaacctcgccttaccccccactattaacctactgggagaactctctgtgctagtaaccacgttctcctgatcaaatatcactctcctacttacaggactcaacatactagtcacagccctatactccctctacatatttaccacaacacaatggggctcactcacccaccacattaacaacataaaaccctcattcacacgagaaaacaccctcatgttcatacacctatcccccattctcctcctatccctcaaccccgacatcattaccgggttttcctcttgtaaatatagtttaaccaaaacatcagattgtgaatctgacaacagaggcttacgaccccttatttaccgagaaagctcacaagaactgctaactcatgcccccatgtctaacaacatggctttctcaacttttaaaggataacagctatccattggtcttaggccccaagaattttggtgcaactccaaataaaagtaataaccatgcacactactataaccaccctaaccctaacttccctaattccccccatccttaccaccctcgttaaccctaacaaaaaaaactcatacccccattatgtaaaatccattgtcgcatccacctttattatcagtctcttccccacaacaatattcatgtgcctagaccaagaagttattatctcgaactgacactgagccacaacccaaacaacccagctctccctaagcttcaaactagactacttctccataatattcatccctgtagcattgttcgttacatggtccatcatagaattctcactgtgatatataaactcagacccaaacattaatcagttcttcaaatatctactcatcttcctaattaccatactaatcttagttaccgctaacaacctattccaactgttcatcggctgagagggcgtaggaattatatccttcttgctcatcagttgatgatacgcccgagcagatgccaacacagcagccattcaagcaatcctatacaaccgtatcggcgatatcggtttcatcctcgccttagcatgatttatcctacactccaactcatgagacccacaacaaatagcccttctaaacgctaatccaagcctcaccccactactaggcctcctcctagcagcagcaggcaaatcagcccaattaggtctccacccctgactcccctcagccatagaaggccccaccccagtctcagccctactccactcaagcactatagttgtagcaggaatcttcttactcatccgcttccaccccctagcagaaaatagcccactaatccaaactctaacactatgcttaggcgctatcaccactctgttcgcagcagtctgcgcccttacacaaaatgacatcaaaaaaatcgtagccttctccacttcaagtcaactaggactcataatagttacaatcggcatcaaccaaccacacctagcattcctgcacatctgtacccacgccttcttcaaagccatactatttatgtgctccgggtccatcatccacaaccttaacaatgaacaagatattcgaaaaataggaggactactcaaaaccatacctctcacttcaacctccctcaccattggcagcctagcattagcaggaatacctttcctcacaggtttctactccaaagaccacatcatcgaaaccgcaaacatatcatacacaaacgcctgagccctatctattactctcatcgctacctccctgacaagcgcctatagcactcgaataatccttctcaccctaacaggtcaacctcgcttccccacccttactaacattaacgaaaataaccccaccctactaaaccccattaaacgcctggcagccggaagcctattcgcaggatttctcattactaacaacatttcccccgcatcccccttccaaacaacaatccccctctacctaaaactcacagccctcgctgtcactttcctaggacttctaacagccctagacctcaactacctaaccaacaaacttaaaataaaatccccactatgcacattttatttctccaacatactcggattctaccctagcatcacacaccgcacaatcccctatctaggccttcttacgagccaaaacctgcccctactcctcctagacctaacctgactagaaaagctattacctaaaacaatttcacagcaccaaatctccacctccatcatcacctcaacccaaaaaggcataattaaactttacttcctctctttcttcttcccactcatcctaaccctactcctaatcacataacctattcccccgagcaatctcaattacaatatatacaccaacaaacaatgttcaaccagtaactactactaatcaacgcccataatcatacaaagcccccgcaccaataggatcctcccgaatcaaccctgacccctctccttcataaattattcagcttcctacactattaaagtttaccacaaccaccaccccatcatactctttcacccacagcaccaatcctacctccatcgctaaccccactaaaacactcaccaagacctcaacccctgacccccatgcctcaggatactcctcaatagccatcgctgtagtatatccaaagacaaccatcattccccctaaataaattaaaaaaactattaaacccatataacctcccccaaaattcagaataataacacacccgaccacaccgctaacaatcaatactaaacccccataaataggagaaggcttagaagaaaaccccacaaaccccattactaaacccacactcaacagaaacaaagcatacatcattattctcgcacggactacaaccacgaccaatgatatgaaaaaccatcgttgtatttcaactacaagaacaccaatgaccccaatacgcaaaattagccccctaataaaattaattaaccgctcattcatcgacctccccaccccatccaacatctccgcatgatgaaacttcggctcactccttggcgcctgcctgatcctccaaatcaccacaggactattcctagccatgcactactcaccagacgcctcaaccgccttttcatcaatcgcccacatcactcgagacgtaaattatggctgaatcatccgctaccttcacgccaatggcgcctcaatattctttatctgcctcttcctacacatcgggcgaggcctatattacggatcatttctctactcagaaacctgaaacatcggcattatcctcctgcttgcaactatagcaacagccttcataggctatgtcctcccgtgaggccaaatatcattctgaggggccacagtaattacaaacttactatccgccatcccatacattggggcagacctagttcaatgaatctgaggaggctactcagtagacagtcccaccctcacacgattctttacctttcacttcatcttgcccttcattattgcagccctagcagcactccacctcctattcttgcacgaaacgggatcaaacaaccccctaggaatcacctcccattccgataaaatcaccttccacccttactacacaatcaaagacgccctcggcttacttctcttccttctctccttaatgacattaacactattctcaccagacctcctaggcgacccagacaattataccctagccaaccccttaaacacccctccccacatcaagcccgaatgatatttcctattcgcctacacaattctccgatccgtccctaacaaactaggaggcgtccttgccctattactatccatcctcatcctagcaataatccccatcctccatatatccaaacaacaaagcataatatttcgcccactaagccaatcactttattgactcctagccgcagacctcctcattctaacctgaatcggaggacaaccagtaagctacccttttaccatcattggacaagtagcatccgtactatacttcacaacaatcctaatcctaataccaactatctccctaattgaaaacaaaatactcaaatgggcctgtccttgtagtataaactaatacaccagtcttgtaaaccggagatgaaaacctttttccaaggacaaatcagagaaaaagtctttaactccaccattagcacccaaagctaagattctaatttaaactattctctgttctttcatggggaagcagatttgggtaccacccaagtattgactcacccatcaacaaccgctatgtatttcgtacattactgccagccaccatgaatattgtacggtaccataaatacttgaccacctgtagtacataaaaacccaatccacatcaaaaccccctcctcatgcttacaagcaagtacagcaatcaaccctcaactatcacacatcaactgcaactccaaagtcacccctcacccactaggataccaacaaacctactcacccttaacagtacatagtacataaagccatttaccgtacatagcacattacagtcaaatcccttctcgtccccatggatgacccccctcagataggggtcccttggccaccatcctccgtgaaatcaatatcccgcacaagagtgctactctcctcgctccgggcccataacacttgggggtagctaaagtgaactgtatccgacatctggttcctacttcagggtcataaagcctaaatagcccacacgttccccttaaataagacatcacgatg

SEQ ID NO: 279 - DNA, 16572 bp, Homo sapiens mitochondrial
  3110: "n" refers to a nucleotide at position 3107 of the Cambridge Reference Sequence (CRS, Anderson et al. 1981 Nature 290:457-465), later determined to be absent from the human mtDNA sequence according to the revised CRS (rCRS, Andrews et al. 1999 Nature Genetics 23:147); "n" therefore represents a single nucleotide deletion at a position corresponding to nucleotide 3107 of SEQ ID NO:1 as provided herein.
gatcacaggtctatcaccctattaaccactcacgggagctctccatgcatttggtattttcgtctggggggtatgcacgcgatagcattgcgagacgctggagccggagcaccctatgtcgcagtatctgtctttgattcctgcctcatcccattatttatcgcacctacgttcaatattacaggcgaacatacttactaaagtgtgttaattaattaatgcttgtaggacataataataacaattgaatgtctgcacagccgctttccacacagacatcataacaaaaaatttccaccaaaccccccctccccccccgcttctggccacagcacttaaacacatctctgccaaaccccaaaaacaaagaaccctaacaccagcctaaccagatttcaaattttatcttttggcggtatgcacttttaacagtcaccccccaactaacacattattttcccctcccactcccatactactaatctcatcaatacaacccccgcccatcctacccagcacacacacaccgctgctaaccccataccccgaaccaaccaaaccccaaagacaccccccacagtttatgtagcttacctcctcaaagcaatacactgaaaatgtttagacgggctcacatcaccccataaacaaataggtttggtcctagcctttctattagctcttagtaagattacacatgcaagcatccccgttccagtgagttcaccctctaaatcaccacgatcaaaagggacaagcatcaagcacgcagcaatgcagctcaaaacgcttagcctagccacacccccacgggaaacagcagtgattaacctttagcaataaacgaaagtttaactaagctatactaaccccagggttggtcaatttcgtgccagccaccgcggtcacacgattaacccaagtcaatagaagccggcgtaaagagtgttttagatcaccccctccccaataaagctaaaactcacctgagttgtaaaaaactccagttgacacaaaatagactacgaaagtggctttaacatatctgaacacacaatagctaagacccaaactgggattagataccccactatgcttagccctaaacctcaacagttaaatcaacaaaactgctcgccagaacactacgagccacagcttaaaactcaaaggacctggcggtgcttcatatccctctagaggagcctgttctgtaatcgataaaccccgatcaacctcaccacctcttgctcagcctatataccgccatcttcagcaaaccctgatgaaggctacaaagtaagcgcaagtacccacgtaaagacgttaggtcaaggtgtagcccatgaggtggcaagaaatgggctacattttctaccccagaaaactacgatagcccttatgaaacttaagggtcgaaggtggatttagcagtaaactgagagtagagtgcttagttgaacagggccctgaagcgcgtacacaccgcccgtcaccctcctcaagtatatttcaaaggacatttaactaaaacccctacgcatttatatagaggagacaagtcgtaacatggtaagtgtactggaaagtgcacttggacgaaccagagtgtagcttaacacaaagcacccaacttacacttaggagatttcaacttaacttgaccgctctgagctaaacctagccccaaacccactccaccttactaccagacaaccttagccaaaccatttacccaaataaagtataggcgatagaaattgaaacctggcgcaatagatatagtaccgcaagggaaagatgaaaaattataaccaagcataatatagcaaggactaacccctataccttctgcataatgaattaactagaaataactttgcaaggagagccaaagctaagacccccgaaaccagacgagctacctaagaacagctaaaagagcacacccgtctatgtagcaaaatagtgggaagatttataggtagaggcgacaaacctaccgagcctggtgatagctggttgtccaagatagaatcttagttcaactttaaatttgcccacagaaccctctaaatccccttgtaaatttaactgttagtccaaagaggaacagctctttggacactaggaaaaaaccttgtagagagagtaaaaaatttaacacccatagtaggcctaaaagcagccaccaattaagaaagcgttcaagctcaacacccactacctaaaaaatcccaaacatataactgaactcctcacacccaattggaccaatctatcaccctatagaagaactaatgttagtataagtaacatgaaaacattctcctccgcataagcctgcgtcagattaaaacactgaactgacaattaacagcccaatatctacaatcaaccaacaagtcattattaccctcactgtcaacccaacacaggcatgctcataaggaaaggttaaaaaaagtaaaaggaactcggcaaatcttaccccgcctgtttaccaaaaacatcacctctagcatcaccagtattagaggcaccgcctgcccagtgacacatgtttaacggccgcggtaccctaaccgtgcaaaggtagcataatcacttgttccttaaatagggacctgtatgaatggctccacgagggttcagctgtctcttacttttaaccagtgaaattgacctgcccgtgaagaggcgggcataacacagcaagacgagaagaccctatggagctttaatttattaatgcaaacagtacctaacaaacccacaggtcctaaactaccaaacctgcattaaaaatttcggttggggcgacctcggagcagaacccaacctccgagcagtacatgctaagacttcaccagtcaaagcgaactactatactcaattgatccaataacttgaccaacggaacaagttaccctagggataacagcgcaatcctattctagagtccatatcaacaatagggtttacgacctcgatgttggatcaggacatcccaatggtgcagccgctattaaaggttcgtttgttcaacgattaaagtcctacgtgatctgagttcagaccggagtaatccaggtcggtttctatctacnttcaaattcctccctgtacgaaaggacaagagaaataaggcctacttcacaaagcgccttcccccgtaaatgatatcatctcaacttagtattatacccacacccacccaagaacagggtttgttaagatggcagagcccggtaatcgcataaaacttaaaactttacagtcagaggttcaattcctcttcttaacaacatacccatggccaacctcctactcctcattgtacccattctaatcgcaatggcattcctaatgcttaccgaacgaaaaattctaggctatatacaactacgcaaaggccccaacgttgtaggcccctacgggctactacaacccttcgctgacgccataaaactcttcaccaaagagcccctaaaacccgccacatctaccatcaccctctacatcaccgccccgaccttagctctcaccatcgctcttctactatgaacccccctccccatacccaaccccctggtcaacctcaacctaggcctcctatttattctagccacctctagcctagccgtttactcaatcctctgatcagggtgagcatcaaactcaaactacgccctgatcggcgcactgcgagcagtagcccaaacaatctcatatgaagtcaccctagccatcattctactatcaacattactaataagtggctcctttaacctctccacccttatcacaacacaagaacacctctgattactcctgccatcatgacccttggccataatatgatttatctccacactagcagagaccaaccgaacccccttcgaccttgccgaaggggagtccgaactagtctcaggcttcaacatcgaatacgccgcaggccccttcgccctattcttcatagccgaatacacaaacattattataataaacaccctcaccactacaatcttcctaggaacaacatatgacgcactctcccctgaactctacacaacatattttgtcaccaagaccctacttctaacctccctgttcttatgaattcgaacagcatacccccgattccgctacgaccaactcatacacctcctatgaaaaaacttcctaccactcaccctagcattacttatatgatatgtctccatacccattacaatctccagcattccccctcaaacctaagaaatatgtctgataaaagagttactttgatagagtaaataataggagcttaaacccccttatttctaggactatgagaatcgaacccatccctgagaatccaaaattctccgtgccacctatcacaccccatcctaaagtaaggtcagctaaataagctatcgggcccataccccgaaaatgttggttatacccttcccgtactaattaatcccctggcccaacccgtcatctactctaccatctttgcaggcacactcatcacagcgctaagctcgcactgattttttacctgagtaggcctagaaataaacatgctagcttttattccagttctaaccaaaaaaataaaccctcgttccacagaagctgccatcaagtatttcctcacgcaagcaaccgcatccataatccttctaatagctatcctcttcaacaatatactctccggacaatgaaccataaccaatactaccaatcaatactcatcattaataatcataatggctatagcaataaaactaggaatagccccctttcacttctgagtcccagaggttacccaaggcacccctctgacatccggcctgcttcttctcacatgacaaaaactagcccccatctcaatcatataccaaatctctccctcactaaacgtaagccttctcctcactctctcaatcttatccatcatagcaggcagttgaggtggattaaaccaaacccagctacgcaaaatcttagcatactcctcaattacccacataggatgaataatagcagttctaccgtacaaccctaacataaccattcttaatttaactatttatattatcctaactactaccgcattcctactactcaacttaaactccagcaccacgaccctactactatctcgcacctgaaacaagctaacatgactaacacccttaattccatccaccctcctctccctaggaggcctgcccccgctaaccggctttttgcccaaatgggccattatcgaagaattcacaaaaaacaatagcctcatcatccccaccatcatagccaccatcaccctccttaacctctacttctacctacgcctaatctactccacctcaatcacactactccccatatctaacaacgtaaaaataaaatgacagtttgaacatacaaaacccaccccattcctccccacactcatcgcccttaccacgctactcctacctatctccccttttatactaataatcttatagaaatttaggttaaatacagaccaagagccttcaaagccctcagtaagttgcaatacttaatttctgtaacagctaaggactgcaaaaccccactctgcatcaactgaacgcaaatcagccactttaattaagctaagcccttactagaccaatgggacttaaacccacaaacacttagttaacagctaagcaccctaatcaactggcttcaatctacttctcccgccgccgggaaaaaaggcgggagaagccccggcaggtttgaagctgcttcttcgaatttgcaattcaatatgaaaatcacctcggagctggtaaaaagaggcctaacccctgtctttagatttacagtccaatgcttcactcagccattttacctcacccccactgatgttcgccgaccgttgactattctctacaaaccacaaagacattggaacactatacctattattcggcgcatgagctggagtcctaggcacagctctaagcctccttattcgagccgagctgggccagccaggcaaccttctaggtaacgaccacatctacaacgttatcgtcacagcccatgcatttgtaataatcttcttcatagtaatacccatcataatcggaggctttggcaactgactagttcccctaataatcggtgcccccgatatggcgtttccccgcataaacaacataagcttctgactcttacctccctctctcctactcctgctcgcatctgctatagtggaggccggagcaggaacaggttgaacagtctaccctcccttagcagggaactactcccaccctggagcctccgtagacctaaccatcttctccttacacctagcaggtgtctcctctatcttaggggccatcaatttcatcacaacaattatcaatataaaaccccctgccataacccaataccaaacgcccctcttcgtctgatccgtcctaatcacagcaatcctacttctcctatctctcccagtcctagctgctggcatcactatactactaacagaccgcaacctcaacaccaccttcttcgaccccgccggaggaggagaccccattctataccaacacctattctgatttttcggtcaccctgaagtttatattcttatcctaccaggcttcggaataatctcccatattgtaacttactactccggaaaaaaagaaccatttggatacataggtatggtctgagctatgatatcaattggcttcctaggatttatcgtgtgagcacaccatatatttacagtaggaatagacgtagacacacgagcatatttcacctccgctaccataatcatcgctatccccaccggcgtcaaagtatttagctgactcgccacactccacggaagcaatatgaaatgatctgctgcagtgctctgagccctaggattcatctttcttttcaccgtaggtggcctgactggcattgtattagcaaactcatcactagacatcgtactacacgacacgtactacgttgtagcccacttccactatgtcctatcaataggagctgtatttgccatcataggaggcttcattcactgatttcccctattctcaggctacaccctagaccaaacctacgccaaaatccatttcactatcatattcatcggcgtaaatctaactttcttcccacaacactttctcggcctatccggaatgccccgacgttactcggactaccccgatgcatacaccacatgaaacatcctatcatctgtaggctcattcatttctctaacagcagtaatattaataattttcatgatttgagaagccttcgcttcgaagcgaaaagtcctaatagtagaagaaccctccataaacctggagtgactatatggatgccccccaccctaccacacattcgaagaacccgtatacataaaatctagacaaaaaaggaaggaatcgaaccccccaaagctggtttcaagccaaccccatggcctccatgactttttcaaaaaggtattagaaaaaccatttcataactttgtcaaagttaaattataggctaaatcctatatatcttaatggcacatgcagcgcaagtaggtctacaagacgctacttcccctatcatagaagagcttatcacctttcatgatcacgccctcataatcattttccttatctgcttcctagtcctgtatgcccttttcctaacactcacaacaaaactaactaatactaacatctcagacgctcaggaaatagaaaccgtctgaactatcctgcccgccatcatcctagtcctcatcgccctcccatccctacacatcctttacataacagacgaggtcaacgatccctcccttaccatcaaatcaattggccaccaatggtactgaacctacgagtacaccgactacggcggactaatcttcaactcctacatacttcccccattattcctagaaccaggcgacctgcgactccttgacgttgacaatcgagtagtactcccgattgaagcccccattcgtataataattacatcacaagacgtcttgcactcatgagctgtccccacattaggcttaaaaacagatgcaattcccggacgtctaaaccaaaccactttcaccgctacacgaccgggggtatactacggtcaatgctctgaaatctgtggagcaaaccacagtttcatgcccatcgtcctagaattaattcccctaaaaatctttgaaatagggcccgtatttaccctatagcaccccctctaccccctctagagcccactgtaaagctaacttagcattaaccttttaagttaaagattaagagaaccaacacctctttacagtgaaatgccccaactaaatactaccgtatggcccaccataattacccccatactccttacactattcctcatcacccaactaaaaatattaaacacaaactaccacctacctccctcaccaaagcccataaaaataaaaaattataacaaaccctgagaaccaaaatgaacgaaaatctgttcgcttcattcattgcccccacaatcctaggcctacccgccgcagtactgatcattctatttccccctctattgatccccacctccaaatatctcatcaacaaccgactaatcaccacccaacaatgactaatcaaactaacctcaaaacaaatgataaccatacacaacactaaaggacgaacctgatctcttatactagtatccttaatcatttttattgccacaactaacctcctcggactcctgcctcactcatttacaccaaccacccaactatctataaacctagccatggccatccccttatgagcgggcgcagtgattataggctttcgctctaagattaaaaatgccctagcccacttcttaccacaaggcacacctacaccccttatccccatactagttattatcgaaaccatcagcctactcattcaaccaatagccctggccgtacgcctaaccgctaacattactgcaggccacctactcatgcacctaattggaagcgccaccctagcaatatcaaccattaaccttccctctacacttatcatcttcacaattctaattctactgactatcctagaaatcgctgtcgccttaatccaagcctacgttttcacacttctagtaagcctctacctgcacgacaacacataatgacccaccaatcacatgcctatcatatagtaaaacccagcccatgacccctaacaggggccctctcagccctcctaatgacctccggcctagccatgtgatttcacttccactccataacgctcctcatactaggcctactaaccaacacactaaccatataccaatgatggcgcgatgtaacacgagaaagcacataccaaggccaccacacaccacctgtccaaaaaggccttcgatacgggataatcctatttattacctcagaagtttttttcttcgcaggatttttctgagccttttaccactccagcctagcccctaccccccaattaggagggcactggcccccaacaggcatcaccccgctaaatcccctagaagtcccactcctaaacacatccgtattactcgcatcaggagtatcaatcacctgagctcaccatagtctaatagaaaacaaccgaaaccaaataattcaagcactgcttattacaattttactgggtctctattttaccctcctacaagcctcagagtacttcgagtctcccttcaccatttccgacggcatctacggctcaacattttttgtagccacaggcttccacggacttcacgtcattattggctcaactttcctcactatctgcttcatccgccaactaatatttcactttacatccaaacatcactttggcttcgaagccgccgcctgatactggcattttgtagatgtggtttgactatttctgtatgtctccatctattgatgagggtcttactcttttagtataaatagtaccgttaacttccaattaactagttttgacaacattcaaaaaagagtaataaacttcgccttaattttaataatcaacaccctcctagccttactactaataattattacattttgactaccacaactcaacggctacatagaaaaatccaccccttacgagtgcggcttcgaccctatatcccccgcccgcgtccctttctccataaaattcttcttagtagctattaccttcttattatttgatctagaaattgccctccttttacccctaccatgagccctacaaacaactaacctgccactaatagttatgtcatccctcttattaatcatcatcctagccctaagtctggcctatgagtgactacaaaaaggattagactgaaccgaattggtatatagtttaaacaaaacgaatgatttcgactcattaaattatgataatcatatttaccaaatgcccctcatttacataaatattatactagcatttaccatctcacttctaggaatactagtatatcgctcacacctcatatcctccctactatgcctagaaggaataatactatcgctgttcattatagctactctcataaccctcaacacccactccctcttagccaatattgtgcctattgccatactagtctttgccgcctgcgaagcagcggtgggcctagccctactagtctcaatctccaacacatatggcctagactacgtacataacctaaacctactccaatgctaaaactaatcgtcccaacaattatattactaccactgacatgactttccaaaaaacacataatttgaatcaacacaaccacccacagcctaattattagcatcatccctctactattttttaaccaaatcaacaacaacctatttagctgttccccaaccttttcctccgaccccctaacaacccccctcctaatactaactacctgactcctacccctcacaatcatggcaagccaacgccacttatccagtgaaccactatcacgaaaaaaactctacctctctatactaatctccctacaaatctccttaattataacattcacagccacagaactaatcatattttatatcttcttcgaaaccacacttatccccaccttggctatcatcacccgatgaggcaaccagccagaacgcctgaacgcaggcacatacttcctattctacaccctagtaggctcccttcccctactcatcgcactaatttacactcacaacaccctaggctcactaaacattctactactcactctcactgcccaagaactatcaaactcctgagccaacaacttaatatgactagcttacacaatagcttttatagtaaagatacctctttacggactccacttatgactccctaaagcccatgtcgaagcccccatcgctgggtcaatagtacttgccgcagtactcttaaaactaggcggctatggtataatacgcctcacactcattctcaaccccctgacaaaacacatagcctaccccttccttgtactatccctatgaggcataattataacaagctccatctgcctacgacaaacagacctaaaatcgctcattgcatactcttcaatcagccacatagccctcgtagtaacagccattctcatccaaaccccctgaagcttcaccggcgcagtcattctcataatcgcccacgggcttacatcctcattactattctgcctagcaaactcaaactacgaacgcactcacagtcgcatcataatcctctctcaaggacttcaaactctactcccactaatagctttttgatgacttctagcaagcctcgctaacctcgccttaccccccactattaacctactgggagaactctctgtgctagtaaccacgttctcctgatcaaatatcactctcctacttacaggactcaacatactagtcacagccctatactccctctacatatttaccacaacacaatggggctcactcacccaccacattaacaacataaaaccctcattcacacgagaaaacaccctcatgttcatacacctatcccccattctcctcctatccctcaaccccgacatcattaccgggttttcctcttgtaaatatagtttaaccaaaacatcagattgtgaatctgacaacagaggcttacgaccccttatttaccgagaaagctcacaagaactgctaactcatgcccccatgtctaacaacatggctttctcaacttttaaaggataacagctatccattggtcttaggccccaaaaattttggtgcaactccaaataaaagtaataaccatgcacactactataaccaccctaaccctgacttccctaattccccccatccttaccaccctcgttaaccctaacaaaaaaaactcatacccccattatgtaaaatccattgtcgcatccacctttattatcagtctcttccccacaacaatattcatgtgcctagaccaagaagttattatctcgaactgacactgagccacaacccaaacaacccagctctccctaagcttcaaactagactacttctccataatattcatccctgtagcattgttcgttacatggtccatcatagaattctcactgtgatatataaactcagacccaaacattaatcagttcttcaaatatctactcatcttcctaattaccatactaatcttagttaccgctaacaacctattccaactgttcatcggctgagagggcgtaggaattatatccttcttgctcatcagttgatgatacgcccgagcagatgccaacacagcagccattcaagcaatcctatacaaccgtatcggcgatatcggtttcatcctcgccttagcatgatttatcctacactccaactcatgagacccacaacaaatagcccttctaaacgctaatccaagcctcaccccactactaggcctcctcctagcagcagcaggcaaatcagcccaattaggtctccacccctgactcccctcagccatagaaggccccaccccagtctcagccctactccactcaagcactatagttgtagcaggaatcttcttactcatccgcttccaccccctagcagaaaatagcccactaatccaaactctaacactatgcttaggcgctatcaccactctgttcgcagcagtctgcgcccttacacaaaatgacatcaaaaaaatcgtagccttctccacttcaagtcaactaggactcataatagttacaatcggcatcaaccaaccacacctagcattcctgcacatctgtacccacgccttcttcaaagccatactatttatgtgctccgggtccatcatccacaaccttaacaatgaacaagatattcgaaaaataggaggactactcaaaaccatacctctcacttcaacctccctcaccattggcagcctagcattagcaggaatacctttcctcacaggtttctactccaaagaccacatcatcgaaaccgcaaacatatcatacacaaacgcctgagccctatctattactctcatcgctacctccctgacaagcgcctatagcactcgaataattcttctcaccctaacaggtcaacctcgcttccccacccttactaacattaacgaaaataaccccaccctactaaaccccattaaacgcctggcagccggaagcctattcgcaggatttctcattactaacaacatttcccccgcatcccccttccaaacaacaatccccctctacctaaaactcacagccctcgctgtcactttcctaggacttctaacagccctagacctcaactacctaaccaacaaacttaaaataaaatccccactatgcacattttatttctccaacatactcggattctaccctagcatcacacaccgcacaatcccctatctaggccttcttacgagccaaaacctgcccctactcctcctagacctaacctgactagaaaagctattacctaaaacaatttcacagcaccaaatctccacctccatcatcacctcaacccaaaaaggcataattaaactttacttcctctctttcttcttcccactcatcctaaccctactcctaatcacataacctattcccccgagcaatctcaattacaatatatacaccaacaaacaatgttcaaccagtaactactactaatcaacgcccataatcatacaaagcccccgcaccaataggatcctcccgaatcaaccctgacccctctccttcataaattattcagcttcctacactattaaagtttaccacaaccaccaccccatcatactctttcacccacagcaccaatcctacctccatcgctaaccccactaaaacactcaccaagacctcaacccctgacccccatgcctcaggatactcctcaatagccatcgctgtagtatatccaaagacaaccatcattccccctaaataaattaaaaaaactattaaacccatataacctcccccaaaattcagaataataacacacccgaccacaccgctaacaatcaatactaaacccccataaataggagaaggcttagaagaaaaccccacaaaccccattactaaacccacactcaacagaaacaaagcatacatcattattctcgcacggactacaaccacgaccaatgatatgaaaaaccatcgttgtatttcaactacaagaacaccaatgaccccaatacgcaaaactaaccccctaataaaattaattaaccactcattcatcgacctccccaccccatccaacatctccgcatgatgaaacttcggctcactccttggcgcctgcctgatcctccaaatcaccacaggactattcctagccatgcactactcaccagacgcctcaaccgccttttcatcaatcgcccacatcactcgagacgtaaattatggctgaatcatccgctaccttcacgccaatggcgcctcaatattctttatctgcctcttcctacacatcgggcgaggcctatattacggatcatttctctactcagaaacctgaaacatcggcattatcctcctgcttgcaactatagcaacagccttcataggctatgtcctcccgtgaggccaaatatcattctgaggggccacagtaattacaaacttactatccgccatcccatacattgggacagacctagttcaatgaatctgaggaggctactcagtagacagtcccaccctcacacgattctttacctttcacttcatcttgcccttcattattgcagccctagcagcactccacctcctattcttgcacgaaacgggatcaaacaaccccctaggaatcacctcccattccgataaaatcaccttccacccttactacacaatcaaagacgccctcggcttacttctcttccttctctccttaatgacattaacactattctcaccagacctcctaggcgacccagacaattataccctagccaaccccttaaacacccctccccacatcaagcccgaatgatatttcctattcgcctacacaattctccgatccgtccctaacaaactaggaggcgtccttgccctattactatccatcctcatcctagcaataatccccatcctccatatatccaaacaacaaagcataatatttcgcccactaagccaatcactttattgactcctagccgcagacctcctcattctaacctgaatcggaggacaaccagtaagctacccttttaccatcattggacaagtagcatccgtactatacttcacaacaatcctaatcctaataccaactatctccctaattgaaaacaaaatactcaaatgggcctgtccttgtagtataaactaatacaccagtcttgtaaaccggagatgaaaacctttttccaaggacaaatcagagaaaaagtctttaactccaccattagcacccaaagctaagattctaatttaaactattctctgttctttcatggggaagcagatttgggtaccacccaagtattgactcacccatcaacaaccgctatgtatttcgtacattactgccagccaccatgaatattgtacggtaccataaatacttgaccacctgtagtacataaaaacccaatccacatcaaccccccccccccatgcttacaagcaagtacagcaatcaaccctcaactatcacacatcaactgcaactccaaagccacccctcacccactaggataccaacaaacctacccacccttaacagtacatagtacataaagccatttaccgtacatagcacattacagtcaaatcccctctcgcccccatggatgacccccctcagataggggtcccttgaccaccatcctccgtgaaatcaatatcccgcacaagagtgctactctcctcgctccgggcccataacacttgggggtagctaaagtgaactgtatccgacatctggttcctacttcagggccataaagcctaaatagcccacacgttccccttaaataagacatcacgatg

SEQ ID NO: 280 - DNA, 16570 bp, Homo sapiens mitochondrial
  3108: "n" refers to a nucleotide at position 3107 of the Cambridge Reference Sequence (CRS, Anderson et al. 1981 Nature 290:457-465), later determined to be absent from the human mtDNA sequence according to the revised CRS (rCRS, Andrews et al. 1999 Nature Genetics 23:147); "n" therefore represents a single nucleotide deletion at a position corresponding to nucleotide 3107 of SEQ ID NO:1 as provided herein.
gatcacaggtctatcaccctattaaccactcacgggagctctccatgcatttggtattttcgtctggggggtgtgcacgcgatagcattgcgagacgctggagccggagcaccctatgtcgcagtatctgtctttgattcctgcctcatcccattatttatcgcacctacgttcaatattacaggcgaacatacctactaaagtgtgttaattaattaatgcttgtaggacataataataacaattgaatgtctgcacagccgctttccacacagacatcataacaaaaaatttccaccaaaccccccctcccccgccttctggccacagcacttaaacacatctctgccaaaccccaaaaacaaagaaccctaacaccagcctaaccagatttcaaattttatcttttggcggtatgcacttttaacagtcaccccccaactaacacattattttcccctcccactcccatactactaatctcatcaatacaacccccgcccatcctacccagcacacacacaccgctgctaaccccataccccgaaccaaccaaaccccaaagacaccccccacagtttatgtagcttacctcctcaaagcaatacactgaaaatgtttagacgggctcacatcaccccataaacaaataggtttggtcctagcctttctattagctcttagtaagattacacatgcaagcatccccattccagtgagttcaccctctaaatcaccacgatcaaaagggacaagcatcaagcacgcagcaatgcagctcaaaacgcttagcctagccacacccccacgggaaacagcagtgattaacctttagcaataaacgaaagtttaactaagctatactaaccccagggttggtcaatttcgtgccagccaccgcggtcacacgattaacccaagtcaatagaagccggcgtaaagagtgttttagatcaccccctccccaataaagctaaaactcacctgagttgtaaaaaactccagttgacacaaaatagactacgaaagtggctttaacatatctgaacacacaatagctaagacccaaactgggattagataccccactatgcttagccctaaacctcaacagttaaatcaacaaaactgctcgccagaacactacgagccacagcttaaaactcaaaggacctggcggtgcttcatatccctctagaggagcctgttctgtaatcgataaaccccgatcaacctcaccacctcttgctcagcctatataccgccatcttcagcaaaccctgatgaaggctacaaagtaagcgcaagtacccacgtaaagacgttaggtcaaggtgtagcccatgaggtggcaagaaatgggctacattttctaccccagaaaactacgatagcccttatgaaacttaagggtcgaaggtggatttagcagtaaactgagagtagagtgcttagttgaacagggccctgaagcgcgtacacaccgcccgtcaccctcctcaagtatacttcaaaggacatttaactaaaacccctacgcatttatatagaggagacaagtcgtaacatggtaagtgtactggaaagtgcacttggacgaaccagagtgtagcttaacacaaagcacccaacttacacttaggagatttcaacttaacttgaccgctctgagctaaacctagccccaaacccactccaccttactaccagacaaccttagccaaaccatttacccaaataaagtataggcgatagaaattgaaacctggcgcaatagatatagtaccgcaagggaaagatgaaaaattataaccaagcataatatagcaaggactaacccctataccttctgcataatgaattaactagaaataactttgcaaggagaaccaaagctaagacccccgaaaccagacgagctacctaagaacagctaaaagagcacacccgtctatgtagcaaaatagtgggaagatttataggtagaggcgacaaacctaccgagcctggtgatagctggttgtccaagatagaatcttagttcaactttaaatttgcccacagaaccctctaaatccccttgtaaatttaactgttagtccaaagaggaacagctctttggacactaggaaaaaaccttgtagagagagtaaaaaatttaacacccatagtaggcctaaaagcagccaccaattaagaaagcgttcaagctcaacacccactacctaaaaaatcccaaacatataactgaactcctcacacccaattggaccaatctatcaccctatagaagaactaatgttagtataagtaacatgaaaacattctcctccgcataagcctgcgtcagattaaaacactgaactgacaattaacagcccaatatctacaatcaaccaacaagtcattattaccctcactgtcaacccaacacaggcatgctcataaggaaaggttaaaaaaagtaaaaggaactcggcaaatcttaccccgcctgtttaccaaaaacatcacctctagcatcaccagtattagaggcaccgcctgcccagtgacacatgtttaacggccgcggtaccctaaccgtgcaaaggtagcataatcacttgttccttaaatagggacctgtatgaatggctccacgagggttcagctgtctcttacttttaaccagtgaaattgacctgcccgtgaagaggcgggcatgacacagcaagacgagaagaccctatggagctttaatttattaatgcaaacagtacctaacaaacccacaggtcctaaactaccaaacctgcattaaaaatttcggttggggcgacctcggagcagaacccaacctccgagcagtacatgctaagacttcaccagtcaaagcgaactactatactcaattgatccaataacttgaccaacggaacaagttaccctagggataacagcgcaatcctattctagagtccatatcaacaatagggtttacgacctcgatgttggatcaggacatcccgatggtgcagccgctattaaaggttcgtttgttcaacgattaaagtcctacgtgatctgagttcagaccggagtaatccaggtcggtttctatctacnttcaaattcctccctgtacgaaaggacaagagaaataaggcctacttcacaaagcgccttcccccgtaaatgatatcatctcaacttagtattatacccacacccacccaagaacagggtttgttaagatggcagagcccggtaatcgcataaaacttaaaactttacagtcagaggttcaattcctcttcttaacaacatacccatggccaacctcctactcctcattgtacccattctaatcgcaatggcattcctaatgcttaccgaacgaaaaattctaggctatatacaactacgcaaaggccccaacgttgtaggcccctacgggctactacaacccttcgctgacgccataaaactcttcaccaaagagcccctaaaacccgccacatctaccatcaccctctacatcaccgccccgaccttagctctcaccatcgctcttctactatgaacccccctccccatacccaaccccctggtcaacctcaacctaggcctcctatttattctagccacctctagcctagccgtttactcaatcctctgatcagggtgagcatcaaactcaaactacgccctgatcggcgcactgcgagcagtagcccaaacaatctcatatgaagtcaccctagccatcattctactatcaacattactaataagtggctcctttaacctctccacccttatcacaacacaagaacacctctgattactcctgccatcatgacccttggccataatatgatttatctccacactagcagagaccaaccgaacccccttcgaccttgccgaaggggagtccgaactagtctcaggcttcaacatcgaatacgccgcaggccccttcgccctattcttcatagccgaatacacaaacattattataataaacaccctcaccactacaatcttcctaggaacaacatatgacgcactctcccctgaactctacacaacatattttgtcaccaagaccctacttctgacctccctgttcttatgaattcgaacagcatacccccgattccgctacgaccaactcatacacctcctatgaaaaaacttcctaccactcaccctagcattacttatatgacatgtctccatacccattacaatctccagcattccccctcaaacctaagaaatatgtctgataaaagagttactttgatagagtaaataataggagcttaaacccccttatttctaggactatgagaatcgaacccatccctgagaatccaaaattctccgtgccacctatcacaccccatcctaaagtaaggtcagctaaataagctatcgggcccataccccgaaaatgttggttatacccttcccgtactaattaatcccctggcccaacccgtcatctactctaccatctttgcaggcacactcatcacagcgctaagctcgcactgattttttacctgagtaggcctagaaataaacatgctagcttttattccagttctaaccaaaaaaataaaccctcgttccacagaagctgccatcaagtatttcctcacgcaagcaaccgcatccataatccttctaatagctatcctcttcaacaatatactctccggacaatgaaccataaccaatactaccaatcaatactcatcattaataatcataatggctatagcaataaaactaggaatagccccctttcacttctgagtcccagaggttacccaaggcacccctctgacatccggcctgcttcttctcacatgacaaaaactagcccccatctcaatcatataccaaatctctccctcactagacgtaagccttctcctcactctctcaatcttatccatcatagcaggcagttgaggtggattaaaccaaacccagctacgcaaaatcttagcatactcctcaattacccacataggatgaataatagcagttctaccgtacaaccctaacataaccattcttaatttaactatttatattatcctaactactaccgcattcctactactcaacttaaactccagcaccacgaccctactactatctcgcacctgaaacaagctaacatgactaacacccttaattccatccaccctcctctccctaggaggcctgcccccgctaaccggctttttgcccaaatgggccattatcgaagaattcacaaaaaacaatagcctcatcatccccaccatcatagccaccatcaccctccttaacctctacttctacctacgcctaatctactccacctcaatcacactactccccatatctaacaacgtaaaaataaaatgacagtttgaacatacaaaacccaccccattcctccccacactcatcgcccttaccacgctactcctacctatctccccttttatactaataatcttatagaaatttaggttaaatacagaccaagagccttcaaagccctcagtaagttgcaatacttaatttctgtaacagctaaggactgcaaaaccccactctgcatcaactgaacgcaaatcagccactttaattaagctaagcccttactagaccaatgggacttaaacccacaaacacttagttaacagctaagcaccctaatcaactggcttcaatctacttctcccgccgccgggaaaaaaggcgggagaagccccggcaggtttgaagctgcttcttcgaatttgcaattcaatatgaaaatcacctcggagctggtaaaaagaggcctaacccctgtctttagatttacagtccaatgcttcactcagccattttacctcacccccactgatgttcgccgaccgttgactattctctacaaaccacaaagacattggaacactatacctattattcggcgcatgagctggagtcctaggcacagctctaagcctccttattcgagccgagctgggccagccaggcaaccttctaggtaacgaccacatctacaacgttatcgtcacagcccatgcatttgtaataatcttcttcatagtaatacccatcataatcggaggctttggcaactgactagttcccctaataatcggtgcccccgatatggcgtttccccgcataaacaacataagcttctgactcttacccccctctctcctactcctgctcgcatctgctatagtggaggccggagcaggaacaggttgaacagtctaccctcccttagcagggaactactcccaccctggagcctccgtagacctaaccatcttctccttacacctagcaggtgtctcctctatcttaggggccatcaatttcatcacaacaattatcaatataaaaccccctgccataacccaataccaaacgcccctcttcgtctgatccgtcctaatcacagcagtcctacttctcctatctctcccagtcctagctgctggcatcactatactactaacagaccgcaacctcaacaccaccttcttcgaccccgccggaggaggagaccccattctataccaacacctattctgatttttcggtcaccctgaagtttatattcttatcctaccaggcttcggaataatctcccatattgtaacttactactccggaaaaaaagaaccatttggatacataggtatggtctgagctatgatatcaattggcttcctagggtttatcgtgtgagcacaccatatatttacagtaggaatagacgtagacacacgagcatatttcacctccgctaccataatcatcgctatccccaccggcgtcaaagtatttagctgactcgccacactccacggaagcaatatgaaatgatctgctgcagtgctctgagccctaggattcatctttcttttcaccgtaggtggcctgactggcattgtattagcaaactcatcactagacatcgtactacacgacacgtactacgttgtagctcacttccactatgtcctatcaataggagctgtatttgccatcataggaggcttcattcactgatttcccctattctcaggctacaccctagaccaaacctacgccaaaatccatttcactatcatattcatcggcgtaaatctaactttcttcccacaacactttctcggcctatccggaatgccccgacgttactcggactaccccgatgcatacaccacatgaaacatcctatcatctgtaggctcattcatttctctaacagcagtaatattaataattttcatgatttgagaagccttcgcttcgaagcgaaaagtcctaatagtagaagaaccctccataaacctggagtgactatatggatgccccccaccctaccacacattcgaagaacccgtatacataaaatctagacaaaaaaggaaggaatcgaaccccccaaagctggtttcaagccaaccccatggcctccatgactttttcaaaaaggtattagaaaaaccatttcataactttgtcaaagttaaattataggctaaatcctatatatcttaatggcacatgcagcgcaagtaggtctacaagacgctacttcccctatcatagaagagcttatcacctttcatgatcacgccctcataatcattttccttatctgcttcctagtcctgtatgcccttttcctaacactcacaacaaaactaactaatactaacatctcagacgctcaggaaatagaaaccgtctgaactatcctgcccgccatcatcctagtcctcatcgccctcccatccctacgcatcctttacataacagacgaggtcaacgatccctcccttaccatcaaatcaattggccaccaatggtactgaacctacgagtacaccgactacggcggactaatcttcaactcctacatacttcccccattattcctagaaccaggcgacctgcgactccttgacgttgacaatcgagtagtactcccgattgaagcccccattcgtataataattacatcacaagacgtcttgcactcatgagctgtccccacattaggcttaaaaacagatgcaattcccggacgtctaaaccaaaccactttcaccgctacacgaccgggggtatactacggtcaatgctctgaaatctgtggagcaaaccacagtttcatgcccatcgtcctagaattaattcccctaaaaatctttgaaataggacccgtatttaccctatagcaccccctctaccccctctagagcccactgtaaagctaacttagcattaaccttttaagttaaagattaagagaaccaacacctctttacagtgaaatgccccaactaaatactaccgtatggcccaccataattacccccatactccttacactattcctcatcacccaactaaaaatattaaacacaaactaccacctacctccctcaccaaagcccataaaaataaaaaattataacaaaccctgagaaccaaaatgaacgaaaatctgttcgcttcattcattgcccccacaatcctaggcctacccgccgcagtactgatcattctatttccccctctattgatccccacctccaaatatctcatcaacaaccgactaatcaccacccaacaatgactaatcaaactaacctcaaaacaaataataaccatacacaacactaaaggacgaacctgatctcttatactagtatccttaatcatttttattgccacaactaacctcctcggactcctgcctcactcatttacaccaaccacccaactatctataaacctagccatggccatccccttatgagcgggcgcagtgattataggctttcgctctaagattaaaaatgccctagcccacttcttaccacaaggcacacctacaccccttatccccatactagttattatcgaaaccatcagcctactcattcaaccaatagccctggccgtacgcctaaccgctaacattactgcaggccacctactcatgcacctaattggaagcgccaccctagcaatatcaaccattaaccttccctctacacttatcatcttcacaattctaattctactgactatcctagaaatcgctgtcgccttaatccaagcctacgttttcacacttctagtaagcctctacctgcacgacaacacataatgacccaccaatcacatgcctatcatatagtaaaacccagcccatgacccctaacaggggccctctcagccctcctaatgacctccggcctagccatgtgatttcacttccactccataacgctcctcatactaggcctactaaccaacacactaaccatataccaatgatggcgcgatgtaacacgagaaagcacataccaaggccaccacacaccacctgtccaaaaaggccttcgatacgggataatcctatttattacctcagaagtttttttcttcgcaggatttttctgagccttttaccactccagcctagcccctaccccccaattaggagggcactggcccccaacaggcatcaccccgctaaatcccctagaagtcccactcctaaacacatccgtattactcgcatcaggagtatcaatcacctgagctcaccatagtctaatagaaaacaaccgaaaccaaataattcaagcactgcttattacaattttactgggtctctattttaccctcctacaagcctcagagtacttcgagtctcccttcaccatttccgacggcatctacggctcaacattttttgtagccacaggcttccacggacttcacgtcattattggctcaactttcctcactatctgcttcatccgccaactaatatttcactttacatccaaacaccactttggcttcgaagccgccgcctgatactggcattttgtagatgtggtttgactatttctgtatgtctccatctattgatgagggtcttactcttttagtataaatagtaccgttaacttccaattaactagttttgacaacattcaaaaaagagtaataaacttcgccttaattttaataatcaacaccctcctagccttactactaataattattacattttgactaccacaactcaacggctacatagaaaaatccaccccttacgagtgcggcttcgaccctatatcccccgcccgcgtccctttctccataaaattcttcttagtagctattaccttcttattatttgatctagaaattgccctccttttacccctaccatgagccctacaaacaactaacctgccactaatagttatgtcatccctcttattaatcatcatcctagccctaagtctggcctatgagtgactacaaaaaggattagactgaaccgaattggtatatagtttaaacaaaacgaatgatttcgactcattaaattatgataatcatatctaccaaatgcccctcatttacataaatattatactagcatttaccatctcacttctaggaatactagtatatcgctcacacctcatatcctccctactatgcctagaaggaataatactatcgctgttcattatagctactctcataaccctcaacacccactccctcttagccaatattgtgcctattgccatactagtctttgccgcctgcgaagcagcggtgggcctagccctactagtctcaatctccaacacatatggcctagactacgtacataacctaaacctactccaatgctaaaactaatcgtcccaacaattatattactaccactgacatgactttccaaaaaacacataatttgaatcaacacaaccacccacagcctaattattagcatcatccctctactattttttaaccaaatcaacaacaacctatttagctgttccccaaccttttcctccgaccccctaacaacccccctcctaatactaactacctgactcctacccctcacaatcatggcaagccaacgccacttatccagtgaaccactatcacgaaaaaaactctacctctctatactaatctccctacaaatctccttaattataacattcacagccacagaactaatcatattttatatcttcttcgaaaccacacttatccccaccttggctatcatcacccgatgaggcaaccagccagaacgcctgaacgcaggcacatacttcctattctacaccctagtaggctcccttcccctactcatcgcactgatttacactcacaacaccctaggctcactaaacattctactactcactctcactgcccaagaactatcaaactcctgagccaacaacttaatatgactagcttacacaatagcttttatagtaaagatacctctttacggactccacttatgactccctaaagcccatgtcgaagcccccatcgctgggtcaatagtacttgccgcagtactcttaaaactaggcggctatggtataatacgcctcacactcattctcaaccccctgacaaaacacatagcctaccccttccttgtactatccctatgaggcataattataacaagctccatctgcctacgacaaacagacctaaaatcgctcattgcatactcttcaatcagccacatagccctcgtagtaacagccattctcatccaaaccccctgaagcttcaccggcgcagtcattctcataatcgcccacggacttacatcctcattactattctgcctagcaaactcaaactacgaacgcactcacagtcgcatcataatcctctctcaaggacttcaaactctactcccactaatagctttttgatgacttctagcaagcctcgctaacctcgccttaccccccactattaacctactgggagaactctctgtgctagtaaccacgttctcctgatcaaatatcactctcctacttacaggactcaacatactagtcacagccctatactccctctacatatttaccacaacacaatggggctcactcacccaccacattaacaacataaaaccctcattcacacgagaaaacaccctcatgttcatacacctatcccccattctcctcctatccctcaaccccgacatcattaccgggttttcctcttgtaaatatagtttaaccaaaacatcagattgtgaatctgacaacagaggcttacgaccccttatttaccgagaaagctcacaagaactgctaactcatgcccccatgtctaacaacatggctttctcaacttttaaaggataacagctatccattggtcttaggccccaaaaattttggtgcaactccaaataaaagtaataaccatgcacactactataaccaccctaaccctgacttccctaattccccccatccttaccaccctcgttaaccctaacaaaaaaaactcatacccccattatgtaaaatccattgtcgcatccacctttattatcagtctcttccccacaacaatattcatgtgcctagaccaagaagttattatctcgaactgacactgagccacaacccaaacaacccagctctccctaagcttcaaactagactacttctccataatattcatccctgtagcattgttcgttacatggtcaatcatagaattctcactgtgatatataaactcagacccaaacattaatcagttcttcaaatatctactcatcttcctaattaccatactaatcttagttaccgctaacaacctattccaactgttcatcggctgagagggcgtaggaattatatccttcttgctcatcagttgatgatacgcccgagcagatgccaacacagcagccattcaagcaatcctatacaaccgtatcggcgatatcggtttcatcctcgccttagcatgatttatcctacactccaactcatgagacccacaacaaatagcccttctaaacgctaatccaagcctcaccccactactaggcctcctcctagcagcagcaggcaaatcagcccaattaggtctccacccctgactcccctcagccatagaaggccccaccccagtctcagccctactccactcaagcactatagttgtagcaggaatcttcttactcatccgcttccaccccctagcagaaaatagcccactaatccaaactctaacactatgcttaggcgctatcaccactctgttcgcagcagtctgcgcccttacacaaaatgacatcaaaaaaatcgtagccttctccacttcaagtcaactaggactcataatagttacaatcggcatcaaccaaccacacctagcattcctgcacatctgtacccacgccttcttcaaagccatactatttatgtgctccggatccatcatccacaaccttaacaatgaacaagatattcgaaaaataggaggactactcaaaaccatacctctcacttcaacctccctcaccattggcagcctagcattagcaggaatacctttcctcacaggtttctactccaaagaccacatcatcgaaaccgcaaacatatcatacacaaacgcctgagccctatctattactctcatcgctacctccctgacaagcgcctatagcactcgaataattcttctcaccctaacaggtcaacctcgcttccccacccttactaacattaacgaaaataaccccaccctactaaaccccattaaacgcctggcagccggaagcctattcgcaggatttctcattactaacaacatttcccccgcatcccccttccaaacaacaatccccctctacctaaaactcacagccctcgctgtcactttcctaggacttctaacagccctagacctcaactacctaaccaacaaacttaaaataaaatccccactatgcacattttatttctccaacatactcggattctaccctagcatcacacaccgcacaatcccctatctaggccttcttacgagccaaaacctgcccctactcctcctagacctaacctgactagaaaagctattacctaaaacaatttcacagcaccaaatctccacctccatcatcacctcaacccaaaaaggcataattaaactttacttcctctctttcttcttcccactcatcctaaccctactcctaatcacataacctattcccccgagcaatctcaattacaatatatacaccaacaaacaatgttcaaccagtaactactactaatcaacgcccataatcatacaaagcccccgcaccaataggatcctcccgaatcaaccctgacccctctccttcataaattattcagcttcctacactattaaagtttaccacaaccaccaccccatcatactctttcacccacagcaccaatcctacctccatcgctaaccccactaaaacactcaccaagacctcaacccctgacccccatgcctcaggatactcctcaatagccatcgctgtagtatatccaaagacaaccatcattccccctaaataaattaaaaaaactattaaacccatataacctcccccaaaattcagaataataacacacccgaccacaccgctaacaatcaatactaaacccccataaataggagaaggcttagaagaaaaccccacaaaccccattactaaacccacactcaacagaaacaaagcatacatcattattctcgcacggactacaaccacgaccaatgatatgaaaaaccatcgttgtatttcaactacaagaacaccaatgaccccaatacgcaaaattaaccccctaataaaattaattaaccactcattcatcgacctccccaccccatccaacatctccgcatgatgaaacttcggctcactccttggcgcctgcctgatcctccaaatcaccacaggactattcctagccatacactactcaccagacgcctcaaccgccttttcatcaatcgcccacatcactcgagacgtaaattatggctgaatcatccgctaccttcacgccaatggcgcctcaatattctttatctgcctcttcctacacatcgggcgaggcctatattacggatcatttctctactcagaaacctgaaacatcggcattatcctcctgcttgcaactatagcaacagccttcataggctatgtcctcccgtgaggccaaatatcattctgaggggccacagtaattacaaacttactatccgccatcccatacattgggacagacctagttcaatgaatctgaggaggctactcagtagacagtcccaccctcacacgattctttacctttcacttcatcttgcccttcattattgcagccctagcagcactccacctcctattcttgcacgaaacgggatcaaacaaccccctaggaatcacctcccattccgataaaatcaccttccacccttactacacaatcaaagacgccctcggcttacttctcttcattctctccttaatgacattaacactattctcaccagacctcctaggcgacccagacaattataccctagccaaccccttaaacacccctccccacatcaagcccgaatgatatttcctattcgcctacacaattctccgatccgtccctaacaagctaggaggcgtccttgccctattactatccatcctcatcctagcaataatccccatcctccatatatccaaacaacaaagcataatatttcgcccactaagccaatcactttattgactcctagccgcagacctcctcattctaacctgaatcggaggacaaccagtaagctacccttttaccatcattggacaagtagcatccgtactatacttcacaacaatcctaatcctaataccaactatctccctaattgaaaacaaaatactcaaatgggcctgtccttgtagtataaactaatacaccagtcttgtaaaccgaagatgaaaacctttttccaaggacaaatcagagaaaaagtctttaactccaccattagcacccaaagctaagattctaatttaaactattctctgttctttcatggggaagcagatttgggtaccacccaagtattgactcacccatcaacaaccgctatgtatttcgtacattactgccagccaccatgaatattgcacggtaccataaatacttgaccacctgtagtacatagaaacccaatccacatcaaaacctcccccccatgcttacaagcaagtacagcaatcaaccctcaactatcacacatcaactgcaactccaaagccacccctcacccactaggataccaacaaacctacccatccttaacagtacatagtacataaagccatttaccgtacatagcacattacagtcaaatcccttctcgtccccatggatgacccccctcagataggggtcccttgaccaccatcctccgtgaaatcaatatcccgcacaagagtgctactctcctcgctccgggcccataacacttgggggtagctaaagtgaactgtatccgacatctggttcctacttcagggccataaagcctaaatagcccacacgttccccttaaataagacatcacgatg

SEQ ID NO: 281 - DNA, 16570 bp, Homo sapiens mitochondrial
  3108: "n" refers to a nucleotide at position 3107 of the Cambridge Reference Sequence (CRS, Anderson et al. 1981 Nature 290:457-465), later determined to be absent from the human mtDNA sequence according to the revised CRS (rCRS, Andrews et al. 1999 Nature Genetics 23:147); "n" therefore represents a single nucleotide deletion at a position corresponding to nucleotide 3107 of SEQ ID NO:1 as provided herein.
gatcacaggtctatcaccctattaaccactcacgggagctctccatgcatttggtattttcgtctggggggtgtgcacgcgatagcattgcgagacgctggagccggagcaccctatgtcgcagtatctgtctttgattcctgcctcatcctattatttatcgcacctacgttcaatattacaggcgaacatacttactaaagtgtgttaattaattaatgcttgtaggacataataataacaattgaatgtctgcacagccgctttccacacagacatcataacaaaaaatttccaccaaaccccccctcccccgccttctggccacagcacttaaacacatctctgccaaaccccaaaaacaaagaaccctaacaccagcctaaccagatttcaaattttatcttttggcggtatgcacttttaacagtcaccccccaactaacacattattttcccctcccactcccatactaccaatctcatcaatacaaccctcgcccatcctacccagcacacacacaccgctgctaaccccataccccgaaccaaccaaaccccaaagacaccccccacagtttatgtagcttacctcctcaaagcaatacactgaaaatgtttagacgggctcacatcaccccataaacaaataggtttggtcctagcctttctattagctcttagtaagattacacatgcaagcatccccgttccagtgagttcaccctctaaatcaccacgatcaaaagggacaagcatcaagcacgcagcaatgcagctcaaaacgcttagcctagccacacccccacgggaaacagcagtgattaacctttagcaataaacgaaagtttaactaagctatactaaccccagggttggtcaatttcgtgccagccaccgcggtcacacgattaacccaagtcaatagaagccggcgtaaagagtgttttagatcaccccctccccaataaagctaaaactcacctgagttgtaaaaaactccagttgacacaaaatagactacgaaagtggctttaacatatctgaacacacaatagctaagacccaaactgggattagataccccactatgcttagccctaaacctcaacagttaaatcaacaaaactgctcgccagaacactacgagccacagcttaaaactcaaaggacctggcggtgcttcatacccctctagaggagcctgttctgtaatcgataaaccccgatcaacctcaccacctcttgctcagcctatataccgccatcttcagcaaaccctgatgaaggctacaaagtaagcgcaagtacccacgtaaagacgttaggtcaaggtgtagcccatgaggtggcaagaaatgggctacattttctaccccagaaaactacgatagcccttatgaaacttaagggtcgaaggtggatttagcagtaaactgagagtagagtgcttagttgaacagggccctgaagcgcgtacacaccgcccgtcaccctcctcaagtatacttcaaaggacatttaactaaaacccctacgcatttatatagaggagacaagtcgtaacatggtaagtgtactggaaagtgcacttggacgaaccagagtgtagcttaacacaaagcacccaacttacacttaggagatttcaacttaacttgaccgctctgagctaaacctagccccaaacccactccaccttactaccagacaaccttagccaaaccatttacccaaataaagtataggcgatagaaattgaaacctggcgcaatagatatagtaccgcaagggaaagatgaaaaattatagccaagcataatatagcaaggactaacccctataccttctgcataatgaattaactagaaataactttgcaaggagagccaaagctaagacccccgaaaccagacgagctacctaagaacagctaaaagagcacacccgtctatgtagcaaaatagtgggaagatttataggtagaggcgacaaacctaccgagcctggtgatagctggttgtccaagatagaatcttagttcaactttaaatttgcccacagaaccctctaaatccccttgtaaatttaactgttagtccaaagaggaacagctctttggacactaggaaaaaaccttgtagagagagtaaaaaatttaacacccatagtaggcctaaaagcagccaccaattaagaaagcgttcaagctcaacacccactacctaaaaaatcccaaacatataactgaactcctcacacccaattggaccaatctatcaccctatagaagaactaatgttagtataagtaacatgaaaacattctcctccgcataagcctgcgtcagattaaaacactgaactgacaattaacagcccaatatctacaatcaaccaacaagtcattattaccctcactgtcaacccaacacaggcatgctcataaggaaaggttaaaaaaagtaaaaggaactcggcaaatcttaccccgcctgtttaccaaaaacatcacctctagcatcaccagtattagaggcaccgcctgcccagtgacacatgtttaacggccgcggtaccctaaccgtgcaaaggtagcataatcacttgttccttaaatagggacctgtatgaatggctccacgagggttcagctgtctcttacttttaaccagtgaaattgacctgcccgtgaagaggcgggcatgacacagcaagacgagaagaccctatggagctttaatttattaatgcaaacagtacctaacaaacccacaggtcctaaactaccaaacctgcattaaaaatttcggttggggcgacctcggagcagaacccaacctccgagcagtacatgctaagacttcaccagtcaaagcgaactactatactcaattgatccaataacttgaccaacggaacaagttaccctagggataacagcgcaatcctattctagagtccatatcaacaatagggtttacgacctcgatgttggatcaggacatcccgatggtgcagccgctattaaaggttcgtttgttcaacgattaaagtcctacgtgatctgagttcagaccggagtaatccaggtcggtttctatctacnttcaaattcctccctgtacgaaaggacaagagaaataaggcctacttcacaaagcgccttcccccgtaaatgatatcatctcaacttagtattatacccacacccacccaagaacagggtttgttaagatggcagagcccggtaatcgcataaaacttaaaactttacagtcagaggttcaattcctcttcttaacaacatacccatggccaacctcctactcctcattgtacccattctaatcgcaatggcattcctaatgcttaccgaacgaaaaattctaggctatatacaactacgcaaaggccccaacgttgtaggcccctacgggctactacaacccttcgctgacgccataaaactcttcaccaaggagcccctaaaacccgccacatctaccatcaccctctacatcaccgccccgaccttagctctcaccatcgctcttctactatgaacccccctccccatacccaaccccctggtcaacctcaacctaggcctcctatttattctagccacctctagcctagccgtttactcaatcctctgatcagggtgagcatcaaactcaaactacgccctgatcggcgcactgcgagcagtagcccaaacaatctcatatgaagtcaccctagccatcattctactatcaacattactaataagtggctcctttaacctctccacccttatcacaacacaagaacacctctgattactcctgccatcatgacccttggccataatatgatttatctccacactagcagagaccaaccgaacccccttcgaccttgccgaaggggagtccgaactagtctcaggcttcaacatcgaatacgccgcaggccccttcgccctattcttcatagccgaatacacaaacattattataataaacaccctcaccactacaatcttcctaggaacaacatatgacgcactctcccctgaactctacacaacatattttgtcaccaagaccctacttctaacctccctgttcttatgaattcgaacagcatacccccgattccgctacgaccaactcatacacctcctatgaaaaaacttcctaccactcaccctagcattacttatatgatatgtctccatacccattacaatctccagcattccccctcaaacctaagaaatatgtctgataaaagagttactttgatagagtaaataataggagcttaaacccccttatttctaggactatgagaatcgaacccatccctgagaatccaaaattctccgtgccacctatcacaccccatcctaaagtaaggtcagctaaataagctatcgggcccataccccgaaaatgttggttatacccttcccgtactaattaatcccctggcccaacccgtcatctactctaccatctttgcaggcacactcatcacagcgctaagctcgcactgattttttacctgagtaggcctagaaataaacatgctagcttttattccagttctaaccaaaaaaataaaccctcgttccacagaagctgccatcaagtatttcctcacgcaagcaaccgcatccataatccttctaatagctatcctcttcaacaatatactctccggacaatgaaccataaccaatactaccaatcaatactcatcattaataatcataatggctatagcaataaaactaggaatagccccctttcacttctgagtcccagaggttacccaaggcacccctctgacatccggcctgcttcttctcacatgacaaaaactagcccccatctcaatcatataccaaatctctccctcactaaacgtaagccttctcctcactctctcaatcttatccatcatagcaggcagttgaggtggattaaaccaaacccagctacgcaaaatcttagcatactcctcaattacccacataggatgaataatagcagttctaccgtacaaccctaacataaccattcttaatttaactatttatattatcctaactactaccgcattcctactactcaacttaaactccagcaccacgaccctactactatctcgcacctgaaacaagctaacatgactaacacccttaattccatccaccctcctctccctaggaggcctgcccccgctaaccggctttttgcccaaatgggccattatcgaagaattcacaaaaaacaatagcctcatcatccccaccatcatagccaccatcaccctccttaacctctacttctacctacgcctaatctactccacctcaatcacactactccccatatctaacaacgtaaaaataaaatgacagtttgaacatacaaaacccaccccattcctccccacactcatcgcccttaccacgctactcctacctatctccccttttatactaataatcttatagaaatttaggttaaatacagaccaagagccttcaaagccctcagtaagttgcaatacttaatttctgtaacagctaaggactgcaaaaccccactctgcatcaactgaacgcaaatcagccactttaattaagctaagcccttactagaccaatgggacttaaacccacaaacacttagttaacagctaagcaccctaatcaactggcttcaatctacttctcccgccgccgggaaaaaaggcgggagaagccccggcaggtttgaagctgcttcttcgaatttgcaattcaatatgaaaatcacctcggagctggtaaaaagaggcctaacccctgtctttagatttacagtccaatgcttcactcagccattttacctcacccccactgatgttcgccgaccgttgactattctctacaaaccacaaagacattggaacactatacctattattcggcgcatgagctggagtcctaggcacagctctaagcctccttattcgagccgagctgggccagccaggcaaccttctaggtaacgaccacatctacaacgttatcgtcacagcccatgcatttgtaataatcttcttcatagtaatacccatcataatcggaggctttggcaactgactagttcccctaataatcggtgcccccgatatggcgtttccccgcataaacaacataagcttctgactcttacctccctctctcctactcctgctcgcatctgctatagtggaggccggagcaggaacaggttgaacagtctaccctcccttagcagggaactactcccaccctggagcctccgtagacctaaccatcttctccttacacctagcaggtgtctcctctatcttaggggccatcaatttcatcacaacaattatcaatataaaaccccctgccataacccaataccaaacgcccctcttcgtctgatccgtcctaatcacagcagtcctacttctcctatctctcccagtcctagctgctggcatcactatactactaacagaccgcaacctcaacaccaccttcttcgaccccgccggaggaggagaccccattctataccaacacctattctgatttttcggtcaccctgaagtttatattcttatcctaccaggcttcggaataatctcccatattgtaacttactactccggaaaaaaagaaccatttggatacataggtatggtctgagctatgatatcaattggcttcctagggtttatcgtgtgagcacaccatatatttacagtaggaatagacgtagacacacgagcatatttcacctccgctaccataatcatcgctatccccaccggcgtcaaagtatttagctgactcgccacactccacggaagcaatatgaaatgatctgctgcagtgctctgagccctaggattcatctttcttttcaccgtaggtggcctgactggcattgtattagcaaactcatcactagacatcgtactacacgacacgtactacgttgtagctcacttccactatgtcctatcaataggagctgtatttgccatcataggaggcttcattcactgatttcccctattctcaggctacaccctagaccaaacctacgccaaaatccatttcactatcatattcatcggcgtaaatctaactttcttcccacaacactttctcggcctatccggaatgccccgacgttactcggactaccccgatgcatacaccacatgaaacatcctatcatctgtaggctcattcatttctctaacagcagtaatattaataattttcatgatttgagaagccttcgcttcgaagcgaaaagtcctaatagtagaagaaccctccataaacctggagtgactatatggatgccccccaccctaccacacattcgaagaacccgtatacataaaatctagacaaaaaaggaaggaatcgaaccccccaaagctggtttcaagccaaccccatggcctccatgactttttcaaaaaggtattagaaaaaccatttcataactttgtcaaagttaaattataggctaaatcctatatatcttaatggcacatgcagcgcaagtaggtctacaagacgctacttcccctatcatagaagagcttatcacctttcatgatcacgccctcataatcattttccttatctgcttcctagtcctgtatgcccttttcctaacactcacaacaaaactaactaatactaacatctcagacgctcaggaaatagaaaccgtctgaactatcctgcccgccatcatcctagtcctcatcgccctcccatccctacgcatcctttacataacagacgaggtcaacgatccctcccttaccatcaaatcaattggccaccaatggtactgaacctacgagtacaccgactacggcggactaatcttcaactcctacatacttcccccattattcctagaaccaggcgacctgcgactccttgacgttgacaatcgagtagtactcccgattgaagcccccattcgtataataattacatcacaagacgtcttgcactcatgagctgtccccacattaggcttaaaaacagatgcaattcccggacgtctaaaccaaaccactttcaccgctacacgaccgggggtatactacggtcaatgctctgaaatctgtggagcaaaccacagtttcatgcccatcgtcctagaattaattcccctaaaaatctttgaaatagggcccgtatttaccctatagcaccccctctaccccctctagagcccactgtaaagctaacttagcattaaccttttaagttaaagattaagagaaccaacacctctttacagtgaaatgccccaactaaatactaccgtatggcccaccataattacccccatactccttacactattcctcatcacccaactaaaaatattaaacacaaactaccacctacctccctcaccaaagcccataaaaataaaaaattataacaaaccctgagaaccaaaatgaacgaaaatctgttcgcttcattcattgcccccacaatcctaggcctacccgccgcagtactgatcattctatttccccctctattgatccccacctccaaatatctcatcaacaaccgactaatcaccacccaacaatgactaatcaaactaacctcaaaacaaatgataaccatacacaacactaaaggacgaacctgatctcttatactagtatccttaatcatttttattgccacaactaacctcctcggactcctgcctcactcatttacaccaaccacccaactatctataaacctagccatggccatccccttatgagcgggcgcagtgattataggctttcgctctaagattaaaaatgccctagcccacttcttaccacaaggcacacctacaccccttatccccatactagttattatcgaaaccatcagcctactcattcaaccaatagccctggccgtacgcctaaccgctaacattactgcaggccacctactcatgcacctaattggaagcaccaccctagcaatatcaaccattaaccttccctctacacttatcatcttcacaattctaattctactgactatcctagaaatcgctgtcgccttaatccaagcctacgttttcacacttctagtaagcctctacctgcacgacaacacataatgacccaccaatcacatgcctatcatatagtaaaacccagcccatgacccctaacaggggccctctcagccctcctaatgacctccggcctagccatgtgatttcacttccactccataacgctcctcatactaggcctactaaccaacacactaaccatataccaatgatggcgcgatgtaacacgagaaagcacataccaaggccaccacacaccacctgtccaaaaaggccttcgatacgggataatcctatttattacctcagaagtttttttcttcgcaggatttttctgagccttttaccactccagcctagcccctaccccccaattaggagggcactggcccccaacaggcatcaccccgctaaatcccctagaagtcccactcctaaacacatccgtattactcgcatcaggagtatcaatcacctgagctcaccatagtctaatagaaaacaaccgaaaccaaataattcaagcactgctcattacaattttactgggtctctattttaccctcctacaagcctcagagtacttcgagtctcccttcaccatttccgacggcatctacggctcaacattttttgtagccacaggcttccacggacttcacgtcattattggctcaactttcctcactatctgcttcatccgccaactaatatttcactttacatccaaacatcactttggcttcgaagccgccgcctgatactgacattttgtagatgtggtttgactatttctgtatgtctccatctattgatgagggtcttactcttttagtataaatagtaccgttaacttccaattaactagttttgacaacattcaaaaaagagtaataaacttcgccttaattttaataatcaacaccctcctagccttactactaataattattacattttgactaccacaactcaacggctacatagaaaaatccaccccttacgagtgcggcttcgaccctatatcccccgcccgcgtccctttctccataaaattcttcttagtagctattaccttcttattatttgatctagaaattgccctccttttacccctaccatgagccctacaaacaactaacctgccactaatagttatgtcatccctcttattaatcatcatcctagccctaagtctggcctatgagtgactacaaaaaggattagactgagccgaattggtatatagtttaaacaaaacgaatgatttcgactcattaaattatgataatcatatttaccaaatgcccctcatttacataaatattatactagcatttaccatctcacttctaggaatactagtatatcgctcacacctcatgtcctccctactatgcctagaaggaataatactatcgctgttcattatagctactctcataaccctcaacacccactccctcttagccaatattgtgcctattgccatactagtctttgccgcctgcgaagcagcggtgggcctagccctactagtctcaatctccaacacatatggcctagactacgtacataacctaaacctactccaatgctaaaactaatcgtcccaacaattatattactaccactgacatgactttccaaaaaacacataatttgaatcaacacaaccacccacagcctaattattagcatcatccctctactattttttaaccaaatcaacaacaacctatttagctgttccccaaccttttcctccgaccccctaacaacccccctcctaatactaactacctgactcctacccctcacaatcatggcaagccaacgccacttatccagtgaaccactatcacgaaaaaaactctacctctctatactaatctccctacaaatctccttaattataacattcacagccacagaactaatcatattttatatcttcttcgaaaccacacttatccccaccttggctatcatcacccgatgaggcaaccagccagaacgcctgaacgcaggcacatacttcctattctacaccctagtaggctcccttcccctactcatcgcactaatttacactcacaacaccctaggctcactaaacattctactactcaccctcactgcccaagaactatcaaactcctgagccaacaacttaatatgactagcttacacaatagcttttatagtaaagatacctctttacggactccacttatgactccctaaagcccatgtcgaagcccccatcgctgggtcaatagtacttgccgcagtactcttgaagctaggcggctatggtataatacgcctcacactcattctcaaccccctgacaaaacacatagcctaccccttccttgtactatccctatgaggcataattataacaagctccatctgcctacgacaaacagacctaaaatcgctcattgcatactcttcaatcagccacatagccctcgtagtaacagccattctcatccaaaccccctgaagcttcaccggcgcagtcattctcataatcgcccacggacttacatcctcattactattctgcctagcaaactcaaactacgaacgcactcacagtcgcatcataatcctctctcaaggacttcaaactctactcccactaatagctttttgatgacttctagcaagcctcgctaacctcgccttaccccccactattaacctactgggagaactctctgtgctagtaaccacattctcctgatcaaatatcactctcctacttacaggactcaacatactagtcacagccctatactccctctacatatttaccacaacacaatggggctcactcacccaccacattaacaacataaaaccctcattcacacgagaaaacaccctcatgttcatacacctatcccccattctcctcctatccctcaaccccgacatcattaccgggttttcctcttgtaaatatagtttaaccaaaacatcagattgtgaatctgacaacagaggcttacgaccccttatttaccgagaaagctcacaagaactgctaactcatgcccccatgtctaacaacatggctttctcaacttttaaaggataacagctatccattggtcttaggccccaagaattttggtgcaactccaaataaaagtaataaccatgcacactactataaccaccctaaccctaacttccctaattccccccatccttaccaccctcgttaaccctaacaaaaaaaactcatacccccattatgtaaaatccattgtcgcatccacctttattatcagtctcttccccacaacaatattcatgtgcctagaccaagaagttattatctcgaactgacactgagccacaacccaaacaacccagctctccctaagcttcaaactagactacttctccataatattcatccctgtagcattgttcgttacatggtccatcatagaattctcactgtgatatataaactcagacccaaacattaatcagttcttcaaatatctactcatcttcctaattaccatactaatcttagttaccgctaacaacctattccaactgttcatcggctgagagggcgtaggaattatatccttcttgctcatcagttgatgatacgcccgagcagatgccaacacagcagccattcaagcaatcctatacaaccgtatcggcgatatcggtttcatcctcgccttagcatgatttatcctacactccaactcatgagacccacaacaaatagcccttctaaacgctaatccaagcctcaccccactactaggcctcctcctagcagcagcaggcaaatcagcccaattaggtctccacccctgactcccctcagccatagaaggccccaccccagtctcagccctactccactcaagcactatagttgtagcaggaatcttcttactcatccgcttccaccccctagcagaaaatagcccactaatccaaactctaacactatgcttaggcgctatcaccactctgttcgcagcagtctgcgcccttacacaaaatgacatcaaaaaaatcgtagccttctccacttcaagtcaactaggactcataatagttacaatcggcatcaaccaaccacacctagcattcctgcacatctgtacccacgccttcttcaaagccatactatttatgtgctccgggtccatcatccacaaccttaacaatgaacaagatattcgaaaaataggaggactactcaaaaccatacctctcacttcaacctccctcaccattggcagcctagcattagcaggaatacctttcctcacaggtttctactccaaagaccacatcatcgaaaccgcaaacatatcatacacaaacgcctgagccctatctattactctcatcgctacctccctgacaagcgcctatagcactcgaataattcttctcaccctaacaggtcaacctcgcttccccacccttactaacattaacgaaaataaccccaccctactaaaccccattaaacgcctggcagccggaagcctattcgcaggatttctcattactaacaacatttcccccgcatcccccttccaaacaacaatccccctctacctaaaactcacagccctcgctgtcactttcctaggacttctaacagccctagacctcaactacctaaccaacaaacttaaaataaaatccccactatgcacattttatttctccaacatactcggattctaccctagcatcacacaccgcacaatcccctatctaggccttcttacgagccaaaacctgcccctactcctcctagacctaacctgactagaaaagctattacctaaaacaatttcacagcaccaaatctccacctccatcatcacctcaacccaaaaaggcataattaaactttacttcctctctttcttcttcccactcatcctaaccctactcctaatcacataacctattcccccgagcaatttcaattacaatatatacaccaacaaacaatgttcaaccagtaactactactaatcaacgcccataatcatacaaagcccccgcaccaataggatcctcccgaatcaaccctgacccctctccttcataaattattcagcttcctacactattaaagtttaccacaaccaccaccccatcatactctttcacccacagcaccaatcctacctccatcgctaaccccactaaaacactcaccaagacctcaacccctgacccccatgcctcaggatactcctcaatagccatcgctgtagtatatccaaagacaaccatcattccccctaaataaattaaaaaaactattaaacccatataacctcccccaaaattcagaataataacacacccgaccacaccgctaacaatcaatactaaacccccataaataggagaaggcttagaagaaaaccccacaaaccccattactaaacccacactcaacagaaacaaagcatacatcattattctcgcacggactacaaccacgaccaatgatatgaaaaaccatcgttgtatttcaactacaagaacaccaatgaccccaatacgcaaaattaaccccctaataaaattaattaaccactcactcatcgacctccccaccccatccaacatctccgcatgatgaaacttcggctcactccttggcgcctgcctgatcctccaaatcaccacaggactattcctagccatgcactactcaccagacgcctcaaccgccttttcatcaatcgcccacatcactcgagacgtaaattatggctgaatcatccgctaccttcacgccaatggcgcctcaatattctttatctgcctcttcctacacatcgggcgaggcctatattacggatcatttctctactcagaaacctgaaacatcggcattatcctcctgcttgcaactatagcaacagccttcataggctatgtcctcccgtgaggccaaatatcattctgaggggccacagtaattacaaacttactatccgccatcccatacattgggacagacctagttcaatgaatctgaggaggctactcagtagacagtcccaccctcacacgattctttacctttcacttcatcttgcccttcattattgcagccctagcagcactccacctcctattcttgcacgaaacgggatcaaacaaccccctaggaatcacctcccattccgataaaatcaccttccacccttactacacaatcaaagacgccctcggcttacttctcttccttctctccttaatgacattaacactattctcaccagacctcctaggcgacccagacaattataccctagccaaccccttaaacacccctccccacatcaagcccgaatgatatttcctattcgcctacacaattctccgatccgtccctaacaaactaggaggcgtccttgccctattactatccatcctcatcctagcaataatccccatcctccatatatccaaacaacaaagcataatatttcgcccactaagccaatcactttattgactcctagccgcagacctcctcattctaacctgaatcggaggacaaccagtaagctacccttttaccatcattggacaagtagcatccgtactatacttcacaacaatcctaatcctaataccaactatctccctaattgaaaacaaaatactcaaatgggcctgtccttgtagtataaactaatacaccagtcttgtaagccggagatgaaaacctttttccaaggacaaatcagagaaaaagtctttaactccaccattagcacccaaagctaagattctaatttaaactattctctgttctttcatggggaagcagatttgggtaccacccaagtattgactcacccatcaacaaccgctatgtatttcgtacattactgccagccaccatgaatattgtacggtaccataaatacttgaccacctgtagtacataaaaacccaatccacatcaaaaccccctccccatgcttacaagcaagtacagcaatcaacccccaactatcacacatcaactgcaactccaaagccacccctcacccactaggataccaacaaacctacccacccttaacagtacatagcacataaagccatttaccgtacatagcacattacagtcaaatcccttctcgtccccatggatgacccccctcagataggggtcccttgaccaccatcctccgtgaaatcaatatcccgcacaagagtgctactctcctcgctccgggcccataacacttgggggtagctaaagtgaactgtatccgacatctggttcctacttcagggccataaagcctaaatagcccacacgttccccttaaataagacatcacgatg

SEQ ID NO: 282 - DNA, 16571 bp, Homo sapiens mitochondrial
  3109: "n" refers to a nucleotide at position 3107 of the Cambridge Reference Sequence (CRS, Anderson et al. 1981 Nature 290:457-465), later determined to be absent from the human mtDNA sequence according to the revised CRS (rCRS, Andrews et al. 1999 Nature Genetics 23:147); "n" therefore represents a single nucleotide deletion at a position corresponding to nucleotide 3107 of SEQ ID NO:1 as provided herein.
gatcacaggtctatcaccctattaaccactcacgggagctctccatgcatttggtattttcgtctggggggtatgcacgcgatagcattgcgagacgctggagccggagcaccctatgtcgcagtatctgtctttgattcctgcctcatcccattatttatcgcacctacgttcaatattacaggcgaacatacttactaaagtgtgttaattaattaatgcttgtaggacataataataacaattgaatgtctgcacagccgctttccacacagacatcataacaaaaaatttccaccaaaccccccctcccccccgcttctggccacagcacttaaacacatctctgccaaaccccaaaaacaaagaaccctaacaccagcctaaccagatttcaaattttatcttttggcggtatgcacttttaacagtcaccccccaactaacacattattttcccctcccactcccatactactaatctcatcaatacaacccccgcccatcctacccagcacacacacaccgctgctaaccccataccccgaaccaaccaaaccccaaagacaccccccacagtttatgtagcttacctcctcaaagcaatacactgaaaatgtttagacgggctcacatcaccccataaacaaataggtttggtcctagcctttctattagctcttagtaagattacacatgcaagcatccccgttccagtgagttcaccctctaaatcaccacgatcaaaagggacaagcatcaagcacgcagcaatgcagctcaaaacgcttagcctagccacacccccacgggaaacagcagtgattaacctttagcaataaacgaaagtttaactaagctatactaaccccagggttggtcaatttcgtgccagccaccgcggtcacacgattaacccaagtcaatagaagccggcgtaaagagtgttttagatcaccccctccccaataaagctaaaactcacctgagttgtaaaaaactccagttgacacaaaatagactacgaaagtggctttaacatatctgaacacacaatagctaagacccaaactgggattagataccccactatgcttagccctaaacctcaacagttaaatcaacaaaactgctcgccagaacactacgagccacagcttaaaactcaaaggacctggcggtgcttcatatccctctagaggagcctgttctgtaatcgataaaccccgatcaacctcaccacctcttgctcagcctatataccgccatcttcagcaaaccctgatgaaggctacaaagtaagcgcaagtacccacgtaaagacgttaggtcaaggtgtagcccatgaggtggcaagaaatgggctacattttctaccccagaaaactacgatagcccttatgaaacttaagggtcgaaggtggatttagcagtaaactgagagtagagtgcttagttgaacagggccctgaagcgcgtacacaccgcccgtcaccctcctcaagtatacttcaaaggacatttaactaaaacccctacgcatttatatagaggagacaagtcgtaacatggtaagtgtactggaaagtgcacttggacgaaccagagtgtagcttaacacaaagcacccaacttacacttaggagatttcaacttaacttgaccgctctgagctaaacctagccccaaacccactccaccttactaccagacaaccttagccaaaccatttacccaaataaagtataggcgatagaaattgaaacctggcgcaatagatatagtaccgcaagggaaagatgaaaaattataaccaagcataatatagcaaggactaacccctataccttctgcataatgaattaactagaaataactttgcaaggagagccaaagctaagacccccgaaaccagacgagctacctaagaacagctaaaagagcacacccgtctatgtagcaaaatagtgggaagatttataggtagaggcgacaaacctaccgagcctggtgatagctggttgtccaagatagaatcttagttcaactttaaatttgcccacagaaccctctaaatccccttgtaaatttaactgttagtccaaagaggaacagctctttggacactaggaaaaaaccttgtagagagagtaaaaaatttaacacccatagtaggcctaaaagcagccaccaattaagaaagcgttcaagctcaacacccactacctaaaaaatcccaaacatataactgaactcctcacacccaattggaccaatctatcaccctatagaagaactaatgttagtataagtaacatgaaaacattctcctccgcataagcctgcgtcagattaaaacactgaactgacaattaacagcccaatatctacaatcaaccaacaagtcattattaccctcactgtcaacccaacacaggcatgctcataaggaaaggttaaaaaaagtaaaaggaactcggcaaatcttaccccgcctgtttaccaaaaacatcacctctagcatcaccagtattagaggcaccgcctgcccagtgacacatgtttaacggccgcggtaccctaaccgtgcaaaggtagcataatcacttgttccttaaatagggacctgtatgaatggctccacgagggttcagctgtctcttacttttaaccagtgaaattgacctgcccgtgaagaggcgggcataacacagcaagacgagaagaccctatggagctttaatttattaatgcaaacagtacctaacaaacccacaggtcctaaactaccaaacctgcattaaaaatttcggttggggcgacctcggagcagaacccaacctccgagcagtacatgctaagacttcaccagtcaaagcgaactactatactcaattgatccaataacttgaccaacggaacaagttaccctagggataacagcgcaatcctattctagagtccatatcaacaatagggtttacgacctcgatgttggatcaggacatcccgatggtgcagccgctattaaaggttcgtttgttcaacgattaaagtcctacgtgatctgagttcagaccggagtaatccaggtcggtttctatctacnttcaaattcctccctgtacgaaaggacaagagaaataaggcctacttcacaaagcgccttcccccgtaaatgatatcatctcaacttagtattatacccacacccacccaagaacagggtttgttaagatggcagagcccggtaatcgcataaaacttaaaactttacagtcagaggttcaattcctcttcttaacaacatacccatggccaacctcctactcctcattgtacccattctaatcgcaatggcattcctaatgcttaccgaacgaaaaattctaggctatatacaactacgcaaaggccccaacgttgtaggcccctacgggctactacaacccttcgctgacgccataaaactcttcaccaaagagcccctaaaacccgccacatctaccatcaccctctacatcaccgccccgaccttagctctcaccatcgctcttctactatgaacccccctccccatacccaaccccctggtcaacctcaacctaggcctcctatttattctagccacctctagcctagccgtttactcaatcctctgatcagggtgagcatcaaactcaaactacgccctgatcggcgcactgcgagcagtagcccaaacaatctcatatgaagtcaccctagccatcattctactatcaacattactaataagtggctcctttaacctctccacccttatcacaacacaagaacacctctgattactcctgccatcatgacccttggccataatatgatttatctccacactagcagagaccaaccgaacccccttcgaccttgccgaaggggagtccgaactagtctcaggcttcaacatcgaatacgccgcaggccccttcgccctattcttcatagccgaatacacaaacattattataataaacaccctcaccactacaatcttcctaggaacaacatatgacgcactctcccctgaactctacacaacatattttgtcaccaagaccctacttctaacctccctgttcttatgaattcgaacagcatacccccgattccgctacgaccaactcatacacctcctatgaaaaaacttcctaccactcaccctagcattacttatatgatatgtctccatacccattacaatctccagcattccccctcaaacctaagaaatatgtctgataaaagagttactttgatagagtaaataataggagcttaaacccccttatttctaggactatgagaatcgaacccatccctgagaatccaaaattctccgtgccacctatcacaccccatcctaaagtaaggtcagctaaataagctatcgggcccataccccgaaaatgttggttatacccttcccgtactaattaatcccctggcccaacccgtcatctactctaccatctttgcaggcacactcatcacagcgctaagctcgcactgattttttacctgagtaggcctagaaataaacatgctagcttttattccagttctaaccaaaaaaataaaccctcgttccacagaagctgccatcaagtatttcctcacgcaagcaaccgcatccataatccttctaatagctatcctcttcaacaatatactctccggacaatgaaccataaccaatactaccaatcaatactcatcattaataatcataatggctatagcaataaaactaggaatagccccctttcacttctgagtcccagaggttacccaaggcacccctctgacatccggcctgcttcttctcacatgacaaaaactagcccccatctcaatcatataccaaatctctccctcactaaacgtaagccttctcctcactctctcaatcttatccatcatagcaggcagttgaggtggattaaaccaaacccagctacgcaaaatcttagcatactcctcaattacccacataggatgaataatagcagttctaccgtacaaccctaacataaccattcttaatttaactatttatattatcctaactactaccgcattcctactactcaacttaaactccagcaccacgaccctactactatctcgcacctgaaacaagctaacatgactaacacccttaattccatccaccctcctctccctaggaggcctgcccccgctaaccggctttttgcccaaatgggccattatcgaagaattcacaaaaaacaatagcctcatcatccccaccatcatagccaccatcaccctccttaacctctacttctacctacgcctaatctactccacctcaatcacactactccccatatctaacaacgtaaaaataaaatgacagtttgaacatacaaaacccaccccattcctccccacactcatcgcccttaccacgctactcctacctatctccccttttatactaataatcttatagaaatttaggttaaatacagaccaagagccttcaaagccctcagtaagttgcaatacttaatttctgtaacagctaaggactgcaaaaccccactctgcatcaactgaacgcaaatcagccactttaattaagctaagcccttactagaccaatgggacttaaacccacaaacacttagttaacagctaagcaccctaatcaactggcttcaatctacttctcccgccgccgggaaaaaaggcgggagaagccccggcaggtttgaagctgcttcttcgaatttgcaattcaatatgaaaatcacctcggagctggtaaaaagaggcctaacccctgtctttagatttacagtccaatgcttcactcagccattttacctcacccccactgatgttcgccgaccgttgactattctctacaaaccacaaagacattggaacactatacctattattcggcgcatgagctggagtcctaggcacagctctaagcctccttattcgagccgagctgggccagccaggcaaccttctaggtaacgaccacatctacaacgttatcgtcacagcccatgcatttgtaataatcttcttcatagtaatacccatcataatcggaggctttggcaactgactagttcccctaataatcggtgcccccgatatggcgtttccccgcataaacaacataagcttctgactcttacctccctctctcctactcctgctcgcatctgctatagtggaggccggagcaggaacaggttgaacagtctaccctcccttagcagggaactactcccaccctggagcctccgtagacctaaccatcttctccttacacctagcaggtgtctcctctatcttaggggccatcaatttcatcacaacaattatcaatataaaaccccctgccataacccaataccaaacgcccctcttcgtctgatccgtcctaatcacagcagtcctacttctcctatctctcccagtcctagctgctggcatcactatactactaacagaccgcaacctcaacaccaccttcttcgaccccgccggaggaggagaccccattctataccaacacctattctgatttttcggtcaccctgaagtttatattcttatcctaccaggcttcggaataatctcccatattgtaacttactactccggaaaaaaagaaccatttggatacataggtatggtctgagctatgatatcaattggcttcctagggtttatcgtgtgagcacaccatatatttacagtaggaatagacgtagacacacgagcatatttcacctccgctaccataatcatcgctatccccaccggcgtcaaagtatttagctgactcgccacactccacggaagcaatatgaaatgatctgctgcagtgctctgagccctaggattcatctttcttttcaccgtaggtggcctgactggcattgtattagcaaactcatcactagacatcgtactacacgacacgtactacgttgtagcccacttccactatgtcctatcaataggagctgtatttgccatcataggaggcttcattcactgatttcccctattctcaggctacaccctagaccaaacctacgccaaaatccatttcactatcatattcatcggcgtaaatctaactttcttcccacaacactttctcggcctatccggaatgccccgacgttactcggactaccccgatgcatacaccacatgaaacatcctatcatctgtaggctcattcatttctctaacagcagtaatattaataattttcatgatttgagaagccttcgcttcgaagcgaaaagtcctaatagtagaagaaccctccataaacctggagtgactatatggatgccccccaccctaccacacattcgaagaacccgtatacataaaatctagacaaaaaaggaaggaatcgaaccccccaaagctggtttcaagccaaccccatggcctccatgactttttcaaaaaggtattagaaaaaccatttcataactttgtcaaagttaaattataggctaaatcctatatatcttaatggcacatgcagcgcaagtaggtctacaagacgctacttcccctatcatagaagagcttatcacctttcatgatcacgccctcataatcattttccttatctgcttcctagtcctgtatgcccttttcctaacactcacaacaaaactaactaatactaacatctcagacgctcaggaaatagaaaccgtctgaactatcctgcccgccatcatcctagtcctcatcgccctcccatccctacgcatcctttacataacagacgaggtcaacgatccctcccttaccatcaaatcaattggccaccaatggtactgaacctacgagtacaccgactacggcggactaatcttcaactcctacatacttcccccattattcctagaaccaggcgacctgcgactccttgacgttgacaatcgagtagtactcccgattgaagcccccattcgtataataattacatcacaagacgtcttgcactcatgagctgtccccacattaggcttaaaaacagatgcaattcccggacgtctaaaccaaaccactttcaccgctacacgaccgggggtatactacggtcaatgctctgaaatctgtggagcaaaccacagtttcatgcccatcgtcctagaattaattcccctaaaaatctttgaaatagggcccgtatttaccctatagcaccccctctaccccctctagagcccactgtaaagctaacttagcattaaccttttaagttaaagattaagagaaccaacacctctttacagtgaaatgccccaactaaatactaccgtatggcccaccataattacccccatactccttacactattcctcatcacccaactaaaaatattaaacacaaactaccacctacctccctcaccaaagcccataaaaataaaaaattataacaaaccctgagaaccaaaatgaacgaaaatctgttcgcttcattcattgcccccacaatcctaggcctacccgccgcagtactgatcattctatttccccctctattgatccccacctccaaatatctcatcaacaaccgactaatcaccacccaacaatgactaatcaaactaacctcaaaacaaatgataaccatacacaacactaaaggacgaacctgatctcttatactagtatccttaatcatttttattgccacaactaacctcctcggactcctgcctcactcatttacaccaaccacccaactatctataaacctagccatggccatccccttatgagcgggcgcagtgattataggctttcgctctaagattaaaaatgccctagcccacttcttaccacaaggcacacctacaccccttatccccatactagttattatcgaaaccatcagcctactcattcaaccaatagccctggccgtacgcctaaccgctaacattactgcaggccacctactcatgcacctaattggaagcgccaccctagcaatatcaaccattaaccttccctctacacttatcatcttcacaattctaattctactgactatcctagaaatcgctgtcgccttaatccaagcctacgttttcacacttctagtaagcctctacctgcacgacaacacataatgacccaccaatcacatgcctatcatatagtaaaacccagcccatgacccctaacaggggccctctcagccctcctaatgacctccggcctagccatgtgatttcacttccactccataacgctcctcatactaggcctactaaccaacacactaaccatataccaatgatggcgcgatgtaacacgagaaagcacataccaaggccaccacacaccacctgtccaaaaaggccttcgatacgggataatcctatttattacctcagaagtttttttcttcgcaggatttttctgagccttttaccactccagcctagcccctaccccccaattaggagggcactggcccccaacaggcatcaccccgctaaatcccctagaagtcccactcctaaacacatccgtattactcgcatcaggagtatcaatcacctgagctcaccatagtctaatagaaaacaaccgaaaccaaataattcaagcactgcttattacaattttactgggtctctattttaccctcctacaagcctcagagtacttcgagtctcccttcaccatttccgacggcatctacggctcaacattttttgtagccacaggcttccacggacttcacgtcattattggctcaactttcctcactatctgcttcatccgccaactaatatttcactttacatccaaacatcactttggcttcgaagccgccgcctgatactggcattttgtagatgtggtttgactatttctgtatgtctccatctattgatgagggtcttactcttttagtataaatagtaccgttaacttccaattaactagttttgacaacattcaaaaaagagtaataaacttcgccttaattttaataatcaacaccctcctagccttactactaataattattacattttgactaccacaactcaacggctacatagaaaaatccaccccttacgagtgcggcttcgaccctatatcccccgcccgcgtccctttctccataaaattcttcttagtagctattaccttcttattatttgatctagaaattgccctccttttacccctaccatgagccctacaaacaactaacctgccactaatagttatgtcatccctcttattaatcatcatcctagccctaagtctggcctatgagtgactacaaaaaggattagactgaaccgaattggtatatagtttaaacaaaacgaatgatttcgactcattaaattatgataatcatatttaccaaatgcccctcatttacataaatattatactagcatttaccatctcacttctaggaatactagtatatcgctcacacctcatatcctccctactatgcctagaaggaataatactatcgctgttcattatagctactctcataaccctcaacacccactccctcttagccaatattgtgcctattgccatactagtctttgccgcctgcgaagcagcggtgggcctagccctactagtctcaatctccaacacatatggcctagactacgtacataacctaaacctactccaatgctaaaactaatcgtcccaacaattatattactaccactgacatgactttccaaaaaacacataatttgaatcaacacaaccacccacagcctaattattagcatcatccctctactattttttaaccaaatcaacaacaacctatttagctgttccccaaccttttcctccgaccccctaacaacccccctcctaatactaactacctgactcctacccctcacaatcatggcaagccaacgccacttatccagtgaaccactatcacgaaaaaaactctacctctctatactaatctccctacaaatctccttaattataacattcacagccacagaactaatcatattttatatcttcttcgaaaccacacttatccccaccttggctatcatcacccgatgaggcaaccagccagaacgcctgaacgcaggcacatacttcctattctacaccctagtaggctcccttcccctactcatcgcactaatttacactcacaacaccctaggctcactaaacattctactactcactctcactgcccaagaactatcaaactcctgagccaacaacttaatatgactagcttacacaatagcttttatagtaaagatacctctttacggactccacttatgactccctaaagcccatgtcgaagcccccatcgctgggtcaatagtacttgccgcagtactcttaaaactaggcggctatggtataatacgcctcacactcattctcaaccccctgacaaaacacatagcctaccccttccttgtactatccctatgaggcataattataacaagctccatctgcctacgacaaacagacctaaaatcgctcattgcatactcttcaatcagccacatagccctcgtagtaacagccattctcatccaaaccccctgaagcttcaccggcgcagtcattctcataatcgcccacgggcttacatcctcattactattctgcctagcaaactcaaactacgaacgcactcacagtcgcatcataatcctctctcaaggacttcaaactctactcccactaatagctttttgatgacttctagcaagcctcgctaacctcgccttaccccccactattaacctactgggagaactctctgtgctagtaaccacgttctcctgatcaaatatcactctcctacttacaggactcaacatactagtcacagccctatactccctctacatatttaccacaacacaatggggctcactcacccaccacattaacaacataaaaccctcattcacacgagaaaacaccctcatgttcatacacctatcccccattctcctcctatccctcaaccccgacatcattaccgggttttcctcttgtaaatatagtttaaccaaaacatcagattgtgaatctgacaacagaggcttacgaccccttatttaccgagaaagctcacaagaactgctaactcatgcccccatgtctaacaacatggctttctcaacttttaaaggataacagctatccattggtcttaggccccaaaaattttggtgcaactccaaataaaagtaataaccatgcacactactataaccaccctaaccctgacttccctaattccccccatccttaccaccctcgttaaccctaacaaaaaaaactcatacccccattatgtaaaatccattgtcgcatccacctttattatcagtctcttccccacaacaatattcatgtgcctagaccaagaagttattatctcgaactgacactgagccacaacccaaacaacccagctctccctaagcttcaaactagactacttctccataatattcatccctgtagcattgttcgttacatggtccatcatagaattctcactgtgatatataaactcagacccaaacattaatcagttcttcaaatatctactcatcttcctaattaccatactaatcttagttaccgctaacaacctattccaactgttcatcggctgagagggcgtaggaattatatccttcttgctcatcagttgatgatacgcccgagcagatgccaacacagcagccattcaagcaatcctatacaaccgtatcggcgatatcggtttcatcctcgccttagcatgatttatcctacactccaactcatgagacccacaacaaatagcccttctaaacgctaatccaagcctcaccccactactaggcctcctcctagcagcagcaggcaaatcagcccaattaggtctccacccctgactcccctcagccatagaaggccccaccccagtctcagccctactccactcaagcactatagttgtagcaggaatcttcttactcatccgcttccaccccctagcagaaaatagcccactaatccaaactctaacactatgcttaggcgctatcaccactctgttcgcagcagtctgcgcccttacacaaaatgacatcaaaaaaatcgtagccttctccacttcaagtcaactaggactcataatagttacaatcggcatcaaccaaccacacctagcattcctgcacatctgtacccacgccttcttcaaagccatactatttatgtgctccgggtccatcatccacaaccttaacaatgaacaagatattcgaaaaataggaggactactcaaaaccatacctctcacttcaacctccctcaccattggcagcctagcattagcaggaatacctttcctcacaggtttctactccaaagaccacatcatcgaaaccgcaaacatatcatacacaaacgcctgagccctatctattactctcatcgctacctccctgacaagcgcctatagcactcgaataattcttctcaccctaacaggtcaacctcgcttccccacccttactaacattaacgaaaataaccccaccctactaaaccccattaaacgcctggcagccggaagcctattcgcaggatttctcattactaacaacatttcccccgcatcccccttccaaacaacaatccccctctacctaaaactcacagccctcgctgtcactttcctaggacttctaacagccctagacctcaactacctaaccaacaaacttaaaataaaatccccactatgcacattttatttctccaacatactcggattctaccctagcatcacacaccgcacaatcccctatctaggccttcttacgagccaaaacctgcccctactcctcctagacctaacctgactagaaaagctattacctaaaacaatttcacagcaccaaatctccacctccatcatcacctcaacccaaaaaggcataattaaactttacttcctctctttcttcttcccactcatcctaaccctactcctaatcacataacctattcccccgagcaatctcaattacaatatatacaccaacaaacaatgttcaaccagtaactactactagtcaacgcccataatcatacaaagcccccgcaccaataggatcctcccgaatcaaccctgacccctctccttcataaattattcagcttcctacactattaaagtttaccacaaccaccaccccatcatactctttcacccacagcaccaatcctacctccatcgctaaccccactaaaacactcaccaagacctcaacccctgacccccatgcctcaggatactcctcaatagccatcgctgtagtatatccaaagacaaccatcattccccctaaataaattaaaaaaactattaaacccatataacctcccccaaaattcagaataataacacacccgaccacaccgctaacaatcaatactaaacccccataaataggagaaggcttagaagaaaaccccacaaaccccattactaaacccacactcaacagaaacaaagcatacatcattattctcgcacggactacaaccacgaccaatgatatgaaaaaccatcgttgtatttcaactacaagaacaccaatgaccccaatacgcaaaactaaccccctaataaaattaattaaccactcattcatcgacctccccaccccatccaacatctccgcatgatgaaacttcggctcactccttggcgcctgcctgatcctccaaatcaccacaggactattcctagccatgcactactcaccagacgcctcaaccgccttttcatcaatcgcccacatcactcgagacgtaaattatggctgaatcatccgctaccttcacgccaatggcgcctcaatattctttatctgcctcttcctacacatcgggcgaggcctatattacggatcatttctctactcagaaacctgaaacatcggcattatcctcctgcttgcaactatagcaacagccttcataggctatgtcctcccgtgaggccaaatatcattctgaggggccacagtaattacaaacttactatccgccatcccatacattgggacagacctagttcaatgaatctgaggaggctactcagtagacagtcccaccctcacacgattctttacctttcacttcatcttgcccttcattattgcagccctagcagcactccacctcctattcttgcacgaaacgggatcaaacaaccccctaggaatcacctcccattccgataaaatcaccttccacccttactacacaatcaaagacgccctcggcttacttctcttccttctctccttaatgacattaacactattctcaccagacctcctaggcgacccagacaattataccctagccaaccccttaaacacccctccccacatcaagcccgaatgatatttcctattcgcctacacaattctccgatccgtccctaacaaactaggaggcgtccttgccctattactatccatcctcatcctagcaataatccccatcctccatatatccaaacaacaaagcataatatttcgcccactaagccaatcactttattgactcctagccgcagacctcctcattctaacctgaatcggaggacaaccagtaagctacccttttaccatcattggacaagtagcatccgtactatacttcacaacaatcctaatcctaataccaactatctccctaattgaaaacaaaatactcaaatgggcctgtccttgtagtataaactaatacaccagtcttgtaaaccggagatgaaaacctttttccaaggacaaatcagagaaaaagtctttaactccaccattagcacccaaagctaagattctaatttaaactattctctgttctttcatggggaagcagatttgggtaccacccaagtattgactcacccatcaacaaccgctatgtatctcgtacattactgccagccaccatgaatattgtacggtaccataaatacttgaccacctgtagtacataaaaacccaatccacatcaaaaccccctccccatgcttacaagcaagtacagcaatcaaccctcaactatcacacatcaactgcaactccaaagccacccctcacccactaggataccaacaaacctacccacccttaacagtacatagtacataaagccatttaccgtacatagcacattacagtcaaatcccttctcgtccccatggatgacccccctcagataggggtcccttgaccaccatcctccgtgaaatcaatatcccgcacaagagtgctactctcctcgctccgggcccataacacttgggggtagctaaagtgaactgtatccgacatctggttcctacttcagggtcataaagcctaaatagcccacacgttccccttaaataagacatcacgatg

SEQ ID NO: 283 - DNA, 16570 bp, Homo sapiens mitochondrial
  3108: "n" refers to a nucleotide at position 3107 of the Cambridge Reference Sequence (CRS, Anderson et al. 1981 Nature 290:457-465), later determined to be absent from the human mtDNA sequence according to the revised CRS (rCRS, Andrews et al. 1999 Nature Genetics 23:147); "n" therefore represents a single nucleotide deletion at a position corresponding to nucleotide 3107 of SEQ ID NO:1 as provided herein.
gatcacaggtctatcaccctattaaccactcacgggagctctccatgcatttggtattttcgtctggggggtatgcacgcgatagcattgcgagacgctggagccggagcaccctatgtcgcagtatctgtctttgattcctgcctcatcctattatttatcgcacctacgttcaatattacaggcgaacatacttactaaagtgtgttaattaattaatgcttgtaggacataataataacaattgaatgtctgcacagccgctttccacacagacatcataacaaaaaatttccaccaaaccccccctcccccgccttctggccacagcacttaaacacatctctgccaaaccccaaaaacaaagaaccctaacaccagcctaaccagatttcaaattttatcttttggcggtatgcacttttaacagtcaccccccaactaacacattattttcccctcccactcccatactactaatctcatcaatacaacccccgcccatcctacccagcacacacacaccgctgctaaccccataccccgaaccaaccaaaccccaaagacaccccccacagtttatgtagcttacctcctcaaagcaatacactgaaaatgtttagacgggctcacatcaccccataaacaaataggtttggtcctagcctttctattagctcttagtaagattacacatgcaagcatccccgttccagtgagttcaccctctaaatcaccacgatcaaaagggacaagcatcaagcacgcagcaatgcagctcaaaacgcttagcctagccacacccccacgggaaacagcagtgattaacctttagcaataaacgaaagtttaactaagctatactaaccccagggttggtcaatttcgtgccagccaccgcggtcacacgattaacccaagtcaatagaagccggcgtaaagagtgttttagatcaccccctccccaataaagctaaaactcacctgagttgtaaaaaactccagttgacacaaaatagactacgaaagtggctttaacatatctgaacacacaatagctaagacccaaactgggattagataccccactatgcttagccctaaacctcaacagttaaatcaacaaaactgctcgccagaacactacgagccacagcttaaaactcaaaggacctggcggtgcttcatatccctctagaggagcctgttctgtaatcgataaaccccgatcaacctcaccacctcttgctcagcctatataccgccatcttcagcaaaccctgatgaaggctacaaagtaagcgcaagtacccacgtaaagacgttaggtcaaggtgtagcccatgaggtggcaagaaatgggctacattttctaccccagaaaactacgatagcccttatgaaacttaagggtcgaaggtggatttagcagtaaactgagagtagagtgcttagttgaacagggccctgaagcgcgtacacaccgcccgtcaccctcctcaagtatacttcaaaggacatttaactaaaacccctacgcatttatatagaggagacaagtcgtaacatggtaagtgtactggaaagtgcacttggacgaaccagagtgtagcttaacacaaagcacccaacttacacttaggagatttcaacttaacttgaccgctctgagctaaacctagccccaaacccactccaccttactaccagacaaccttagccaaaccatttacccaaataaagtataggcgatagaaattgaaacctggcgcaatagatatagtaccgcaagggaaagatgaaaaattataaccaagcataatatagcaaggactaacccctataccttctgcataatgaattaactagaaataactttgcaaggagagccaaagctaagacccccgaaaccagacgagctacctaagaacagctaaaagagcacacccgtctatgtagcaaaatagtgggaagatttataggtagaggcgacaaacctaccgagcctggtgatagctggttgtccaagatagaatcttagttcaactttaaatttgcccacagaaccctctaaatccccttgtaaatttaactgttagtccaaagaggaacagctctttggacactaggaaaaaaccttgtagagagagtaaaaaatttaacacccatagtaggcctaaaagcagccaccaattaagaaagcgttcaagctcaacacccactacctaaaaaatcccaaacatataactgaactcctcacacccaattggaccaatctatcaccctatagaagaactaatgttagtataagtaacatgaaaacattctcctccgcataagcctgcgtcagattaaaacactgaactgacaattaacagcccaatatctacaatcaaccaacaagtcattattaccctcactgtcaacccaacacaggcatgctcataaggaaaggttaaaaaaagtaaaaggaactcggcaaatcttaccccgcctgtttaccaaaaacatcacctctagcatcaccagtattagaggcaccgcctgcccagtgacacatgtttaacggccgcggtaccctaaccgtgcaaaggtagcataatcacttgttccttaaatagggacctgtatgaatggctccacgagggttcagctgtctcttacttttaaccagtgaaattgacctgcccgtgaagaggcgggcataacacagcaagacgagaagaccctatggagctttaatttattaatgcaaacagtacctaacaaacccacaggtcctaaactaccaaacctgcattaaaaatttcggttggggcgacctcggagcagaacccaacctccgagcagtacatgctaagacttcaccagtcaaagcgaactactatactcaattgatccaataacttgaccaacggaacaagttaccctagggataacagcgcaatcctattctagagtccatatcaacaatagggtttacgacctcgatgttggatcaggacatcccgatggtgcagccgctattaaaggttcgtttgttcaacgattaaagtcctacgtgatctgagttcagaccggagtaatccaggtcggtttctatctacnttcaaattcctccctgtacgaaaggacaagagaaataaggcctacttcacaaagcgccttcccccgtaaatgatatcatctcaacttagtattatacccacacccacccaagaacagggtttgttaagatggcagagcccggtaatcgcataaaacttaaaactttacagtcagaggttcaattcctcttcttaacaacatacccatggccaacctcctactcctcattgtacccattctaatcgcaatggcattcctaatgcttaccgaacgaaaaattctaggctatatacaactacgcaaaggccccaacgttgtaggcccctacgggctactacaacccttcgctgacgccataaaactcttcaccaaagagcccctaaaacccgccacatctaccatcaccctctacatcaccgccccgaccttagctctcaccatcgctcttctactatgaacccccctccccatacccaaccccctggtcaacctcaacctaggcctcctatttattctagccacctctagcctagccgtttactcaatcctctgatcagggtgagcatcaaactcaaactacgccctgatcggcgcactgcgagcagtagcccaaacaatctcatatgaagtcaccctagccatcattctactatcaacattactaataagtggctcctttaacctctccacccttatcacaacacaagaacacctctgattactcctgccatcatgacccttggccataatatgatttatctccacactagcagagaccaaccgaacccccttcgaccttgccgaaggggagtccgaactagtctcaggcttcaacatcgaatacgccgcaggccccttcgccctattcttcatagccgaatacacaaacattattataataaacaccctcaccactacaatcttcctaggaacaacatatgacgcactctcccctgaactctacacaacatattttgtcaccaagaccctacttctaacctccctgttcttatgaattcgaacagcatacccccgattccgctacgaccaactcatacacctcctatgaaaaaacttcctaccactcaccctagcattacttatatgatatgtctccatacccattacaatctccagcattccccctcaaacctaagaaatatgtctgataaaagagttactttgatagagtaaataataggagcttaaacccccttatttctaggactatgagaatcgaacccatccctgagaatccaaaattctccgtgccacctatcacaccccatcctaaagtaaggtcagctaaataagctatcgggcccataccccgaaaatgttggttatacccttcccgtactaattaatcccctggcccaacccgtcatctactctaccatctttgcaggcacactcatcacagcgctaagctcgcactgattttttacctgagtgggcctagaaataaacatgctagcttttattccagttctaaccaaaaaaataaaccctcgttccacagaagctgccatcaagtatttcctcacgcaagcaaccgcatccataatccttctaatagctatcctcttcaacaatatactctccggacaatgaaccataaccaatactaccaatcaatactcatcattaataatcataatggctatagcaataaaactaggaatagccccctttcacttctgagtcccagaggttacccaaggcacccctctgacatccggcctgcttcttctcacatgacaaaaactagcccccatctcaatcatataccaaatctctccctcactaaacgtaagccttctcctcactctctcaatcttatccatcatagcaggcagttgaggtggattaaaccaaacccagctacgcaaaatcttagcatactcctcaattacccacataggatgaataatagcagttctaccgtacaaccctaacataaccattcttaatttaactatttatattatcctaactactaccgcattcctactactcaacttaaactccagcaccacgaccctactactatctcgcacctgaaacaagctaacatgactaacacccttaattccatccaccctcctctccctaggaggcctgcccccgctaaccggctttttgcccaaatgggccattatcgaagaattcacaaaaaacaatagcctcatcatccccaccatcatagccaccatcaccctccttaacctctacttctacctacgcctaatctactccacctcaatcacactactccccatatctaacaacgtaaaaataaaatgacagtttgaacatacaaaacccaccccattcctccccacactcatcgcccttaccacgctactcctacctatctccccttttatactaataatcttatagaaatttaggttaaatacagaccaagagccttcaaagccctcagtaagttgcaatacttaatttctgtaacagctaaggactgcaaaaccccactctgcatcaactgaacgcaaatcagccactttaattaagctaagcccttactagaccaatgggacttaaacccacaaacacttagttaacagctaagcaccctaatcaactggcttcaatctacttctcccgccgccgggaaaaaaggcgggagaagccccggcaggtttgaagctgcttcttcgaatttgcaattcaatatgaaaatcacctcggagctggtaaaaagaggcctaacccctgtctttagatttacagtccaatgcttcactcagccattttacctcacccccactgatgttcgccgaccgttgactattctctacaaaccacaaagacattggaacactatacctattattcggcgcatgagctggagtcctaggcacagctctaagcctccttattcgagccgagctgggccagccaggcaaccttctaggtaacgaccacatctacaacgttatcgtcacagcccatgcatttgtaataatcttcttcatagtaatacccatcataatcggaggctttggcaactgactagttcccctaataatcggtgcccccgatatggcgtttccccgcataaacaacataagcttctgactcttacctccctctctcctactcctgctcgcatctgctatagtggaggccggagcaggaacaggttgaacagtctaccctcccttagcagggaactactcccaccctggagcctccgtagacctaaccatcttctccttacacctagcaggtgtctcctctatcttaggggccatcaatttcatcacaacaattatcaatataaaaccccctgccataacccaataccaaacgcccctcttcgtctgatccgtcctaatcacagcagtcctacttctcctatctctcccagtcctagctgctggcatcactatactactaacagaccgcaacctcaacaccaccttcttcgaccccgccggaggaggagaccccattctataccaacacctattctgatttttcggtcaccctgaagtttatattcttatcctaccaggcttcggaataatctcccatattgtaacttactactccggaaaaaaagaaccatttggatacataggtatggtctgagctatgatatcaattggcttcctagggtttatcgtgtgagcacaccatatatttacagtaggaatagacgtagacacacgagcatatttcacctccgctaccataatcatcgctatccccaccggcgtcaaagtatttagctgactcgccacactccacggaagcaatatgaaatgatctgctgcagtgctctgagccctaggattcatctttcttttcaccgtaggtggcctgactggcattgtattagcaaactcatcactagacatcgtactacacgacacgtactacgttgtagcccacttccactatgtcctatcaataggagctgtatttgccatcataggaggcttcattcactgatttcccctattctcaggctacaccctagaccaaacctacgccaaaatccatttcactatcatattcatcggcgtaaatctaactttcttcccacaacactttctcggcctatccggaatgccccgacgttactcggactaccccgatgcatacaccacatgaaacatcctatcatctgtaggctcattcatttctctaacagcagtaatattaataattttcatgatttgagaagccttcgcttcgaagcgaaaagtcctaatagtagaagaaccctccataaacctggagtgactatatggatgccccccaccctaccacacattcgaagaacccgtatacataaaatctagacaaaaaaggaaggaatcgaaccccccaaagctggtttcaagccaaccccatggcctccatgactttttcaaaaaggtattagaaaaaccatttcataactttgtcaaagttaaattataggctaaatcctatatatcttaatggcacatgcagcgcaagtaggtctacaagacgctacttcccctatcatagaagagcttatcacctttcatgatcacgccctcataatcattttccttatctgcttcctagtcctgtatgcccttttcctaacactcacaacaaaactaactaatactaacatctcagacgctcaggaaatagaaaccgtctgaactatcctgcccgccatcatcctagtcctcatcgccctcccatccctacgcatcctttacataacagacgaggtcaacgatccctcccttaccatcaaatcaattggccaccaatggtactgaacctacgagtacaccgactacggcggactaatcttcaactcctacatacttcccccattattcctagaaccaggcgacctgcgactccttgacgttgacaatcgagtagtactcccgattgaagcccccattcgtataataattacatcacaagacgtcttgcactcatgagctgtccccacattaggcttaaaaacagatgcaattcccggacgtctaaaccaaaccactttcaccgctacacgaccgggggtatactacggtcaatgctctgaaatctgtggagcaaaccacagtttcatgcccatcgtcctagaattaattcccctaaaaatctttgaaatagggcccgtatttaccctatagcaccccctctaccccctctagagcccactgtaaagctaacttagcattaaccttttaagttaaagattaagagaaccaacacctctttacagtgaaatgccccaactaaatactaccgtatggcccaccataattacccccatactccttacactattcctcatcacccaactaaaaatattaaacacaaactaccacctacctccctcaccaaagcccataaaaataaaaaattataacaaaccctgagaaccaaaatgaacgaaaatctgttcgcttcattcattgcccccacaatcctaggcctacccgccgcagtactgatcattctatttccccctctattgacccccacctccaaatatctcatcaacaaccgactaatcaccacccaacaatgactaatcaaactaacctcaaaacaaatgataaccatacacaacactaaaggacgaacctgatctcttatactagtatccttaatcatttttattgccacaactaacctcctcggactcctgcctcactcatttacaccaaccacccaactatctataaacctagccatggccatccccttatgagcgggcgcagtgattataggctttcgctctaagattaaaaatgccctagcccacttcttaccacaaggcacacctacaccccttatccccatactagttattatcgaaaccatcagcctactcattcaaccaatagccctggccgtacgcctaaccgctaacattactgcaggccacctactcatgcacctaattggaagcgccaccctagcaatatcaaccattaaccttccctctacacttatcatcttcacaattctaattctactgactatcctagaaatcgctgtcgccttaatccaagcctacgttttcacacttctagtaagcctctacctgcacgacaacacataatgacccaccaatcacatgcctatcatatagtaaaacccagcccatgacccctaacaggggccctctcagccctcctaatgacctccggcctagccatgtgatttcacttccactccataacgctcctcatactaggcctactaaccaacacactaaccatataccaatgatggcgcgatgtaacacgagaaagcacataccaaggccaccacacaccacctgtccaaaaaggccttcgatacgggataatcctatttattacctcagaagtttttttcttcgcaggatttttctgagccttttaccactccagcctagcccctaccccccaattaggagggcactggcccccaacaggcatcaccccgctaaatcccctagaagtcccactcctaaacacatccgtattactcgcatcaggagtatcaatcacctgagctcaccatagtctaatagaaaacaaccgaaaccaaataattcaagcactgcttattacaattttactgggtctctattttaccctcctacaagcctcagagtacttcgagtctcccttcaccatttccgacggcatctacggctcaacattttttgtagccacaggcttccacggacttcacgtcattattggctcaactttcctcactatctgcttcatccgccaactaatatttcactttacatccaaacatcactttggcttcgaagccgccgcctgatactggcattttgtagatgtggtttgactatttctgtatgtctccatctattgatgagggtcttactcttttagtataaatagtaccgttaacttccaattaactagttttgacaacattcaaaaaagagtaataaacttcgccttaattttaataatcaacaccctcctagccttactactaataattattacattttgactaccacaactcaacggctacatagaaaaatccaccccttacgagtgcggcttcgaccctatatcccccgcccgcgtccctttctccataaaattcttcttagtagctattaccttcttattatttgatctagaaattgccctccttttacccctaccatgagccctacaaacaactaacctgccactaatagttatgtcatccctcttattaatcatcatcctagccctaagtctggcctatgagtgactacaaaaaggattagactgaaccgaattggtatatagtttaaacaaaacgaatgatttcgactcattaaattatgataatcatatttaccaaatgcccctcatttacataaatattatactagcatttaccatctcacttctaggaatactagtatatcgctcacacctcatatcctccctactatgcctagaaggaataatactatcgctgttcattatagctactctcataaccctcaacacccactccctcttagccaatattgtgcctattgccatactagtctttgccgcctgcgaagcagcggtgggcctagccctactagtctcaatctccaacacatatggcctagactacgtacataacctaaacctactccaatgctaaaactaatcgtcccaacaattatattactaccactgacatgactttccaaaaaacacataatttgaatcaacacaaccacccacagcctaattattagcatcatccctctactattttttaaccaaatcaacaacaacctatttagctgttccccaaccttttcctccgaccccctaacaacccccctcctaatactaactacctgactcctacccctcacaatcatggcaagccaacgccacttatccagtgaaccactatcacgaaaaaaactctacctctctatactaatctccctacaaatctccttaattataacattcacagccacagaactaatcatattttatatcttcttcgaaaccacacttatccccaccttggctatcatcacccgatgaggcaaccagccagaacgcctgaacgcaggcacatacttcctattctacaccctagtaggctcccttcccctactcatcgcactaatttacactcacaacaccctaggctcactaaacattctactactcactctcactgcccaagaactatcaaactcctgagccaacaacttaatatgactagcttacacaatagcttttatagtaaagatacctctttacggactccacttatgactccctaaagcccatgtcgaagcccccatcgctgggtcaatagtacttgccgcagtactcttaaaactaggcggctatggtataatacgcctcacactcattctcaaccccctgacaaaacacatagcctaccccttccttgtactatccctatgaggcataattataacaagctccatctgcctacgacaaacagacctaaaatcgctcattgcatactcttcaatcagccacatagccctcgtagtaacagccattctcatccaaaccccctgaagcttcaccggcgcagtcattctcataatcgcccacgggcttacatcctcattactattctgcctagcaaactcaaactacgaacgcactcacagtcgcatcataatcctctctcaaggacttcaaactctactcccactaatagctttttgatgacttctagcaagcctcgctaacctcgccttaccccccactattaacctactgggagaactctctgtgctagtaaccacgttctcctgatcaaatatcactctcctacttacaggactcaacatactagtcacagccctatactccctctacatatttaccacaacacaatggggctcactcacccaccacattaacaacataaaaccctcattcacacgagaaaacaccctcatgttcatacacctatcccccattctcctcctatccctcaaccccgacatcattaccgggttttcctcttgtaaatatagtttaaccaaaacatcagattgtgagtctgacaacagaggcttacgaccccttatttaccgagaaagctcacaagaactgctaactcatgcccccatgtctaacaacatggctttctcaacttttaaaggataacagctatccattggtcttaggccccaaaaattttggtgcaactccaaataaaagtaataaccatgcacactactataaccaccctaaccctgacttccctaattccccccatccttaccaccctcgttaaccctaacaaaaaaaactcatacccccattatgtaaaatccattgtcgcatccacctttattatcagtctcttccccacaacaatattcatgtgcctagaccaagaagttattatctcgaactgacactgagccacaacccaaacaacccagctctccctaagcttcaaactagactacttctccataatattcatccctgtagcattgttcgttacatggtccatcatagaattctcactgtgatatataaactcagacccaaacattaatcagttcttcaaatatctactcatcttcctaattaccatactaatcttagttaccgctaacaacctattccaactgttcatcggctgagagggcgtaggaattatatccttcttgctcatcagttgatgatacgcccgagcagatgccaacacagcagccattcaagcaatcctatacaaccgtatcggcgatatcggtttcatcctcgccttagcatgatttatcctacactccaactcatgagacccacaacaaatagcccttctaaacgctaatccaagcctcaccccactactaggcctcctcctagcagcagcaggcaaatcagcccaattaggtctccacccctgactcccctcagccatagaaggccccaccccagtctcagccctactccactcaagcactatagttgtagcaggaatcttcttactcatccgcttccaccccctagcagaaaatagcccactaatccaaactctaacactatgcttaggcgctatcaccactctgttcgcagcagtctgcgcccttacacaaaatgacatcaaaaaaatcgtagccttctccacttcaagtcaactaggactcataatagttacaatcggcatcaaccaaccacacctagcattcctgcacatctgtacccacgccttcttcaaagccatactatttatgtgctccgggtccatcatccacaaccttaacaatgaacaagatattcgaaaaataggaggactactcaaaaccatacctctcacttcaacctccctcaccattggcagcctagcattagcaggaatacctttcctcacaggtttctactccaaagaccacatcatcgaaaccgcaaacatatcatacacaaacgcctgagccctatctattactctcatcgctacctccctgacaagcgcctatagcactcgaataattcttctcaccctaacaggtcaacctcgcttccccacccttactaacattaacgaaaataaccccaccctactaaaccccattaaacgcctggcagccggaagcctattcgcaggatttctcattactaacaacatttcccccgcatcccccttccaaacaacaatccccctctacctaaaactcacagccctcgctgtcactttcctaggacttctaacagccctagacctcaactacctaaccaacaaacttaaaataaaatccccactatgcacattttatttctccaacatactcggattctaccctagcatcacacaccgcacaatcccctatctaggccttcttacgagccaaaacctgcccctactcctcctagacctaacctgactagaaaagctattacctaaaacaatttcacagcaccaaatctccacctccatcatcacctcaacccaaaaaggcataattaaactttacttcctctctttcttcttcccactcatcctaaccctactcctaatcacataacctattcccccgagcaatctcaattacaatatatacaccaacaaacaatgttcaaccagtaactactactaatcaacgcccataatcatacaaagcccccgcaccaataggatcctcccgaatcaaccctgacccctctccttcataaattattcagcttcctacactattaaagtttaccacaaccaccaccccatcatactctttcacccacagcaccaatcctacctccatcgctaaccccactaaaacactcaccaagacctcaacccctgacccccatgcctcaggatactcctcaatagccatcgctgtagtatatccaaagacaaccatcattccccctaaataaattaaaaaaactattaaacccatataacctcccccaaaattcagaataataatacacccgaccacaccgctaacaatcaatactaaacccccataaataggagaaggcttagaagaaaaccccacaaaccccattactaaacccacactcaacagaaacaaagcatacatcattattctcgcacggactacaaccacgaccaatgatatgaaaaaccatcgttgtatttcaactacaagaacaccaatgaccccaatacgcaaaactaaccccctaataaaattaattaaccactcattcatcgacctccccaccccatccaacatctccgcatgatgaaacttcggctcactccttggcgcctgcctgatcctccaaatcaccacaggactattcctagccatgcactactcaccagacgcctcaaccgccttttcatcaatcgcccacatcactcgagacgtaaattatggctgaatcatccgctaccttcacgccaatggcgcctcaatattctttatctgcctcttcctacacatcgggcgaggcctatattacggatcatttctctactcagaaacctgaaacatcggcattatcctcctgcttgcaactatagcaacagccttcataggctatgtcctcccgtgaggccaaatatcattctgaggggccacagtaattacaaacttactatccgccatcccatacattgggacaaacctagttcaatgaatctgaggaggctactcagtagacagtcccaccctcacacgattctttacctttcacttcatcttgcccttcattattgcagccctagcagcactccacctcctattcttgcacgaaacgggatcaaacaaccccctaggaatcacctcccattccgataaaatcaccttccacccttactacacaatcaaagacgccctcggcttacttctcttccttctctccttaatgacattaacactattctcaccagacctcctaggcgacccagacaattataccctagccaaccccttaaacacccctccccacatcaagcccgaatgatatttcctattcgcctacacaattctccgatccgtccctaacaaactaggaggcgtccttgccctattactatccatcctcatcctagcaataatccccatcctccatatatccaaacaacaaagcataatatttcgcccactaagccaatcactttattgactcctagccgcagacctcctcattctaacctgaatcggaggacaaccagtaagctacccttttaccatcattggacaagtagcatccgtactatacttcacaacaatcctaatcctaataccaactatctccctaattgaaaacaaaatactcaaatgggcctgtccttgtagtataaactaatacaccagtcttgtaagccggagatgaaaacctttttccaaggacaaatcagagaaaaagtctttaactccaccattagcacccaaagctaagattctaatttaaactattctctgttctttcatggggaagcagatttgggtaccacccaagtattgactcacccatcaacaaccgctatgtatttcgtacattactgccagccaccatgaatattgtacggtaccataaatacttgaccacctgtagtacataaaaacccaatccacatcaaaaccccctccccatgcttacaagcaagtacagcaatcaaccctcaactatcacacatcaactgcaactccaaagccactcctcacccactaggataccaacaaacctacccacccttaacagtacatagtacataaagccatttaccgtacatagcacattacagtcaaatcccttctcgtccccatggatgacccccctcagataggggtcccttgaccaccatcctccgtgaaatcaatatcccgcacaagagtgctactctcctcgctccgggcccataacacttgggggtagctaaagtgaactgtatccgacatctggttcctacttcagggccataaagcctaaatagcccacacgttccccttaaataagacatcacgatg

SEQ ID NO: 284 - DNA, 16573 bp, Homo sapiens mitochondrial
  3111: "n" refers to a nucleotide at position 3107 of the Cambridge Reference Sequence (CRS, Anderson et al. 1981 Nature 290:457-465), later determined to be absent from the human mtDNA sequence according to the revised CRS (rCRS, Andrews et al. 1999 Nature Genetics 23:147); "n" therefore represents a single nucleotide deletion at a position corresponding to nucleotide 3107 of SEQ ID NO:1 as provided herein.
gatcacaggtctatcaccctattaaccactcacgggagctctccatgcatttggtattttcgtctggggggtgtgcacgcgatagcattgcgagacgctggagccggagcaccctatgtcgcagtatctgtctttgattcctgcctcatcctattatttatcgcacctacgttcaatattacaggcgaacatacttactaaagtgtgttaattaattaatgcttgtaggacataataataacaattgaatgtctgcacagccgctttccacacagacatcataacaaaaaatttccaccaaaccccccctcccccccgcttctggccacagcacttaaacacatctctgccaaaccccaaaaacaaagaaccctaacaccagcctaaccagatttcaaattttatcttttggcggtatgcacttttaacagtcaccccccaactaacacattattttcccctcccactcccatactactaatctcatcaatacaaccctcgcccatcctacccagcacacacacaccacgctgctaaccccataccccgaaccaaccaaaccccaaagacaccccccacagtttatgtagcttacctcctcaaagcaatacactgaaaatgtttagacgggctcacatcaccccataaacaaataggtttggtcctagcctttctattagctcttagtaagattacacatgcaagcatccccgttccagtgagttcaccctctaaatcaccacgatcaaaagggacaagcatcaagcacgcagcaatgcagctcaaaacgcttagcctagccacacccccacgggaaacagcagtgattaacctttagcaataaacgaaagtttaactaagctatactaaccccagggttggtcaatttcgtgccagccaccgcggtcacacgattaacccaagtcaatagaagccggcgtaaagagtgttttagatcaccccctccccaataaagctaaaactcacctgagttgtaaaaaactccagttgacacaaaatagactacgaaagtggctttaacatatctgaacacacaatagctaagacccaaactgggattagataccccactatgcttagccctaaacctcaacagttaaatcaacaaaactgctcgccagaacactacgagccacagcttaaaactcaaaggacctggcggtgcttcatacccctctagaggagcctgttctgtaatcgataaaccccgatcaacctcaccacctcttgctcagcctatataccgccatcttcagcaaaccctgatgaaggctacaaagtaagcgcaagtacccacgtaaagacgttaggtcaaggtgtagcccatgaggtggcaagaaatgggctacattttctaccccagaaaactacgatagcccttatgaaacttaagggtcgaaggtggatttagcagtaaactgagagtagagtgcttagttgaacagggccctgaagcgcgtacacaccgcccgtcaccctcctcaagtatacttcaaaggacatttaactaaaacccctacgcatttatatagaggagacaagtcgtaacatggtaagtgtactggaaagtgcacttggacgaaccagagtgtagcttaacacaaagcacccaacttacacttaggagatttcaacttaacttgaccgctctgagctaaacctagccccaaacccactccaccttactaccagacaaccttagccaaaccatttacccaaataaagtataggcgatagaaattgaaacctggcgcaatagatatagtaccgcaagggaaagatgaaaaattatagccaagcataatatagcaaggactaacccctataccttctgcataatgaattaactagaaataactttgcaaggagagccaaagctaagacccccgaaaccagacgagctacctaagaacagctaaaagagcacacccgtctatgtagcaaaatagtgggaagatttataggtagaggcgacaaacctaccgagcctggtgatagctggttgtccaagatagaatcttagttcaactttaaatttgcccacagaaccctctaaatccccttgtaaatttaactgttagtccaaagaggaacagctctttggacactaggaaaaaaccttgtagagagagtaaaaaatttaacacccatagtaggcctaaaagcagccaccaattaagaaagcgttcaagctcaacacccactacctaaaaaatcccaaacatataactgaactcctcacacccaattggaccaatctatcaccctatagaagaactaatgttagtataagtaacatgaaaacattctcctccgcataagcctgcgtcagattaaaacactgaactgacaattaacagcccaatatctacaatcaaccaacaagtcattattaccctcactgtcaacccaacacaggcatgctcataaggaaaggttaaaaaaagtaaaaggaactcggcaaatcttaccccgcctgtttaccaaaaacatcacctctagcatcaccagtattagaggcaccgcctgcccagtgacacatgtttaacggccgcggtaccctaaccgtgcaaaggtagcataatcacttgttccttaaatagggacctgtatgaatggctccacgagggttcagctgtctcttacttttaaccagtgaaattgacctgcccgtgaagaggcgggcatgacacagcaagacgagaagaccctatggagctttaatttattaatgcaaacagtacctaacaaacccacaggtcctaaactaccaaacctgcattaaaaatttcggttggggcgacctcggagcagaacccaacctccgagcagtacatgctaagacttcaccagtcaaagcgaactactatactcaattgatccaataacttgaccaacggaacaagttaccctagggataacagcgcaatcctattctagagtccatatcaacaatagggtttacgacctcgatgttggatcaggacatcccgatggtgcagccgctattaaaggttcgtttgttcaacgattaaagtcctacgtgatctgagttcagaccggagtaatccaggtcggtttctatctacnttcaaattcctccctgtacgaaaggacaagagaaataaggcctacttcacaaagcgccttcccccgtaaatgatatcatctcaacttagtattatacccacacccacccaagaacagggtttgttaagatggcagagcccggtaatcgcataaaacttaaaactttacagtcagaggttcaattcctcttcttaacaacatacccatggccaacctcctactcctcattgtacccattctaatcgcaatggcattcctaatgcttaccgaacgaaaaattctaggctatatacaactacgcaaaggccccaacgttgtaggcccctacgggctactacaacccttcgctgacgccataaaactcttcaccaaggagcccctaaaacccgccacatctaccatcaccctctacatcaccgccccgaccttagctctcaccatcgctcttctactatgaacccccctccccatacccaaccccctggtcaacctcaacctaggcctcctatttattctagccacctctagcctagccgtttactcaatcctctgatcagggtgagcatcaaactcaaactacgccctgatcggcgcactgcgagcagtagcccaaacaatctcatatgaagtcaccctagccatcattctactatcaacattactaataagtggctcctttaacctctccacccttatcacaacacaagaacacctctgattactcctgccatcatgacccttggccataatatgatttatctccacactagcagagaccaaccgaacccccttcgaccttgccgaaggggagtccgaactagtctcaggcttcaacatcgaatacgccgcaggccccttcgccctattcttcatagccgaatacacaaacattattataataaacaccctcaccactacaatcttcctaggaacaacatatgacgcactctcccctgaactctacacaacatattttgtcaccaagaccctacttctaacctccctgttcttatgaattcgaacagcatacccccgattccgctacgaccaactcatacacctcctatgaaaaaacttcctaccactcaccctagcattacttatatgatatgtctccatacccattacaatctccagcattccccctcaaacctaagaaatatgtctgataaaagagttactttgatagagtaaataataggagcttaaacccccttatttctaggactatgagaatcgaacccatccctgagaatccaaaattctccgtgccacctatcacaccccatcctaaagtaaggtcagctaaataagctatcgggcccataccccgaaaatgttggttatacccttcccgtactaattaatcccctggcccaacccgtcatctactctaccatctttgcaggcacactcatcacagcgctaagctcgcactgattttttacctgagtaggcctagaaataaacatgctagcttttattccagttctaaccaaaaaaataaaccctcgttccacagaagctgccatcaagtatttcctcacgcaagcaaccgcatccataatccttctaatagctatcctcttcaacaatatactctccggacaatgaaccataaccaatactaccaatcaatactcatcattaataatcataatggctatagcaataaaactaggaatagccccctttcacttctgagtcccagaggttacccaaggcacccctctgacatccggcctgcttcttctcacatgacaaaaactagcccccatctcaatcatataccaaatctctccctcactaaacgtaagccttctcctcactctctcaatcttatccatcatagcaggcagttgaggtggattaaaccaaacccagctacgcaaaatcttagcatactcctcaattacccacataggatgaataatagcagttctaccgtacaaccctaacataaccattcttaatttaactatttatattatcctaactactaccgcattcctactactcaacttaaactccagcaccacgaccctactactatctcgcacctgaaacaagctaacatgactaacacccttaattccatccaccctcctctccctaggaggcctgcccccgctaaccggctttttgcccaaatgggccattatcgaagaattcacaaaaaacaatagcctcatcatccccaccatcatagccaccatcaccctccttaacctctacttctacctacgcctaatctactccacctcaatcacactactccccatatctaacaacgtaaaaataaaatgacagtttgaacatacaaaacccaccccattcctccccacactcatcgcccttaccacgctactcctacctatctccccttttatactaataatcttatagaaatttaggttaaatacagaccaagagccttcaaagccctcagtaagttgcaatacttaatttctgtaacagctaaggactgcaaaaccccactctgcatcaactgaacgcaaatcagccactttaattaagctaagcccttactagaccaatgggacttaaacccacaaacacttagttaacagctaagcaccctaatcaactggcttcaatctacttctcccgccgccgggaaaaaaggcgggagaagccccggcaggtttgaagctgcttcttcgaatttgcaattcaatatgaaaatcacctcggagctggtaaaaagaggcctaacccctgtctttagatttacagtccaatgcttcactcagccattttacctcacccccactgatgttcgccgaccgttgactattctctacaaaccacaaagacattggaacactatacctattattcggcgcatgagctggagtcctaggcacagctctaagcctccttattcgagccgagctgggccagccaggcaaccttctaggtaacgaccacatctacaacgttatcgtcacagcccatgcatttgtaataatcttcttcatagtaatacccatcataatcggaggctttggcaactgactagttcccctaataatcggtgcccccgatatggcgtttccccgcataaacaacataagcttctgactcttacctccctctctcctactcctgctcgcatctgctatagtggaagccggagcaggaacaggttgaacagtctaccctcccttagcagggaactactcccaccctggagcctccgtagacctaaccatcttctccttacacctagcaggtgtctcctctatcttaggggccatcaatttcatcacaacaattatcaatataaaaccccctgccataacccaataccaaacgcccctcttcgtctgatccgtcctaatcacagcagtcctacttctcctatctctcccagtcctagctgctggcatcactatactactaacagaccgcaacctcaacaccaccttcttcgaccccgccggaggaggagaccccattctataccaacacctattctgatttttcggtcaccctgaagtttatattcttatcctaccaggcttcggaataatctcccatattgtaacttactactccggaaaaaaagaaccatttggatacataggtatggtctgagctatgatatcaattggcttcctagggtttatcgtgtgagcacaccatatatttacagtaggaatagacgtagacacacgagcatatttcacctccgctaccataatcatcgctatccccaccggcgtcaaagtatttagctgactcgccacactccacggaagcaatatgaaatgatctgctgcagtgctctgagccctaggattcatctttcttttcaccgtaggtggcctgactggcattgtattagcaaactcatcactagacatcgtactacacgacacgtactacgttgtagctcacttccactatgtcctatcaataggagctgtatttgccatcataggaggcttcattcactgatttcccctattctcaggctacaccctagaccaaacctacgccaaaatccatttcactatcatattcatcggcgtaaatctaactttcttcccacaacactttctcggcctatccggaatgccccgacgttactcggactaccccgatgcatacaccacatgaaacatcctatcatctgtaggctcattcatttctctaacagcagtaatattaataattttcatgatttgagaagccttcgcttcgaagcgaaaagtcctaatagtagaagaaccctccataaacctggagtgactatatggatgccccccaccctaccacacattcgaagaacccgtatacataaaatctagacaaaaaaggaaggaatcgaaccccccaaagctggtttcaagccaaccccatggcctccatgactttttcaaaaaggtattagaaaaaccatttcataactttgtcaaagttaaattataggctaaatcctatatatcttaatggcacatgcagcgcaagtaggtctacaagacgctacttcccctatcatagaagagcttatcacctttcatgatcacgccctcataatcattttccttatctgcttcctagtcctgtatgcccttttcctaacactcacaacaaaactaactaatactaacatctcagacgctcaggaaatagaaaccgtctgaactatcctgcccgccatcatcctagtcctcatcgccctcccatccctacgcatcctttacataacagacgaggtcaacgatccctcccttaccatcaaatcaattggccaccaatggtactgaacctacgagtacaccgactacggcggactaatcttcaactcctacatacttcccccattattcctagaaccaggcgacctgcgactccttgacgttgacaatcgagtagtactcccgattgaagcccccattcgtataataattacatcacaagacgtcttgcactcatgagctgtccccacattaggcttaaaaacagatgcaattcccggacgtctaaaccaaaccactttcaccgctacacgaccgggggtatactacggtcaatgctctgaaatctgtggagcaaaccacagtttcatgcccatcgtcctagaattaattcccctaaaaatctttgaaatagggcccgtatttaccctatagcaccccctctaccccctctagagcccactgtaaagctaacttagcattaaccttttaagttaaagattaagagaaccaacacctctttacagtgaaatgccccaactaaatactaccgtatggcccaccataattacccccatactccttacactattcctcatcacccaactaaaaatattaaacacaaactaccacctacctccctcaccaaagcccataaaaataaaaaattataacaaaccctgagaaccaaaatgaacgaaaatctgttcgcttcattcattgcccccacaatcctaggcctacccgccgcagtactgatcattctatttccccctctattgatccccacctccaaatatctcatcaacaaccgactaatcaccacccaacaatgactaatcaaactaacctcaaaacaaatgataaccatacacaacactaaaggacgaacctgatctcttatactagtatccttaatcatttttattgccacaactaacctcctcggactcctgcctcactcatttacaccaaccacccaactatctataaacctagccatggccatccccttatgagcgggcgcagtgattataggctttcgctctaagattaaaaatgccctagcccacttcttaccacaaggcacacctacaccccttatccccatactagttattatcgaaaccatcagcctactcattcaaccaatagccctggccgtacgcctaaccgctaacattactgcaggccacctactcatgcacctaattggaagcaccaccctagcaatatcaaccattaaccttccctctacacttatcatcttcacaattctaattctactgactatcctagaaatcgctgtcgccttaatccaagcctacgttttcacacttctagtaagcctctacctgcacgacaacacataatgacccaccaatcacatgcctatcatatagtaaaacccagcccatgacccctaacaggggccctctcagccctcctaatgacctccggcctagccatgtgatttcacttccactccataacgctcctcatactaggcctactaaccaacacactaaccatataccaatgatggcgcgatgtaacacgagaaagcacataccaaggccaccacacaccacctgtccaaaaaggccttcgatacgggataatcctatttattacctcagaagtttttttcttcgcaggatttttctgagccttttaccactccagcctagcccctaccccccaattaggagggcactggcccccaacaggcatcaccccgctaaatcccctagaagtcccactcctaaacacatccgtattactcgcatcaggagtatcaatcacctgagctcaccatagtctaatagaaaacaaccgaaaccaaataattcaagcactgctcattacaattttactgggtctctattttaccctcctacaagcctcagagtacttcgagtctcccttcaccatttccgacggcatctacggctcaacattttttgtagccacaggcttccacggacttcacgtcattattggctcaactttcctcactatctgcttcatccgccaactaatatttcactttacatccaaacatcactttggcttcgaagccgccgcctgatactggcattttgtagatgtggtttgactatttctgtatgtctccatctattgatgagggtcttactcttttagtataaatagtaccgttaacttccaattaactagttttgacaacattcaaaaaagagtaataaacttcgccttaattttaataatcaacaccctcctagccttactactaataattattacattttgactaccacaactcaacggctacatagaaaaatccaccccttacgagtgcggcttcgaccctatatcccccgcccgcgtccctttctccataaaattcttcttagtagctattaccttcttattatttgatctagaaattgccctccttttacccctaccatgagccctacaaacaactaacctgccactaatagttatgtcatccctcttattaatcatcatcctagccctaagtctggcctatgagtgactacaaaaaggattagactgagccgaattggtatatagtttaaacaaaacgaatgatttcgactcattaaattatgataatcatatttaccaaatgcccctcatttacataaatattatactagcatttaccatctcacttctaggaatactagtatatcgctcacacctcatgtcctccctactatgcctagaaggaataatactatcgctgttcattatagctactctcataaccctcaacacccactccctcttagccaatattgtgcctattgccatactagtctttgccgcctgcgaagcagcggtgggcctagccctactagtctcaatctccaacacatatggcctagactacgtacataacctaaacctactccaatgctaaaactaatcgtcccaacaattatattactaccactgacatgactttccaaaaaacacataatttgaatcaacacaaccacccacagcctaattattagcatcatccctctactattttttaaccaaatcaacaacaacctatttagctgttccccaaccttttcctccgaccccctaacaacccccctcctaatactaactacctgactcctacccctcacaatcatggcaagccaacgccacttatccagtgaaccactatcacgaaaaaaactctacctctctatactaatctccctacaaatctccttaattataacattcacagccacagaactaatcatattttatatcttcttcgaaaccacacttatccccaccttggctatcatcacccgatgaggcaaccagccagaacgcctgaacgcaggcacatacttcctattctacaccctagtaggctcccttcccctactcatcgcactaatttacactcacaacaccctaggctcactaaacattctactactcaccctcactgcccaagaactatcaaactcctgagccaacaacttaatatgactagcttacacaatagcttttatagtaaagatacctctttacggactccacttatgactccctaaagcccatgtcgaagcccccatcgctgggtcaatagtacttgccgcagtactcttgaaactaggcggctatggcataatacgcctcacactcattctcaaccccctgacaaaacacatagcctaccccttccttgtactatccctatgaggcataattataacaagctccatctgcctacgacaaacagacctaaaatcgctcattgcatactcttcaatcagccacatagccctcgtagtaacagccattctcatccaaaccccctgaagcttcaccggcgcagtcattctcataatcgcccacggacttacatcctcattactattctgcctagcaaactcaaactacgaacgcactcacagtcgcatcataatcctctctcaaggacttcaaactctactcccactaatagctttttgatgacttttagcaagcctcgctaacctcgccttaccccccactattaacctactgggagaactctctgtgctagtaaccacgttctcctgatcaaatatcactctcctacttacaggactcaacatactagtcacagccctatactccctctacatatttaccacaacacaatggggctcactcacccaccacattaacaacataaaaccctcattcacacgagaaaacaccctcatgttcatacacctatcccccattctcctcctatccctcaaccccgacatcattaccgggttttcctcttgtaaatatagtttaaccaaaacatcagattgtgaatctgacaacagaggcttacgaccccttatttaccgagaaagctcacaagaactgctaactcatgcccccatgtctaacaacatggctttctcaacttttaaaggataacagctatccattggtcttaggccccaagaattttggtgcaactccaaataaaagtaataaccatgcacactactataaccaccctaaccctaacttccctaattccccccatccttaccaccctcgttaaccctaacaaaaaaaactcatacccccattatgtaaaatccattgtcgcatccacctttattatcagtctcttccccacaacaatattcatgtgcctagaccaagaagttattatctcgaactgacactgagccacaacccaaacaacccagctctccctaagcttcaaactagactacttctccataatattcatccctgtagcattgttcgttacatggtccatcatagaattctcactgtgatatataaactcagacccaaacattaatcagttcttcaaatatctactcatcttcctaattaccatactaatcttagttaccgctaacaacctattccaactgttcatcggctgagagggcgtaggaattatatccttcttgctcatcagttgatgatacgcccgagcagatgccaacacagcagccattcaagcaatcctatacaaccgtatcggcgatatcggtttcatcctcgccttagcatgatttatcctacactccaactcatgagacccacaacaaatagcccttctaaacgctaatccaagcctcaccccactactaggcctcctcctagcagcagcaggcaaatcagcccaattaggtctccacccctgactcccctcagccatagaaggccccaccccagtctcagccctactccactcaagcactatagttgtagcaggaatcttcttactcatccgcttccaccccctagcagaaaatagcccactaatccaaactctaacactatgcttaggcgctatcaccactctgttcgcagcagtctgcgcccttacacaaaatgacatcaaaaaaatcgtagccttctccacttcaagtcaactaggactcataatagttacaatcggcatcaaccaaccacacctagcattcctgcacatctgtacccacgccttcttcaaagccatactatttatgtgctccgggtccatcatccacaaccttaacaatgaacaagatattcgaaaaataggaggactactcaaaaccatacctctcacttcaacctccctcaccattggcagcctagcattagcaggaatacctttcctcacaggtttctactccaaagaccacatcatcgaaaccgcaaacatatcatacacaaacgcctgagccctatctattactctcatcgctacctccctgacaagcgcctatagcactcgaataattcttctcaccctaacaggtcaacctcgcttccccacccttactaacattaacgaaaataaccccaccctactaaaccccattaaacgcctggcagccggaagcctattcgcaggatttctcatcactaacaacatttcccccgcatcccccttccaaacaacaatccccctctacctaaaactcacagccctcgctgtcactttcctaggacttctaacagccctagacctcaactacctaaccaacaaacttaaaataaaatccccactatgcacattttatttctccaacatactcggattctaccctagcatcacacaccgcacaatcccctatctaggccttcttacgagccaaaacctgcccctactcctcctagacctaacctgactagaaaagctattacctaaaacaatttcacagcaccaaatctccacctccatcatcacctcaacccaaaaaggcataattaaactttacttcctctctttcttcttcccactcatcctaaccctactcctaatcacataacctattcccccgagcaatttcaattacaatatatacaccaacaaacaatgttcaaccagtaactactactaatcaacgcccataatcatacaaagcccccgcaccaataggatcctcccgaatcaaccctgacccctctccttcataaattattcagcttcctacactattaaagtttaccacaaccaccaccccatcatactctttcacccacagcaccaatcctacctccatcgctaaccccactaaaacactcaccaagacctcaacccctgacccccatgcctcaggatactcctcaatagccatcgctgtagtatatccaaagacaaccatcattccccctaaataaattaaaaaaactattaaacccatataacctcccccaaaattcagaataataacacacccgaccacaccgctaacaatcaatactaaacccccataaataggagaaggcttagaagaaaaccccacaaaccccattactaaacccacactcaacagaaacaaagcatacatcattattctcgcacggactacaaccacgaccaatgatatgaaaaaccatcgttgtatttcaactacaagaacaccaatgaccccaatacgcaaaattaaccccctaataaaattaattaaccactcactcatcgacctccccaccccatccaacatctccgcatgatgaaacttcggctcactccttggcgcctgcctgatcctccaaatcaccacaggactattcctagccatgcactactcaccagacgcctcaaccgccttttcatcaatcgcccacatcactcgagacgtaaattatggctgaatcatccgctaccttcacgccaatggcgcctcaatattctttatctgcctcttcctacacatcgggcgaggcctatattacggatcatttctctactcagaaacctgaaacatcggcattatcctcctgcttgcaactatagcaacagccttcataggctatgtcctcccgtgaggccaaatatcattctgaggggccacagtaattacaaacttactatccgccatcccatacattgggacagacctagttcaatgaatctgaggaggctactcagtagacagtcccaccctcacacgattctttacctttcacttcatcttgcccttcattattgcagccctagcagcactccacctcctattcttgcacgaaacgggatcaaacaaccccctaggaatcacctcccattccgataaaatcaccttccacccttactacacaatcaaagacgccctcggcttacttctcttccttctctccttaatgacattaacactattctcaccagacctcctaggcgacccagacaattataccctagccaaccccttaaacacccctccccacatcaagcccgaatgatatttcctattcgcctacacaattctccgatccgtccctaacaaactaggaggcgtccttgccctattactatccatcctcatcctagcaataatccccatcctccatatatccaaacaacaaagcataatatttcgcccactaagccaatcactttattgactcctagccgcagacctcctcattctaacctgaatcggaggacaaccagtaagctacccttttaccatcattggacaagtagcatccgtactatacttcacaacaatcctaatcctaataccaactatctccctaattgaaaacaaaatactcaaatgggcctgtccttgtagtataaactaatacaccagtcttgtaaaccggagatgaaaacctttttccaaggacaaatcagagaaaaagtctttaactccaccattagcacccaaagctaagattctaatttaaactattctctgttctttcatggggaagcagatttgggtaccacccaagtattgactcacccatcaacaaccgctatgtatttcgtacattactgccagccaccatgaatattgtacggtaccataaatacttgaccacctgtagtacataaaaacccaatccacatcaaaaccccctccccatgcttacaagcaagtacagcaatcaacccccaactatcacacatcaactgcaactccaaagccacccctcacccactaggataccaacaaacctacccacccttaacagtacatagcacataaagccatttaccgtacatagcacattacagtcaaatcccttctcgtccccatggatgacccccctcagataggggtcccttgaccaccatcctccgtgaaatcaatatcccgcacaagagtgctactctcctcgctccgggcccataacacttgggggtagctaaagtgaactgtatccgacatctggttcctacttcagggccataaagcctaaatagcccacacgttccccttaaataagacatcacgatg

SEQ ID NO: 285 - DNA, 16570 bp, Homo sapiens mitochondrial
  3108: "n" refers to a nucleotide at position 3107 of the Cambridge Reference Sequence (CRS, Anderson et al. 1981 Nature 290:457-465), later determined to be absent from the human mtDNA sequence according to the revised CRS (rCRS, Andrews et al. 1999 Nature Genetics 23:147); "n" therefore represents a single nucleotide deletion at a position corresponding to nucleotide 3107 of SEQ ID NO:1 as provided herein.
gatcacaggtctatcaccctattaaccactcacgggagctctccatgcatttggtattttcgtctggggggtatgcacgcgatagcattgcgagacgctggagccggagcaccctatgtcgcagtatctgtctttgattcctgcctcatcctattatttatcgcacctacgttcaatattacaggcgaacatacttactaaagtgtgttaattaattaatgcttgtaggacataataataacaattgaatgtctgcacagccgctttccacacagacatcataacaaaaaatttccaccaaaccccccctcccccgccttctggccacagcacttaaacacatctctgccaaaccccaaaaacaaagaaccctaacaccagcctaaccagatttcaaattttatcttttggcggtatgcacttttaacagtcaccccccaactaacacattattttcccctcccactcccatactactaatctcatcaatacaacccccgcccatcctacccagcacacacacaccgctgctaaccccataccccgaaccaaccaaaccccaaagacaccccccacagtttatgtagcttacctcctcaaagcaatacactgaaaatgtttagacgggctcacatcaccccataaacaaataggtttggtcctagcctttctattagctcttagtaagattacacatgcaagcatccccgttccagtgagttcaccctctaaatcaccacgatcaaaagggacaagcatcaagcacgcagcaatgcagctcaaaacgcttagcctagccacacccccacgggaaacagcagtgattaacctttagcaataaacgaaagtttaactaagctatactaaccccagggttggtcaatttcgtgccagccaccgcggtcacacgattaacccaagtcaatagaagccggcgtaaagagtgttttagatcaccccctccccaataaagctaaaactcacctgagttgtaaaaaactccagttgacacaaaatagactacgaaagtggctttaacatatctgaacacacaatagctaagacccaaactgggattagataccccactatgcttagccctaaacctcaacagttaaatcaacaaaactgctcgccagaacactacgagccacagcttaaaactcaaaggacctggcggtgcttcatatccctctagaggagcctgttctgtaatcgataaaccccgatcaacctcaccacctcttgctcagcctatataccgccatcttcagcaaaccctgatgaaggctacaaagtaagcgcaagtacccacgtaaagacgttaggtcaaggtgtagcccatgaggtggcaagaaatgggctacattttctaccccagaaaactacgatagcccttatgaaacttaagggtcgaaggtggatttagcagtaaactgagagtagagtgcttagttgaacagggccctgaagcgcgtacacaccgcccgtcaccctcctcaagtatacttcaaaggacatttaactaaaacccctacgcatttatatagaggagacaagtcgtaacatggtaagtgtactggaaagtgcacttggacgaaccagagtgtagcttaacacaaagcacccaacttacacttaggagatttcaacttaacttgaccgctctgagctaaacctagccccaaacccactccaccttactaccagacaaccttagccaaaccatttacccaaataaagtataggcgatagaaattgaaacctggcgcaatagatatagtaccgcaagggaaagatgaaaaattataaccaagcataatatagcaaggactaacccctataccttctgcataatgaattaactagaaataactttgcaaggagagccaaagctaagacccccgaaaccagacgagctacctaagaacagctaaaagagcacacccgtctatgtagcaaaatagtgggaagatttataggtagaggcgacaaacctaccgagcctggtgatagctggttgtccaagatagaatcttagttcaactttaaatttgcccacagaaccctctaaatccccttgtaaatttaactgttagtccaaagaggaacagctctttggacactaggaaaaaaccttgtagagagagtaaaaaatttaacacccatagtaggcctaaaagcagccaccaattaagaaagcgttcaagctcaacacccactacctaaaaaatcccaaacatataactgaactcctcacacccaattggaccaatctatcaccctatagaagaactaatgttagtataagtaacatgaaaacattctcctccgcataagcctgcgtcagattaaaacactgaactgacaattaacagcccaatatctacaatcaaccaacaagtcattattaccctcactgtcaacccaacacaggcatgctcataaggaaaggttaaaaaaagtaaaaggaactcggcaaatcttaccccgcctgtttaccaaaaacatcacctctagcatcaccagtattagaggcaccgcctgcccagtgacacatgtttaacggccgcggtaccctaaccgtgcaaaggtagcataatcacttgttccttaaatagggacctgtatgaatggctccacgagggttcagctgtctcttacttttaaccagtgaaattgacctgcccgtgaagaggcgggcataacacagcaagacgagaagaccctatggagctttaatttattaatgcaaacagtacctaacaaacccacaggtcctaaactaccaaacctgcattaaaaatttcggttggggcgacctcggagcagaacccaacctccgagcagtacatgctaagacttcaccagtcaaagcgaactactatactcaattgatccaataacttgaccaacggaacaagttaccctagggataacagcgcaatcctattctagagtccatatcaacaatagggtttacgacctcgatgttggatcaggacatcccgatggtgcagccgctattaaaggttcgtttgttcaacgattaaagtcctacgtgatctgagttcagaccggagtaatccaggtcggtttctatctacnttcaaattcctccctgtacgaaaggacaagagaaataaggcctacttcacaaagcgccttcccccgtaaatgatatcatctcaacttagtattatacccacacccacccaagaacagggtttgttaagatggcagagcccggtaatcgcataaaacttaaaactttacagtcagaggttcaattcctcttcttaacaacatacccatggccaacctcctactcctcattgtacccattctaatcgcaatggcattcctaatgcttaccgaacgaaaaattctaggctatatacaactacgcaaaggccccaacgttgtaggcccctacgggctactacaacccttcgctgacgccataaaactcttcaccaaagagcccctaaaacccgccacatctaccatcaccctctacatcaccgccccgaccttagctctcaccatcgctcttctactatgaacccccctccccatacccaaccccctggtcaacctcaacctaggcctcctatttattctagccacctctagcctagccgtttactcaatcctctgatcagggtgagcatcaaactcaaactacgccctgatcggcgcactgcgagcagtagcccaaacaatctcatatgaagtcaccctagccatcattctactatcaacattactaataagtggctcctttaacctctccacccttatcacaacacaagaacacctctgattactcctgccatcatgacccttggccataatatgatttatctccacactagcagagaccaaccgaacccccttcgaccttgccgaaggggagtccgaactagtctcaggcttcaacatcgaatacgccgcaggccccttcgccctattcttcatagccgaatacacaaacattattataataaacaccctcaccactacaatcttcctaggaacaacatatgacgcactctcccctgaactctacacaacatattttgtcaccaagaccctacttctaacctccctgttcttatgaattcgaacagcatacccccgattccgctacgaccaactcatacacctcctatgaaaaaacttcctaccactcaccctagcattacttatatgatatgtctccatacccattacaatctccagcattccccctcaaacctaagaaatatgtctgataaaagagttactttgatagagtaaataataggagcttaaacccccttatttctaggactatgagaatcgaacccatccctgagaatccaaaattctccgtgccacctatcacaccccatcctaaagtaaggtcagctaaataagctatcgggcccataccccgaaaatgttggttatacccttcccgtactaattaatcccctggcccaacccgtcatctactctaccatctttgcaggcacactcatcacagcgctaagctcgcactgattttttacctgagtaggcctagaaataaacatgctagcttttattccagttctaaccaaaaaaataaaccctcgttccacagaagctgccatcaagtatttcctcacgcaagcaaccgcatccataatccttctaatagctatcctcttcaacaatatactctccggacaatgaaccataaccaatactaccaatcaatactcatcattaataatcataatggctatagcaataaaactaggaatagccccctttcacttctgagtcccagaggttacccaaggcacccctctgacatccggcctgcttcttctcacatgacaaaaactagcccccatctcaatcatataccaaatctctccctcactaaacgtaagccttctcctcactctctcaatcttatccatcatagcaggcagttgaggtggattaaaccaaacccagctacgcaaaatcttagcatactcctcaattacccacataggatgaataatagcagttctaccgtacaaccctaacataaccattcttaatttaactatttatattatcctaactactaccgcattcctactactcaacttaaactccagcaccacgaccctactactatctcgcacctgaaacaagctaacatgactaacacccttaattccatccaccctcctctccctaggaggcctgcccccgctaaccggctttttgcccaaatgggccattatcgaagaattcacaaaaaacaatagcctcatcatccccaccatcatagccaccatcaccctccttaacctctacttctacctacgcctaatctactccacctcaatcacactactccccatatctaacaacgtaaaaataaaatgacagtttgaacatacaaaacccaccccattcctccccacactcatcgcccttaccacgctactcctacctatctccccttttatactaataatcttatagaaatttaggttaaatacagaccaagagccttcaaagccctcagtaagttgcaatacttaatttctgtaacagctaaggactgcaaaaccccactctgcatcaactgaacgcaaatcagccactttaattaagctaagcccttactagaccaatgggacttaaacccacaaacacttagttaacagctaagcaccctaatcaactggcttcaatctacttctcccgccgccgggaaaaaaggcgggagaagccccggcaggtttgaagctgcttcttcgaatttgcaattcaatatgaaaatcacctcggagctggtaaaaagaggcctaacccctgtctttagatttacagtccaatgcttcactcagccattttacctcacccccactgatgttcgccgaccgttgactattctctacaaaccacaaagacattggaacactatacctattattcggcgcatgagctggagtcctaggcacagctctaagcctccttattcgagccgagctgggccagccaggcaaccttctaggtaacgaccacatctacaacgttatcgtcacagcccatgcatttgtaataatcttcttcatagtaatacccatcataatcggaggctttggcaactgactagttcccctaataatcggtgcccccgatatggcgtttccccgcataaacaacataagcttctgactcttacctccctctctcctactcctgctcgcatctgctatagtggaggccggagcaggaacaggttgaacagtctaccctcccttagcagggaactactcccaccctggagcctccgtagacctaaccatcttctccttacacctagcaggtgtctcctctatcttaggggccatcaatttcatcacaacaattatcaatataaaaccccctgccataacccaataccaaacgcccctcttcgtctgatccgtcctaatcacagcagtcctacttctcctatctctcccagtcctagctgctggcatcactatactactaacagaccgcaacctcaacaccaccttcttcgaccccgccggaggaggagaccccattctataccaacacctattctgatttttcggtcaccctgaagtttatattcttatcctaccaggcttcggaataatctcccatattgtaacttactactccggaaaaaaagaaccatttggatacataggtatggtctgagctatgatatcaattggcttcctagggtttatcgtgtgagcacaccacatatttacagtaggaatagacgtagacacacgagcatatttcacctccgctaccataatcatcgctatccccaccggcgtcaaagtatttagctgactcgccacactccacggaagcaatatgaaatgatctgctgcagtgctctgagccctaggattcatctttcttttcaccgtaggtggcctgactggcattgtattagcaaactcatcactagacatcgtactacacgacacgtactacgttgtagcccacttccactatgtcctatcaataggagctgtatttgccatcataggaggcttcattcactgatttcccctattctcaggctacaccctagaccaaacctacgccaaaatccatttcactatcatattcatcggcgtaaatctaactttcttcccacaacactttctcggcctatccggaatgccccgacgttactcggactaccccgatgcatacaccacatgaaacatcctatcatctgtaggctcattcatttctctaacagcagtaatattaataattttcatgatttgagaagccttcgcttcgaagcgaaaagtcctaatagtagaagaaccctccataaacctggagtgactatatggatgccccccaccctaccacacattcgaagaacccgtatacataaaatctagacaaaaaaggaaggaatcgaaccccccaaagctggtttcaagccaaccccatggcctccatgactttttcaaaaaggtattagaaaaaccatttcataactttgtcaaagttaaattataggctaaatcctatatatcttaatggcacatgcagcgcaagtaggtctacaagacgctacttcccctatcatagaagagcttatcacctttcatgatcacgccctcataatcattttccttatctgcttcctagtcctgtatgcccttttcctaacactcacaacaaaactaactaatactaacatctcagacgctcaggaaatagaaaccgtctgaactatcctgcccgccatcatcctagtcctcatcgccctcccatccctacgcatcctttacataacagacgaggtcaacgatccctcccttaccatcaaatcaattggccaccaatggtactgaacctacgagtacaccgactacggcggactaatcttcaactcctacatacttcccccattattcctagaaccaggcgacctgcgactccttgacgttgacaatcgagtagtactcccgattgaagcccccattcgtataataattacatcacaagacgtcttgcactcatgagctgtccccacattaggcttaaaaacagatgcaattcccggacgtctaaaccaaaccactttcaccgctacacgaccgggggtatactacggtcaatgctctgaaatctgtggagcaaaccacagtttcatgcccatcgtcctagaattaattcccctaaaaatctttgaaatagggcccgtatttaccctatagcaccccctctaccccctctagagcccactgtaaagctaacttagcattaaccttttaagttaaagattaagagaaccaacacctctttacagtgaaatgccccaactaaatactaccgtatggcccaccataattacccccatactccttacactattcctcatcacccaactaaaaatattaaacacaaactaccacctgcctccctcaccaaagcccataaaaataaaaaattataacaaaccctgagaaccaaaatgaacgaaaatctgttcgcttcattcattgcccccacaatcctaggcctacccgccgcagtactgatcattctatttccccctctattgatccccacctccaaatatctcatcaacaaccgactaatcaccacccaacaatgactaatcaaactaacctcaaaacaaatgataaccatacacaacactaaaggacgaacctgatctcttatactagtatccttaatcatttttattgccacaactaacctcctcggactcctgcctcactcatttacaccaaccacccaactatctataaacctagccatggccatccccttatgagcgggcgcagtgattataggctttcgctctaagattaaaaatgccctagcccacttcttaccacaaggcacacctacaccccttatccccatactagttattatcgaaaccatcagcctactcattcaaccaatagccctggccgtacgcctaaccgctaacattactgcaggccacctactcatgcacctaattggaagcgccaccctagcaatatcaaccattaaccttccctctacacttatcatcttcacaattctaattctactgactatcctagaaatcgctgtcgccttaatccaagcctacgttttcacacttctagtaagcctctacctgcacgacaacacataatgacccaccaatcacatgcctatcatatagtaaaacccagcccatgacccctaacaggggccctctcagccctcctaatgacctccggcctagccatgtgatttcacttccactccataacgctcctcatactaggcctactaaccaacacactaaccatataccaatgatggcgcgatgtaacacgagaaagcacataccaaggccaccacacaccacctgtccaaaaaggccttcgatacgggataatcctatttattacctcagaagtttttttcttcgcaggatttttctgagccttttaccactccagcctagcccctaccccccaattaggagggcactggcccccaacaggcatcaccccgctaaatcccctagaagtcccactcctaaacacatccgtattactcgcatcaggagtatcaatcacctgagctcaccatagtctaatagaaaacaaccgaaaccaaataattcaagcactgcttattacaattttactgggtctctattttaccctcctacaagcctcagagtacttcgagtctcccttcaccatttccgacggcatctacggctcaacattttttgtagccacaggcttccacggacttcacgtcattattggctcaactttcctcactatctgcttcatccgccaactaatatttcactttacatccaaacatcactttggcttcgaagccgccgcctgatactggcattttgtagatgtggtttgactatttctgtatgtctccatctattgatgagggtcttactcttttagtataaatagtaccgttaacttccaattaactagttttgacaacattcaaaaaagagtaataaacttcgccttaattttaataatcaacaccctcctagccttactactaataattattacattttgactaccacaactcaacggctacatagaaaaatccaccccttacgagtgcggcttcgaccctatatcccccgcccgcgtccctttctccataaaattcttcttagtagctattaccttcttattatttgatctagaaattgccctccttttacccctaccatgagccctacaaacaactaacctgccactaatagttatgtcatccctcttattaatcatcatcctagccctaagtctggcctatgagtgactacaaaaaggattagactgaaccgaattggtatatagtttaaacaaaacgaatgatttcgactcattaaattatgataatcatatttaccaaatgcccctcatttacataaatattatactagcatttaccatctcacttctaggaatactagtatatcgctcacacctcatatcctccctactatgcctagaaggaataatactatcgctgttcattatagctactctcataaccctcaacacccactccctcttagccaatattgtgcctattgccatactagtctttgccgcctgcgaagcagcggtgggcctagccctactagtctcaatctccaacacatatggcctagactacgtacataacctaaacctactccaatgctaaaactaatcgtcccaacaattatattactaccactgacatgactttccaaaaaacacataatttgaatcaacacaaccacccacagcctaattattagcatcatccctctactattttttaaccaaatcaacaacaacctatttagctgttccccaaccttttcctccgaccccctaacaacccccctcctaatactaactacctgactcctacccctcacaatcatggcaagccaacgccacttatccagtgaaccactatcacgaaaaaaactctacctctctatactaatctccctacaaatctccttaattataacattcacagccacagaactaatcatattttatatcttcttcgaaaccacacttatccccaccttggctatcatcacccgatgaggcaaccagccagaacgcctgaacgcaggcacatacttcctattctacaccctagtaggctcccttcccctactcatcgcactaatttacactcacaacaccctaggctcactaaacattctactactcactctcactgcccaagaactatcaaactcctgagccaacaacttaatatgactagcttacacaatagcttttatagtaaagatacctctttacggactccacttatgactccctaaagcccatgtcgaagcccccatcgctgggtcaatagtacttgccgcagtactcttaaaactaggcggctatggtataatacgcctcacactcattctcaaccccctgacaaaacacatagcctaccccttccttgtactatccctatgaggcataattataacaagctccatctgcctacgacaaacagacctaaaatcgctcattgcatactcttcaatcagccacatagccctcgtagtaacagccattctcatccaaaccccctgaagcttcaccggcgcagtcattctcataatcgcccacgggcttacatcctcattactattctgcctagcaaactcaaactacgaacgcactcacagtcgcatcataatcctctctcaaggacttcaaactctactcccactaatagctttttgatgacttctagcaagcctcgctaacctcgccttaccccccactattaacctactgggagaactctctgtgctagtaaccacgttctcctgatcaaatatcactctcctacttacaggactcaacatactagtcacagccctatactccctctacatatttaccacaacacaatggggctcactcacccaccacattaacaacataaaaccctcattcacacgagaaaacaccctcatgttcatacacctatcccccattctcctcctatccctcaaccccgacatcattaccgggttttcctcttgtaaatatagtttaaccaaaacatcagattgtgaatctgacaacagaggcttacgaccccttatttaccgagaaagctcacaagaactgctaactcatgcccccatgtctaacaacatggctttctcaacttttaaaggataacagctatccattggtcttaggccccaaaaattttggtgcaactccaaataaaagtaataaccatgcacactactataaccaccctaaccctgacttccctaattccccccatccttaccaccctcgttaaccctaacaaaaaaaactcatacccccattatgtaaaatccattgtcgcatccacctttattatcagtctcttccccacaacaatattcatgtgcctagaccaagaagttattatctcgaactgacactgagccacaacccaaacaacccagctctccctaagcttcaaactagactacttctccataatattcatccctgtagcattgttcgttacatggtccatcatagaattctcactgtgatatataaactcagacccaaacattaatcagttcttcaaatatctactcatcttcctaattaccatactaatcttagttaccgctaacaacctattccaactgttcatcggctgagagggcgtaggaattatatccttcttgctcatcagttgatgatacgcccgagcagatgccaacacagcagccattcaagcaatcctatacaaccgtatcggcgatatcggtttcatcctcgccttagcatgatttatcctacactccaactcatgagacccacaacaaatagcccttctaaacgctaatccaagcctcaccccactactaggcctcctcctagcagcagcaggcaaatcagcccaattaggtctccacccctgactcccctcagccatagaaggccccaccccagtctcagccctactccactcaagcactatagttgtagcaggaatcttcttactcatccgcttccaccccctagcagaaaatagcccactaatccaaactctaacactatgcttaggcgctatcaccactctgttcgcagcagtctgcgcccttacacaaaatgacatcaaaaaaatcgtagccttctccacttcaagtcaactaggactcataatagttacaatcggcatcaaccaaccacacctagcattcctgcacatctgtacccacgccttcttcaaagccatactatttatgtgctccgggtccatcatccacaaccttaacaatgaacaagatattcgaaaaataggaggactactcaaaaccatacctctcacttcaacctccctcaccattggcagcctagcattagcaggaatacctttcctcacaggtttctactccaaagaccacatcatcgaaaccgcaaacatatcatacacaaacgcctgagccctatctattactctcatcgctacctccctgacaagcgcctatagcactcgaataattcttctcaccctaacaggtcaacctcgcttccccacccttactaacattaacgaaaataaccccaccctactaaaccccattaaacgcctggcagccggaagcctattcgcaggatttctcattactaacaacatttcccccgcatcccccttccaaacaacaatccccctctacctaaaactcacagccctcgctgtcactttcctaggacttctaacagccctagacctcaactacctaaccaacaaacttaaaataaaatccccactatgcacattttatttctccaacatactcggattctaccctagcatcacacaccgcacaatcccctatctaggccttcttacgagccaaaacctgcccctactcctcctagacctaacctgactagaaaagctattacctaaaacaatttcacagcaccaaatctccacctccatcatcacctcaacccaaaaaggcataattaaactttacttcctctctttcttcttcccactcatcctaaccctactcctaatcacataacctattcccccgagcaatctcaattacaatatatacaccaacaaacaatgttcaaccagtaactactactaatcaacgcccataatcatacaaagcccccgcaccaataggatcctcccgaatcaaccctgacccctctccttcataaattattcagcttcctacactattaaagtttaccacaaccaccaccccatcatactctttcacccacagcaccaatcctacctccatcgctaaccccactaaaacactcaccaagacctcaacccctgacccccatgcctcaggatactcctcaatagccatcgctgtagtatatccaaagacaaccatcattccccctaaataaattaaaaaaactattaaacccatataacctcccccaaaattcagaataataacacacccgaccacaccgctaacaatcaatactaaacccccataaataggagaaggcttagaagaaaaccccacaaaccccattactaaacccacactcaacagaaacaaagcatacatcattattctcgcacggactacaaccacgaccaatgatatgaaaaaccatcgttgtatttcaactacaagaacaccaatgaccccaatacgcaaaactaaccccctaataaaattaattaaccactcattcatcgacctccccaccccatccaacatctccgcatgatgaaacttcggctcactccttggcgcctgcctgatcctccaaatcaccacaggactattcctagccatgcactactcaccagacgcctcaaccgccttttcatcaatcgcccacatcactcgagacgtaaattatggctgaatcatccgctaccttcacgccaatggcgcctcaatattctttatctgcctcttcctacacatcgggcgaggcctatattacggatcatttctctactcagaaacctgaaacatcggcattatcctcctgcttgcaactatagcaacagccttcataggctatgtcctcccgtgaggccaaatatcattctgaggggccacagtaattacaaacttactatccgccatcccatacattgggacagacctagttcaatgaatctgaggaggctactcagtagacagtcccaccctcacacgattctttacctttcacttcatcttgcccttcattattgcagccctagcagcactccacctcctattcttgcacgaaacgggatcaaacaaccccctaggaatcacctcccattccgataaaatcaccttccacccttactacacaatcaaagacgccctcggcttacttctcttccttctctccttaatgacattaacactattctcaccagacctcctaggcgacccagacaattataccctagccaaccccttaaacacccctccccacatcaagcccgaatgatatttcctattcgcctacacaattctccgatccgtccctaacaaactaggaggcgtccttgccctattactatccatcctcatcctagcaataatccccatcctccatatatccaaacaacaaagcataatatttcgcccactaagccaatcactttattgactcctagccgcagacctcctcattctaacctgaatcggaggacaaccagtaagctacccttttaccatcattggacaagtagcatccgtactatacttcacaacaatcctaatcctaataccaactatctccctaattgaaaacaaaatactcaaatgggcctgtccttgtagtataaactaatacaccagtcttgtaaaccggagatgaaaacctttttccaaggacaaatcagagaaaaagtctttaactccaccattagcacccaaagctaagattctaatttaaactattctctgttctttcatggggaagcagatttgggtaccacccaagtattgactcacccatcaacaaccgctatgtatttcgtacattactgccagccaccatgaatattgtacagtaccataaatacttgaccacctgtagtacataaaaacccaatccacatcaaaaccccctccccatgcttacaagcaagtacagcaatcaaccctcaactatcacacatcaactgcaactccaaagccacccctcacccactaggataccaacaaacctacccacccttaacagtacatagtacataaagccatttaccgtacatagcacattacagtcaaatcccttctcgtccccatggatgacccccctcagataggggtcccttgaccaccatcctccgtgaaatcaatatcccgcacaagagtgctactctcctcgctccgggcccataacacttgggggtagctaaagtgaactgtatccgacatctggttcctacttcagggccataaagcctaaatagcccacacgttccccttaaataagacatcacgatg

SEQ ID NO: 286 - DNA, 16570 bp, Homo sapiens mitochondrial
  3108: "n" refers to a nucleotide at position 3107 of the Cambridge Reference Sequence (CRS, Anderson et al. 1981 Nature 290:457-465), later determined to be absent from the human mtDNA sequence according to the revised CRS (rCRS, Andrews et al. 1999 Nature Genetics 23:147); "n" therefore represents a single nucleotide deletion at a position corresponding to nucleotide 3107 of SEQ ID NO:1 as provided herein.
gatcacaggtctatcaccctattaaccactcacgggagctctccatgcatttggtattttcgtctggggggtatgcacgcgatagcattgcgagacgctggagccggagcaccctatgtcgcagtatctgtctttgattcctgcctcattctattatttatcgcacctacgttcaatattacaggcgaacatacttactaaagtgtgttaattaattaatgcttgtaggacataataataacaattgaatgtctgcacagccgctttccacacagacatcataacaaaaaatttccaccaaaccccccctcccccgccttctggccacagcacttaaacacatctctgccaaaccccaaaaacaaagaaccctaacaccagcctaaccagatttcaaattttatctttaggcggtatgcacttttaacagtcaccccccaactaacacattattttcccctcccactcccatactactaatctcatcaatacaacccccgcccatcctacccagcacacacacaccgctgctaaccccataccccgaaccaaccaaaccccaaagacaccccccacagtttatgtagcttacctcctcaaagcaatacactgaaaatgtttagacgggctcacatcaccccataaacaaataggtttggtcctagcctttctattagctcttagtaagattacacatgcaagcatccccgttccagtgagttcaccctctaaatcaccacgatcaaaagggacaagcatcaagcacgcagcaatgcagctcaaaacgcttagcctagccacacccccacgggaaacagcagtgattaacctttagcaataaacgaaagtttaactaagctatactaaccccagggttggtcaatttcgtgccagccaccgcggtcacacgattaacccaagtcaatagaagccggcgtaaagagtgttttagatcaccccctccccaataaagctaaaactcacctgagttgtaaaaaactccagttgacacaaaatagactacgaaagtggctttaacatatctgaacacacaatagctaagacccaaactgggattagataccccactatgcttagccctaaacctcaacagttaaatcaacaaaactgctcgccagaacactacgagccacagcttaaaactcaaaggacctggcggtgcttcatatccctctagaggagcctgttctgtaatcgataaaccccgatcaacctcaccacctcttgctcagcctatataccgccatcttcagcaaaccctgatgaaggctacaaagtaagcgcaagtacccacgtaaagacgttaggtcaaggtgtagcccatgaggtggcaagaaatgggctacattttctaccccagaaaactacgatagcccttatgaaacttaagggtcgaaggtggatttagcagtaaactgagagtagagtgcttagttgaacagggccctgaagcgcgtacacaccgcccgtcaccctcctcaagtatacttcaaaggacatttaactaaaacccctacgcatttatatagaggagacaagtcgtaacatggtaagtgtactggaaagtgcacttggacgaaccagagtgtagcttaacacaaagcacccaacttacacttaggagatttcaacttaacttgaccgctctgagctaaacctagccccaaacccactccaccttactaccagacaaccttagccaaaccatttacccaaataaagtataggcgatagaaattgaaacctggcgcaatagatatagtaccgcaagggaaagatgaaaaattataaccaagcataatatagcaaggactaacccctataccttctgcataatgaattaactagaaataactttgcaaggagagccaaagctaagacccccgaaaccagacgagctacctaagaacagctaaaagagcacacccgtctatgtagcaaaatagtgggaagatttataggtagaggcgacaaacctaccgagcctggtgatagctggttgtccaagatagaatcttagttcaactttaaatttgcccacagaaccctctaaatccccttgtaaatttaactgttagtccaaagaggaacagctctttggacactaggaaaaaaccttgtagagagagtaaaaaatttaacacccatagtaggcctaaaagcagccaccaattaagaaagcgttcaagctcaacacccactacctaaaaaatcccaaacatataactgaactcctcacacccaattggaccaatctatcaccctatagaagaactaatgttagtataagtaacatgaaaacattctcctccgcataagcctgcgtcagattaaaacactgaactgacaattaacagcccaatatctacaatcaaccaacaagtcattattaccctcactgtcaacccaacacaggcatgctcataaggaaaggttaaaaaaagtaaaaggaactcggcaaatcttaccccgcctgtttaccaaaaacatcacctctagcatcaccagtattagaggcaccgcctgcccagtgacacatgtttaacggccgcggtaccctaaccgtgcaaaggtagcataatcacttgttccttaaatagggacctgtatgaatggctccacgagggttcagctgtctcttacttttaaccagtgaaattgacctgcccgtgaagaggcgggcataacacagcaagacgagaagaccctatggagctttaatttattaatgcaaacagtacctaacaaacccacaggtcctaaactaccaaacctgcattaaaaatttcggttggggcgacctcggagcagaacccaacctccgagcagtacatgctaagacttcaccagtcaaagcgaactactatactcaattgatccaataacttgaccaacggaacaagttaccctagggataacagcgcaatcctattctagagtccatatcaacaatagggtttacgacctcgatgttggatcaggacatcccgatggtgcagccgctattaaaggttcgtttgttcaacgattaaagtcctacgtgatctgagttcagaccggagtaatccaggtcggtttctatctacnttcaaattcctccctgtacgaaaggacaagagaaataaggcctacttcacaaagcgccttcccccgtaaatgatatcatctcaacttagtattatacccacacccacccaagaacagggtttgttaagatggcagagcccggtaatcgcataaaacttaaaactttacagtcagaggttcaattcctcttcttaacaacatacccatggccaacctcctactcctcattgtacccattctaatcgcaatggcattcctaatgcttaccgaacgaaaaattctaggctatatacaactacgcaaaggccccaacgttgtaggcccctacgggctactacaacccttcgctgacgccataaaactcttcaccaaagagcccctaaaacccgccacatctaccatcaccctctacatcaccgccccgaccttagctctcaccatcgctcttctactatgaacccccctccccatacccaaccccctggtcaacctcaacctaggcctcctatttattctagccacctctagcctagccgtttactcaatcctctgatcagggtgagcatcaaactcaaactacgccctgatcggcgcactgcgagcagtagcccaaacaatctcatatgaagtcaccctagccatcattctactatcaacattactaataagtggctcctttaacctctccacccttatcacaacacaagaacacctctgattactcctgccatcatgacccttggccataatatgatttatctccacactagcagagaccaaccgaacccccttcgaccttgccgaaggggagtccgaactagtctcaggcttcaacatcgaatacgccgcaggccccttcgccctattcttcatagccgaatacacaaacattattataataaacaccctcaccactacaatcttcctaggaacaacatatgacgcactctcccctgaactctacacaacatattttgtcaccaagaccctacttctaacctccctgttcttatgaattcgaacagcatacccccgattccgctacgaccaactcatacacctcctatgaaaaaacttcctaccactcaccctagcattacttatatgatatgtctccatacccattacaatctccagcattccccctcaaacctaagaaatatgtctgataaaagagttactttgatagagtaaataataggagcttaaacccccttatttctaggactatgagaatcgaacccatccctgagaatccaaaattctccgtgccacctatcacaccccatcctaaagtaaggtcagctaaataagctatcgggcccataccccgaaaatgttggttatacccttcccgtactaattaatcccctggcccaacccgtcatctactctaccatctttgcaggcacactcatcacagcgctaagctcgcactgattttttacctgagtaggcctagaaataaacatgctagcttttattccagttctaaccaaaaaaataaaccctcgttccacagaagctgccatcaagtatttcctcacgcaagcaaccgcatccataatccttctaatagctatcctcttcaacaatatactctccggacaatgaaccataaccaatactaccaatcaatactcatcattaataatcataatggctatagcaataaaactaggaatagccccctttcacttctgagtcccagaggttacccaaggcacccctctgacatccggcctgcttcttctcacatgacaaaaactagcccccatctcaatcatataccaaatctctccctcactaaacgtaagccttctcctcactctctcaatcttatccatcatagcaggcagttgaggtggattaaaccaaacccagctacgcaaaatcttagcatactcctcaattacccacataggatgaataatagcagttctaccgtacaaccctaacataaccattcttaatttaactatttatattatcctaactactaccgcattcctactactcaacttaaactccagcaccacgaccctactactatctcgcacctgaaacaagctaacatgactaacacccttaattccatccaccctcctctccctaggaggcctgcccccgctaaccggctttttgcccaaatgggccattatcgaagaattcacaaaaaacaatagcctcatcatccccaccatcatagccaccatcaccctccttaacctctacttctacctacgcctaatctactccacctcaatcacactactccccatatctaacaacgtaaaaataaaatgacagtttgaacatacaaaacccaccccattcctccccacactcatcgcccttaccacgctactcctacctatctccccttttatactaataatcttatagaaatttaggttaaatacagaccaagagccttcaaagccctcagtaagttgcaatacttaatttctgtaacagctaaggactgcaaaaccccactctgcatcaactgaacgcaaatcagccactttaattaagctaagcccttactagaccaatgggacttaaacccacaaacacttagttaacagctaagcaccctaatcaactggcttcaatctacttctcccgccgccgggaaaaaaggcgggagaagccccggcaggtttgaagctgcttcttcgaatttgcaattcaatatgaaaatcacctcggagctggtaaaaagaggcctaacccctgtctttagatttacagtccaatgcttcactcagccattttacctcacccccactgatgttcgccgaccgttgactattctctacaaaccacaaagacattggaacactatacctattattcggcgcatgagctggagtcctaggcacagctctaagcctccttattcgagccgagctgggccagccaggcaaccttctaggtaacgaccacatctacaacgttatcgtcacagcccatgcatttgtaataatcttcttcatagtaatacccatcataatcggaggctttggcaactgactagttcccctaataatcggtgcccccgatatggcgtttccccgcataaacaacataagcttctgactcttacctccctctctcctactcctgctcgcatctgctatagtggaggccggagcaggaacaggttgaacagtctaccctcccttagcagggaactactcccaccctggagcctccgtagacctaaccatcttctccttacacctagcaggtgtctcctctatcttaggggccatcaatttcatcacaacaattatcaatataaaaccccctgccataacccaataccaaacgcccctcttcgtctgatccgtcctaatcacagcagtcctacttctcctatctctcccagtcctagctgctggcatcactatactactaacagaccgcaacctcaacaccaccttcttcgaccccgccggaggaggagaccccattctataccaacacctattctgatttttcggtcaccctgaagtttatattcttatcctaccaggcttcggaataatctcccatattgtaacttactactccggaaaaaaagaaccatttggatacataggtatggtctgagctatgatatcaattggcttcctagggtttatcgtgtgagcacaccacatatttacagtaggaatagacgtagacacacgagcatatttcacctccgctaccataatcatcgctatccccaccggcgtcaaagtatttagctgactcgccacactccacggaagcaatatgaaatgatctgctgcagtgctctgagccctaggattcatctttcttttcaccgtaggtggcctgactggcattgtattagcaaactcatcactagacatcgtactacacgacacgtactacgttgtagcccacttccactatgtcctatcaataggagctgtatttgccatcataggaggcttcattcactgatttcccctattctcaggctacaccctagaccaaacctacgccaaaatccatttcactatcatattcatcggcgtaaatctaactttcttcccacaacactttctcggcctatccggaatgccccgacgttactcggactaccccgatgcatacaccacatgaaacatcctatcatctgtaggctcattcatttctctaacagcagtaatattaataattttcatgatttgagaagccttcgcttcgaagcgaaaagtcctaatagtagaagaaccctccataaacctggagtgactatatggatgccccccaccctaccacacattcgaagaacccgtatacataaaatctagacaaaaaaggaaggaatcgaaccccccaaagctggtttcaagccaaccccatggcctccatgactttttcaaaaaggtattagaaaaaccatttcataactttgtcaaagttaaattataggctaaatcctatatatcttaatggcacatgcagcgcaagtaggtctacaagacgctacttcccctatcatagaagagcttatcacctttcatgatcacgccctcataatcattttccttatctgcttcctagtcctgtatgcccttttcctaacactcacaacaaaactaactaatactaacatctcagacgctcaggaaatagaaaccgtctgaactatcctgcccgccatcatcctagtcctcatcgccctcccatccctacgcatcctttacataacagacgaggtcaacgatccctcccttaccatcaaatcaattggccaccaatggtactgaacctacgagtacaccgactacggcggactaatcttcaactcctacatacttcccccattattcctagaaccaggcgacctgcgactccttgacgttgacaatcgagtagtactcccgattgaagcccccattcgtataataattacatcacaagacgtcttgcactcatgagctgtccccacattaggcttaaaaacagatgcaattcccggacgtctaaaccaaaccactttcaccgctacacgaccgggggtatactacggtcaatgctctgaaatctgtggagcaaaccacagtttcatgcccatcgtcctagaattaattcccctaaaaatctttgaaatagggcccgtatttaccctatagcaccccctctaccccctctagagcccactgtaaagctaacttagcattaaccttttaagttaaagattaagagaaccaacacctctttacagtgaaatgccccaactaaatactaccgtatggcccaccataattacccccatactccttacactattcctcatcacccaactaaaaatattaaacacaaactaccacctacctccctcaccaaagcccataaaaataaaaaattataacaaaccctgagaaccaaaatgaacgaaaatctgttcgcttcattcattgcccccacaatcctaggcctacccgccgcagtactgatcattctatttccccctctattgatccccacctccaaatatctcatcaacaaccgactaatcaccacccaacaatgactaatcaaactaacctcaaaacaaatgataaccatacacaacactaaaggacgaacctgatctcttatactagtatccttaatcatttttattgccacaactaacctcctcggactcctgcctcactcatttacaccaaccacccaactatctataaacctagccatggccatccccttatgagcgggcgcagtgattataggctttcgctctaagattaaaaatgccctagcccacttcttaccacaaggcacacctacaccccttatccccatactagttattatcgaaaccatcagcctactcattcaaccaatagccctggccgtacgcctaaccgctaacattactgcaggccacctactcatgcacctaattggaagcgccaccctagcaatatcaaccattaaccttccctctacacttatcatcttcacaattctaattctactgactatcctagaaatcgctgtcgccttaatccaagcctacgttttcacacttctagtaagcctctacctgcacgacaacacataatgacccaccaatcacatgcctatcatatagtaaaacccagcccatgacccctaacaggggccctctcagccctcctaatgacctccggcctagccatgtgatttcacttccactccataacgctcctcatactaggcctactaaccaacacactaaccatataccaatgatggcgcgatgtaacacgagaaagcacataccaaggccaccacacaccacctgtccaaaaaggccttcgatacgggataatcctatttattacctcagaagtttttttcttcgcaggatttttctgagccttttaccactccagcctagcccctaccccccaattaggagggcactggcccccaacaggcatcaccccgctaaatcccctagaagtcccactcctaaacacatccgtattactcgcatcaggagtatcaatcacctgagctcaccatagtctaatagaaaacaaccgaaaccaaataattcaagcactgcttattacaattttactgggtctctattttaccctcctacaagcctcagagtacttcgagtctcccttcaccatttccgacggcatctacggctcaacattttttgtagccacaggcttccacggacttcacgtcattattggctcaactttcctcactatctgcttcatccgccaactaatatttcactttacatccaaacatcactttggcttcgaagccgccgcctgatactggcattttgtagatgtggtttgactatttctgtatgtctccatctattgatgagggtcttactcttttagtataaatagtaccgttaacttccaattaactagttttgacaacattcaaaaaagagtaataaacttcgccttaattttaataatcaacaccctcctagccttactactaataattattacattttgactaccacaactcaacggctacatagaaaaatccaccccttacgagtgcggcttcgaccctatatcccccgcccgcgtccctttctccataaaattcttcttagtagctattaccttcttattatttgatctagaaattgccctccttttacccctaccatgagccctacaaacaactaacctgccactaatagttatgtcatccctcttattaatcatcatcctggccctaagtctggcctatgagtgactacaaaaaggattagactgaaccgaattggtatatagtttaaacaaaacgaatgatttcgactcattaaattatgataatcatatttaccaaatgcccctcatttacataaatattatactagcatttaccatctcacttctaggaatactagtatatcgctcacacctcatatcctccctactatgcctagaaggaataatactatcgctgttcattatagctactctcataaccctcaacacccactccctcttagccaatattgtgcctattgccatactagtctttgccgcctgcgaagcagcggtgggcctagccctactagtctcaatctccaacacatatggcctagactacgtacataacctaaacctactccaatgctaaaactaatcgtcccaacaattatattactaccactgacatgactttccaaaaaacacataatttgaatcaacacaaccacccacagcctaattattagcatcatccctctactattttttaaccaaatcaacaacaacctatttagctgttccccaaccttttcctccgaccccctaacaacccccctcctaatactaactacctgactcctacccctcacaatcatggcaagccaacgccacttatccagtgaaccactatcacgaaaaaaactctacctctctatactaatctccctacaaatctccttaattataacattcacagccacagaactaatcatattttatatcttcttcgaaaccacacttatccccaccttggctatcatcacccgatgaggcaaccagccagaacgcctgaacgcaggcacatacttcctattctacaccctagtaggctcccttcccctactcatcgcactaatttacactcacaacaccctaggctcactaaacattctactactcactctcactgcccaagaactatcaaactcctgagccaacaacttaatatgactagcttacacaatagcttttatagtaaagatacctctttacggactccacttatgactccctaaagcccatgtcgaagcccccatcgctgggtcaatagtacttgccgcagtactcttaaaactaggcggctatggtataatacgcctcacactcattctcaaccccctgacaaaacacatagcctaccccttccttgtactatccctatgaggcataattataacaagctccatctgcctacgacaaacagacctaaaatcgctcattgcatactcttcaatcagccacatagccctcgtagtaacagccattctcatccaaaccccctgaagcttcaccggcgcagtcattctcataatcgcccacgggcttacatcctcattactattctgcctagcaaactcaaactacgaacgcactcacagtcgcatcataatcctctctcaaggacttcaaactctactcccactaatagctttttgatgacttctagcaagcctcgctaacctcgccttaccccccactattaacctactgggagaactctctgtgctagtaaccacgttctcctgatcaaatatcactctcctacttacaggactcaacatactagtcacagccctatactccctctacatatttaccacaacacaatggggctcactcacccaccacattaacaacataaaaccctcattcacacgagaaaacaccctcatgttcatacacctatcccccattctcctcctatccctcaaccccgacatcattaccgggttttcctcttgtaaatatagtttaaccaaaacatcagattgtgaatctgacaacagaggcttacgaccccttatttaccgagaaagctcacaagaactgctaactcatgcccccatgtctaacaacatggctttctcaacttttaaaggataacagctatccattggtcttaggccccaaaaattttggtgcaactccaaataaaagtaataaccatgcacactactataaccaccctaaccctgacttccctaattccccccatccttaccaccctcgttaaccctaacaaaaaaaactcatacccccattatgtaaaatccattgtcgcatccacctttattatcagtctcttccccacaacaatattcatgtgcctagaccaagaagttattatctcgaactgacactgagccacaacccaaacaacccagctctccctaagcttcaaactagactacttctccataatattcatccctgtagcattgttcgttacatggtccatcatagaattctcactgtgatatataaactcagacccaaacattaatcagttcttcaaatatctactcatcttcctaattaccatactaatcttagttaccgctaacaacctattccaactgttcatcggctgagagggcgtaggaattatatccttcttgctcatcagttgatgatacgcccgagcagatgccaacacagcagccattcaagcaatcctatacaaccgtatcggcgatatcggtttcatcctcgccttagcatgatttatcctacactccaactcatgagacccacaacaaatagcccttctaaacgctaatccaagcctcaccccactactaggcctcctcctagcagcagcaggcaaatcagcccaattaggtctccacccctgactcccctcagccatagaaggccccaccccagtctcagccctactccactcaagcactatagttgtagcaggaatcttcttactcatccgcttccaccccctagcagaaaatagcccactaatccaaactctaacactatgcttaggcgctatcaccactctgttcgcagcagtctgcgcccttacacaaaatgacatcaaaaaaatcgtagccttctccacttcaagtcaactaggactcataatagttacaatcggcattaaccaaccacacctagcattcctgcacatctgtacccacgccttcttcaaagccatactatttatgtgctccgggtccatcatccacaaccttaacaatgaacaagatattcgaaaaataggaggactactcaaaaccatacctctcacttcaacctccctcaccattggcagcctagcattagcaggaatacctttcctcacaggtttctactccaaagaccacatcatcgaaaccgcaaacatatcatacacaaacgcctgagccctatctattactctcatcgctacctccctgacaagcgcctatagcactcgaataattcttctcaccctaacaggtcaacctcgcttccccacccttactaacattaacgaaaataaccccaccctactaaaccccattaaacgcctggcagccggaagcctattcgcaggatttctcattactaacaacatttcccccgcatcccccttccaaacaacaatccccctctacctaaaactcacagccctcgctgtcactttcctaggacttctaacagccctagacctcaactacctaaccaacaaacttaaaataaaatccccactatgcacattttatttctccaacatactcggattctaccctagcatcacacaccgcacaatcccctatctaggccttcttacgagccaaaacctgcccctactcctcctagacctaacctgactagaaaagctattacctaaaacaatttcacagcaccaaatctccacctccatcatcacctcaacccaaaaaggcataattaaactttacttcctctctttcttcttcccactcatcctaaccctactcctaatcacataacctattcccccgagcaatctcaattacaatatatacaccaacaaacaatgttcaaccagtaactactactaatcaacgcccataatcatacaaagcccccgcaccaataggatcctcccgaatcaaccctgacccctctccttcataaattattcagcttcctacactattaaagtttaccacaaccaccaccccatcatactctttcacccacagcaccaatcctacctccatcgctaaccccactaaaacactcaccaagacctcaacccctgacccccatgcctcaggatactcctcaatagccatcgctgtagtatatccaaagacaaccatcattccccctaaataaattaaaaaaactattaaacccatataacctcccccaaaattcagaataataacacacccgaccacaccgctaacaatcaatactaaacccccataaataggagaaggcttagaagaaaaccccacaaaccccattactaaacccacactcaacagaaacaaagcatacatcattattctcgcacggactacaaccacgaccaatgatatgaaaaaccatcgttgtatttcaactacaagaacaccaatgaccccaatacgcaaaactaaccccctaataaaattaattaaccactcattcatcgacctccccaccccatccaacatctccgcatgatgaaacttcggctcactccttggcgcctgcctgatcctccaaatcaccacaggactattcctagccatgcactactcaccagacgcctcaaccgccttttcatcaatcgcccacatcactcgagacgtaaattatggctgaatcatccgctaccttcacgccaatggcgcctcaatattctttatctgcctcttcctacacatcgggcgaggcctatattacggatcatttctctactcagaaacctgaaacatcggcattatcctcctgcttgcaactatagcaacagccttcataggctatgtcctcccgtgaggccaaatatcattctgaggggccacagtaattacaaacttactatccgccatcccatacattgggacagacctagttcaatgaatctgaggaggctactcagtagacagtcccaccctcacacgattctttacctttcacttcatcttgcccttcattattgcagccctagcagcactccacctcctattcttgcacgaaacgggatcaaacaaccccctaggaatcacctcccattccgataaaatcaccttccacccttactacacaatcaaagacgccctcggcttacttctcttccttctctccttaatgacattaacactattctcaccagacctcctaggcgacccagacaattataccctagccaaccccttaaacacccctccccacatcaagcccgaatgatatttcctattcgcctacacaattctccgatccgtccctaacaaactaggaggcgtccttgccctattactatccatcctcatcctagcaataatccccatcctccatatatccaaacaacaaagcataatatttcgcccactaagccaatcactttattgactcctagccgcagacctcctcattctaacctgaatcggaggacaaccagtaagctacccttttaccatcattggacaagtagcatccgtactatacttcacaacaatcctaatcctaataccaactatctccctaattgaaaacaaaatactcaaatgggtctgtccttgtagtataaactaatacaccagtcttgtaaaccggagatgaaaacctttttccaaggacaaatcagagaaaaagtctttaactccaccattagcacccaaagctaagattctaatttaaactattctctgttctttcatggggaagcagatttgggtaccacccaagtattgactcacccatcaacaaccgctatgtatttcgtacattactgccagccaccatgaatattgtacggtaccataaatacttgaccacctgtagtacataaaaacccaatccacatcaaaaccccctccccatgcttacaagcaagtacagcaatcaaccctcaactatcacacatcaactgcaactccaaagccacccctcacccactaggataccaacaaacctacccacccttgacagtacatagtacataaagccatttaccgtacatagcacattacagtcaaatcccttctcgtccccatggatgacccccctcagataggggtcccttgaccaccatcctccgtgaaatcaatatcccgcacaagagtgctactctcctcgctccgggcccataacacttgggggtagctaaagtgaactgtatccgacatctggttcctacttcagggtcataaagcctaaatagcccacacgttccccttaaataagacatcacgatg

SEQ ID NO: 287 - DNA, 16572 bp, Homo sapiens mitochondrial
  3110: "n" refers to a nucleotide at position 3107 of the Cambridge Reference Sequence (CRS, Anderson et al. 1981 Nature 290:457-465), later determined to be absent from the human mtDNA sequence according to the revised CRS (rCRS, Andrews et al. 1999 Nature Genetics 23:147); "n" therefore represents a single nucleotide deletion at a position corresponding to nucleotide 3107 of SEQ ID NO:1 as provided herein.
gatcacaggtctatcaccctattaaccactcacgggagctctccatgcatttggtattttcgtctggggggtatgcacgcgatagcattgcgagacgctggagccggagcaccctatgtcgcagtatctgtctttgattcctgcctcatcccattatttatcgcacctacgttcaatattacaggcgaacatacttactaaagtgtgttaattaattaatgcttgtaggacataataataacaattgaatgtctgcacagccactttccacacagacatcataacaaaaaatttccaccaaaccccccctccccccccgcttctggccacagcacttaaacacatctctgccaaaccccaaaaacaaagaaccctaacaccagcctaaccagatttcaaattttatcttttggcggtatgcacttttaacagtcaccccccaactaacacattattttcccctcccactcccatactactaatctcatcaatacaacccccgcccatcctacccagcacacacacaccgctgctaaccccataccccgaaccaaccaaaccccaaagacaccccccacagtttatgtagcttacctcctcaaagcaatacactgaaaatgtttagacgggctcacatcaccccataaacaaataggtttggtcctagcctttctattagctcttagtaagattacacatgcaagcatccccgttccagtgagttcaccctctaaatcaccacgatcaaaaggaacaagcatcaagcacgcagcaatgcagctcaaaacgcttagcctagccacacccccacgggaaacagcagtgattaacctttagcaataaacgaaagtttaactaagctatactaaccccagggttggtcaatttcgtgccagccaccgcggtcacacgattaacccaagtcaatagaagccggcgtaaagagtgttttagatcaccccctccccaataaagctaaaactcacctgagttgtaaaaaactccagttgacacaaaatagactacgaaagtggctttaacatatctgaacacacaatagctaagacccaaactgggattagataccccactatgcttagccctaaacctcaacagttaaatcaacaaaactgctcgccagaacactacgagccacagcttaaaactcaaaggacctggcggtgcttcatatccctctagaggagcctgttctgtaatcgataaaccccgatcaacctcaccacctcttgctcagcctatataccgccatcttcagcaaaccctgatgaaggctacaaagtaagcgcaagtacccacgtaaagacgttaggtcaaggtgtagcccatgaggtggcaagaaatgggctacattttctaccccagaaaactacgatagcccttatgaaacttaagggtcgaaggtggatttagcagtaaactaagagtagagtgcttagttgaacagggccctgaagcgcgtacacaccgcccgtcaccctcctcaagtatacttcaaaggacatttaactaaaacccctacgcatttatatagaggagacaagtcgtaacatggtaagtgtactggaaagtgcacttggacgaaccagagtgtagcttaacacaaagcacccaacttacacttaggagatttcaacttaacttgaccgctctgagctaaacctagccccaaacccactccaccttactaccagacaaccttagccaaaccatttacccaaataaagtataggcgatagaaattgaaacctggcgcaatagatatagtaccgcaagggaaagatgaaaaattataaccaagcataatatagcaaggactaacccctataccttctgcataatgaattaactagaaataactttgcaaggagagccaaagctaagacccccgaaaccagacgagctacctaagaacagctaaaagagcacacccgtctatgtagcaaaatagtgggaagatttataggtagaggcgacaaacctaccgagcctggtgatagctggttgtccaagatagaatcttagttcaactttaaatttgcccacagaaccctctaaatccccttgtaaatttaactgttagtccaaagaggaacagctctttggacactaggaaaaaaccttgtagagagagtaaaaaatttaacacccatagtaggcctaaaagcagccaccaattaagaaagcgttcaagctcaacacccactacctaaaaaatcccaaacatataactgaactcctcacacccaattggaccaatctatcaccctatagaagaactaatgttagtataagtaacatgaaaacattctcctccgcataagcctgcgtcagattaaaacactgaactgacaattaacagcccaatatctacaatcaaccaacaagtcattattaccctcactgtcaacccaacacaggcatgctcataaggaaaggttaaaaaaagtaaaaggaactcggcaaatcttaccccgcctgtttaccaaaaacatcacctctagcatcaccagtattagaggcaccgcctgcccagtgacacatgtttaacggccgcggtaccctaaccgtgcaaaggtagcataatcacttgttccttaaatagggacctgtatgaatggctccacgagggttcagctgtctcttacttttaaccagtgaaattgacctgcccgtgaagaggcgggcataacacagcaagacgagaagaccctatggagctttaatttattaatgcaaacagtacctaacaaacccacaggtcctaaactaccaaacctgcattaaaaatttcggttggggcgacctcggagcagaacccaacctccgagcagtacatgctaagacttcaccagtcaaagcgaactactatactcaattgatccaataacttgaccaacggaacaagttaccctagggataacagcgcaatcctattctagagtccatatcaacaatagggtttacgacctcgatgttggatcaggacatcccgatggtgcagccgctattaaaggttcgtttgttcaacgattaaagtcctacgtgatctgagttcagaccggagtaatccaggtcggtttctatctacnttcaaattcctccctgtacgaaaggacaagagaaataaggcctacttcacaaagcgccttcccccgtaaatgatatcatctcaacttagtattatacccacacccacccaagaacagggtttgttaagatggcagagcccggtaatcgcataaaacttaaaactttacagtcagaggttcaattcctcttcttaacaacatacccatggccaacctcctactcctcattgtacccattctaatcgcaatggcattcctaatgcttaccgaacgaaaaattctaggctatatacaactacgcaaaggccccaacgttgtaggcccctacgggctactacaacccttcgctgacgccataaaactcttcaccaaagagcccctaaaacccgccacatctaccatcaccctctacatcaccgccccgaccttagctctcaccatcgctcttctactatgaacccccctccccatacccaaccccctggtcaacctcaacctaggcctcctatttattctagccacctctagcctagccgtttactcaatcctctgatcagggtgagcatcaaactcaaactacgccctgatcggcgcactgcgagcagtagcccaaacaatctcatatgaagtcaccctagccatcattctactatcaacattactaataagtggctcctttaacctctccacccttatcacaacacaagaacacctctgattactcctgccatcatgacccttggccataatatgatttatctccacactagcagagaccaaccgaacccccttcgaccttgccgaaggggagtccgaactagtctcaggcttcaacatcgaatacgccgcaggccccttcgccctattcttcatagccgaatacacaaacattattataataaacaccctcaccactacaatcttcctaggaacaacatatgacgcactctcccctgaactctacacaacatattttgtcaccaagaccctacttctaacctccctgttcttatgaattcgaacagcatacccccgattccgctacgaccaactcatacacctcctatgaaaaaacttcctaccactcaccctagcattacttatatgatatgtctccatacccattacaatctccagcattccccctcaaacctaagaaatatgtctgataaaagagttactttgatagagtaaataataggagcttaaacccccttatttctaggactatgagaatcgaacccatccctgagaatccaaaattctccgtgccacctatcacaccccatcctaaagtaaggtcagctaaataagctatcgggcccataccccgaaaatgttggttatacccttcccgtactaattaatcccctggcccaacccgtcatctactctaccatctttgcaggcacactcatcacagcgctaagctcgcactgattttttacctgagtaggcctagaaataaacatgctagcttttattccagttctaaccaaaaaaataaaccctcgttccacagaagctgccatcaagtatttcctcacgcaagcaaccgcatccataatccttctaatagctatcctcttcaacaatatactctccggacaatgaaccataaccaatactaccaatcaatactcatcattaataatcataatagctatagcaataaaactaggaatagccccctttcacttctgagtcccagaggttacccaaggcacccctctgacatccggcctgcttcttctcacatgacaaaaactagcccccatctcaatcatataccaaatctctccctcactaaacgtaagccttctcctcactctctcaatcttatccatcatagcaggcagttgaggtggattaaaccaaacccagctacgcaaaatcttagcatactcctcaattacccacataggatgaataatagcagttctaccgtacaaccctaacataaccattcttaatttaactatttatattatcctaactactaccgcattcctactactcaacttaaactccagcaccacgaccctactactatctcgcacctgaaacaagctaacatgactaacacccttaattccatccaccctcctctccctaggaggcctgcccccgctaaccggctttttgcccaaatgggccattatcgaagaattcacaaaaaacaatagcctcatcatccccaccatcatagccaccatcaccctccttaacctctacttctacctacgcctaatctactccacctcaatcacactactccccatatctaacaacgtaaaaataaaatgacagtttgaacatacaaaacccaccccattcctccccacactcatcgcccttaccacgctactcctacctatctccccttttatactaataatcttatagaaatttaggttaaatacagaccaagagccttcaaagccctcagtaagttgcaatacttaatttctgtaacagctaaggactgcaaaaccccactctgcatcaactgaacgcaaatcagccactttaattaagctaagcccttactagaccaatgggacttaaacccacaaacacttagttaacagctaagcaccctaatcaactggcttcaatctacttctcccgccgccgggaaaaaaggcgggagaagccccggcaggtttgaagctgcttcttcgaatttgcaattcaatatgaaaatcacctcggagctggtaaaaagaggcctaacccctgtctttagatttacagtccaatgcttcactcagccattttacctcacccccactgatgttcgccgaccgttgactattctctacaaaccacaaagacattggaacactatacctattattcggcgcatgagctggagtcctaggcacagctctaagcctccttattcgagccgagctgggccagccaggcaaccttctaggtaacgaccacatctacaacgttatcgtcacagcccatgcatttgtaataatcttcttcatagtaatacccatcataatcggaggctttggcaactgactagttcccctaataatcggtgcccccgatatggcgtttccccgcataaacaacataagcttctgactcttacctccctctctcctactcctgctcgcatctgctatagtggaggccggagcaggaacaggttgaacagtctaccctcccttagcagggaactactcccaccctggagcctccgtagacctaaccatcttctccttacacctagcaggtgtctcctctatcttaggggccatcaatttcatcacaacaattatcaatataaaaccccctgccataacccaataccaaacgcccctcttcgtctgatccgtcctaatcacagcagtcctacttctcctatctctcccagtcctagctgctggcatcactatactactaacagaccgcaacctcaacaccaccttcttcgaccccgccggaggaggagaccccattctataccaacacctattctgatttttcggtcaccctgaagtttatattcttatcctaccaggcttcggaataatctcccatattgtaacttactactccggaaaaaaagaaccatttggatacataggtatggtctgagctatgatatcaattggcttcctagggtttatcgtgtgagcacaccatatatttacagtaggaatagacgtagacacacgagcatatttcacctccgctaccataatcatcgctatccccaccggcgtcaaagtatttagctgactcgccacactccacggaagcaatatgaaatgatctgctgcagtgctctgagccctaggattcatctttcttttcaccgtaggtggcctgactggcattgtattagcaaactcatcactagacattgtactacacgacacgtactacgttgtagcccacttccactatgtcctatcaataggagctgtatttgccatcataggaggcttcattcactgatttcccctattctcaggctacaccctagaccaaacctacgccaaaatccatttcactatcatattcatcggcgtaaatctaactttcttcccacaacactttctcggcctatccggaatgccccgacgttactcggactaccccgatgcatacaccacatgaaacatcctatcatctgtaggctcattcatttctctaacagcagtaatattaataattttcatgatttgagaagccttcgcttcgaagcgaaaagtcctaatagtagaagaaccctccataaacctggagtgactatatggatgccccccaccctaccacacattcgaagaacccgtatacataaaatctagacaaaaaaggaaggaatcgaaccccccaaagctggtttcaagccaaccccatggcctccatgactttttcaaaaaggtattagaaaaaccatttcataactttgtcaaagttaaatcataggctaaatcctatatatcttaatggcacatgcagcgcaagtaggtctacaagacgctacttcccctatcatagaagagcttatcacctttcatgatcacgccctcataatcattttccttatctgcttcctagtcctgtatgcccttttcctaacactcacaacaaaactaactaatactaacatctcagacgctcaggaaatagaaaccgtctgaactatcctgcccgccatcatcctagtcctcatcgccctcccatccctacgcatcctttacataacagacgaggtcaacgatccctcccttaccatcaaatcaattggccaccaatggtactgaacctacgagtacaccgactacggcggactaatcttcaactcctacatacttcccccattattcctagaaccaggcgacctgcgactccttgacgttgacaatcgagtagtactcccgattgaagcccccattcgtataataattacatcacaagacgtcttgcactcatgagctgtccccacattaggcttaaaaacagatgcaattcccggacgtctaaaccaaaccactttcaccgctacacgaccgggggtatactacggtcaatgctctgaaatctgtggagcaaaccacagtttcatgcccatcgtcctagaattaattcccctaaaaatctttgaaatagggcccgtatttaccctatagcaccccctctaccccctctagagcccactgtaaagctaacttagcattaaccttttaagttaaagattaagagaaccaacacctctttacagtgaaatgccccaactaaatactaccgtatggcccaccataattacccccatactccttacactattcctcatcacccaactaaaaatattaaacacaaactaccacctacctccctcaccaaagcccataaaaataaaaaattataacaaaccctgagaaccaaaatgaacgaaaatctgttcgcttcattcattgcccccacaatcctaggcctacccgccgcagtactgatcattctatttccccctctattgatccccacctccaaatatctcatcaacaaccgactaatcaccacccaacaatgactaatcaaactaacctcaaaacaaatgataaccatacacaacactaaaggacgaacctgatctcttatactagtatccttaatcatttttattgccacaactaacctcctcggactcctgcctcactcatttacaccaaccacccaactatctataaacctagccatggccatccccttatgagcgggcacagtgattataggctttcgctctaagattaaaaatgccctagcccacttcttaccacaaggcacacctacaccccttatccccatactagttattatcgaaaccatcagcctactcattcaaccaatagccctggccgtacgcctaaccgctaacattactgcaggccacctactcatgcacctaattggaagcgccaccctagcaatatcaaccattaaccttccctctacacttatcatcttcacaattctaattctactgactatcctagaaatcgctgtcgccttaatccaagcctacgttttcacacttctagtaagcctctacctgcacgacaacacataatgacccaccaatcacatgcctatcatatagtaaaacccagcccatgacccctaacaggggccctctcagccctcctaatgacctccggcctagccatgtgatttcacttccactccataacgctcctcatactaggcctactaaccaacacactaaccatataccaatgatggcgcgatgtaacacgagaaagcacataccaaggccaccacacaccacctgtccaaaaaggccttcgatacgggataatcctatttattacctcagaagtttttttcttcgcaggatttttctgagccttttaccactccagcctagcccctaccccccaattaggagggcactggcccccaacaggcatcaccccgctaaatcccctagaagtcccactcctaaacacatccgtattactcgcatcaggagtatcaatcacctgagctcaccatagtctaatagaaaacaaccgaaaccaaataattcaagcactgcttattacaattttactgggtctctattttaccctcctacaagcctcagagtacttcgagtctcccttcaccatttccgacggcatctacggctcaacattttttgtagccacaggcttccacggacttcacgtcattattggctcaactttcctcactatctgcttcatccgccaactaatatttcactttacatccaaacatcactttggcttcgaagccgccgcctgatactggcattttgtagatgtggtttgactatttctgtatgtctccatctattgatgagggtcttactcttttagtataaatagtaccgttaacttccaattaactagttttgacaacattcaaaaaagagtaataaacttcgccttaattttaataatcaacaccctcctagccttactactaataattattacattttgactaccacaactcaacggctacatagaaaaatccaccccttacgagtgcggcttcgaccctatatcccccgcccgcgtccctttctccataaaattcttcttagtagctattaccttcctattatttgatctagaaattgccctccttttacccctaccatgagccctacaaacaactaacctgccactaatagttatgtcatccctcttattaatcatcatcctagccctaagtctggcctatgagtgactacaaaaaggattagactgaaccgaattggtatatagtttaaacaaaacgaatgatttcgactcattaaattatgataatcatatttaccaaatgcccctcatttacataaatattatactagcatttaccatctcacttctaggaatactagtatatcgctcacacctcatatcctccctactatgcctagaaggaataatactatcgctgttcattatagctactctcataaccctcaacacccactccctcttagccaatattgtgcctattgccatactagtctttgccgcctgcgaagcagcggtgggcctagccctactagtctcaatctccaacacatatggcctagactacgtacataacctaaacctactccaatgctaaaactaatcgtcccaacaattatattactaccactgacatgactttccaaaaaacacataatttgaatcaacacaaccacccacagcctaattattagcatcatccctctactattttttaaccaaatcaacaacaacctatttagctgttccccaaccttttcctccgaccccctaacaacccccctcctaatactaactacctgactcctacccctcacaatcatggcaagccaacgccacttatccagtgaaccactatcacgaaaaaaactctacctctctatactaatctccctacaaatctccttaattataacattcacagccacagaactaatcatattttatatcttcttcgaaaccacacttatccccaccttggctatcatcacccgatgaggcaaccagccagaacgcctgaacgcaggcacatacttcctattctacaccctagtaggctcccttcccctactcatcgcactaatttacactcacaacaccctaggctcactaaacattctactactcactctcactgcccaagaactatcaaactcctgagccaacaacttaatatgactagcttacacaatagcttttatagtaaagatacctctttacggactccacttatgactccctaaagcccatgtcgaagcccccatcgctgggtcaatagtacttgccgcagtactcttaaaactaggcggctatggtataatacgcctcacactcattctcaaccccctgacaaaacacatagcctaccccttccttgtactatccctatgaggcataattataacaagctccatctgcctacgacaaacagacctaaaatcgctcattgcatactcttcaatcagccacatagccctcgtagtaacagccattctcatccaaaccccctgaagcttcaccggcgcagtcattctcataatcgcccacgggcttacatcctcattactattctgcctagcaaactcaaactacgaacgcactcacagtcgcatcataatcctctctcaaggacttcaaactctactcccactaatagctttttgatgacttctagcaagcctcgctaacctcgccttaccccccactattaacctactgggagaactctctgtgctagtaaccacgttctcctgatcaaatatcactctcctacttacaggactcaacatactagtcacagccctatactccctctacatatttaccacaacacaatggggctcactcacccaccacattaacaacataaaaccctcattcacacgagaaaacaccctcatgttcatacacctatcccccattctcctcctatccctcaaccccgacatcattaccgggttttcctcttgtaaatatagtttaaccaaaacatcagattgtgaatctgacaacagaggcttacgaccccttatttaccgagaaagctcacaagaactgctaactcatgcccccatgtctaacaacatggctttctcaacttttaaaggataacagctatccattggtcttaggccccaaaaattttggtgcaactccaaataaaagtaataaccatgcacactactataaccaccctaaccctgacttccctaattccccccatccttaccaccctcgttaaccctaacaaaaaaaactcatacccccattatgtaaaatccattgtcgcatccacctttattatcagtctcttccccacaacaatattcatgtgcctagaccaagaagttattatctcgaactgacactgagccacaacccaaacaacccagctctccctaagcttcaaactagactacttctccataatattcatccctgtagcattgttcgttacatggtccatcatagaattctcactgtgatatataaactcagacccaaacattaatcagttcttcaaatatctactcatcttcctaattaccatactaatcttagttaccgctaacaacctattccaactgttcatcggctgagagggcgtaggaattatatccttcttgctcatcagttgatgatacgcccgagcagatgccaacacagcagccattcaagcaatcctatacaaccgtatcggcgatatcggtttcatcctcgccttagcatgatttatcctacactccaactcatgagacccacaacaaatagcccttctaaacgctaatccaagcctcaccccactactaggcctcctcctagcagcagcaggcaaatcagcccaattaggtctccacccctgactcccctcagccatagaaggccccaccccagtctcagccctactccactcaagcactatagttgtagcaggaatcttcttactcatccgcttccaccccctagcagaaaatagcccactaatccaaactctaacactatgcttaggcgctatcaccactctgttcgcagcagtctgcgcccttacacaaaatgacatcaaaaaaatcgtagccttctccacttcaagtcaactaggactcataatagttacaatcggcatcaaccaaccacacctagcattcctgcacatctgtacccacgccttcttcaaagccatactatttatgtgctccgggtccatcatccacaaccttaacaatgaacaagatattcgaaaaataggaggactactcaaaaccatacctctcacttcaacctccctcaccattggcagcctagcattagcaggaatacctttcctcacaggtttctactccaaagaccacatcatcgaaaccgcaaacatatcatacacaaacgcctgagccctatctattactctcatcgctacctccctgacaagcgcctatagcactcgaataattcttctcaccctaacaggtcaacctcgcttccccacccttactaacattaacgaaaataaccccaccctactaaaccccattaaacgcctggcagccggaagcctattcgcaggatttctcattactaacaacatttcccccgcatcccccttccaaacaacaatccccctctacctaaaactcacagccctcgctgtcactttcctaggacttctaacagccctagacctcaactacctaaccaacaaacttaaaataaaatccccactatgcacattttatttctccaacatactcggattctaccctagcatcacacaccgcacaatcccctatctaggccttcttacgagccaaaacctgcccctactcctcctagacctaacctgactagaaaagctattacctaaaacaatttcacagcaccaaatctccacctccatcatcacctcaacccaaaaaggcataattaaactttacttcctctctttcttcttcccactcatcctaaccctactcctaatcacataacctattcccccgagcaatctcaattacaatatatacaccaacaaacaatgttcaaccagtaactactactaatcaacgcccataatcatacaaagcccccgcaccaataggatcctcccgaatcaaccctgacccctctccttcataaattattcagcttcctacactattaaagtttaccacaaccaccaccccatcatactctttcacccacagcaccaatcctacctccatcgctaaccccactaaaacactcaccaagacctcaacccctgacccccatgcctcaggatactcctcaatagccatcgctgtagtatatccaaagacaaccatcattccccctaaataaattaaaaaaactattaaacccatataacctcccccaaaattcagaataataacacacccgaccacaccgctaacaatcaatactaaacccccataaataggagaaggcttagaagaaaaccccacaaaccccattactaaacccacactcaacagaaacaaagcatacatcattattctcgcacggactacaaccacgaccaatgatatgaaaaaccatcgttgtatttcaactacaagaacaccaatgaccccaatacgcaaaactaaccccctaataaaattaattaaccactcattcatcgacctccccaccccatccaacatctccgcatgatgaaacttcggctcactccttggcgcctgcctgatcctccaaatcaccacaggactattcctagccatgcactactcaccagacgcctcaaccgccttttcatcaatcgcccacatcactcgagacgtaaattatggctgaatcatccgctaccttcacgccaatggcgcctcaatattctttatctgcctcttcctacacatcgggcgaggcctatattacggatcatttctctactcagaaacctgaaacatcggcattatcctcctgcttgcaactatagcaacagccttcataggctatgtcctcccgtgaggccaaatatcattctgaggggccacagtaattacaaacttactatccgccatcccatacattgggacagacctagttcaatgaatctgaggaggctactcagtagacagtcccaccctcacacgattctttacctttcacttcatcttgcccttcattattgcagccctagcaacactccacctcctgttcttgcacgaaacgggatcaaacaaccccctaggaatcacctcccattccgataaaatcaccttccacccttactacacaatcaaagacgccctcggcttacttctcttccttctctccttaatgacattaacactattctcaccagacctcctaggcgacccagacaattataccctagccaaccccttaaacacccctccccacatcaagcccgaatgatatttcctattcgcctacacaattctccgatccgtccctaacaaactaggaggcgtccttgccctattactatccatcctcatcctagcaataatccccatcctccatatatccaaacaacaaagcataatatttcgcccactaagccaatcactttattgactcctagccgcagacctcctcattctaacctgaatcggaggacaaccagtaagctacccttttaccatcattggacaagtagcatccgtactatacttcacaacaatcctaatcctaataccaactatctccctaattgaaaacaaaatactcaaatgggcctgtccttgtagtataaactaatacaccagtcttgtaaaccggagatgaaaacctttttccaaggacaaatcagagaaaaagtctttaactccaccattagcacccaaagctaagattctaatttaaactattctctgttctttcatggggaagcagatttgggtaccacccaagtattgactcacccatcaacaaccgctatgtatttcgtacattactgccagccaccatgaatattgtacggtaccataaatacttgaccacctgtagtacataaaaacccaatccacatcaaaaccccctccccatgcttacaagcaagtacagcaatcaaccctcaactatcacacatcaactgcaactccaaagccacccctcacccactaggataccaacaaacctacccacccttaacagtacatagtacataaagccatttaccgtacatagcacattacagtcaaatcccttctcgtccccatggatgacccccctcagataggggtcccttgaccaccatcctccgtgaaatcaatatcccgcacaagagtgctactctcctcgctccgggcccataacacttgggggtagctaaagtgaactgtatccgacatctggttcctacttcagggtcataaagcctaaatagcccacacgttccccttaaataagacatcacgatg

SEQ ID NO: 288 - DNA, 16572 bp, Homo sapiens mitochondrial
  3110: "n" refers to a nucleotide at position 3107 of the Cambridge Reference Sequence (CRS, Anderson et al. 1981 Nature 290:457-465), later determined to be absent from the human mtDNA sequence according to the revised CRS (rCRS, Andrews et al. 1999 Nature Genetics 23:147); "n" therefore represents a single nucleotide deletion at a position corresponding to nucleotide 3107 of SEQ ID NO:1 as provided herein.
gatcacaggtctatcaccctattaaccactcacgggagctctccatgcatttggtattttcgtctggggggtgtgcacgcgatagcattgcgagacgctggagccggagcaccctatgtcgcagtatctgtctttgattcctgcctcatcctattatttatcgcacctacgttcaatattacaggcgaacatacctactaaagtgtgttaattaattaatgcttgtaggacataataataacaattgaatgtctgcacagccgctttccacacagacatcataacaaaaaatttccaccaaaccccccctccccccccgcttctggccacagcacttaaacacatctctgccaaaccccaaaaacaaagaaccctaacaccagcctaaccagatttcaaattttatcttttggcggtatgcacttttaacagtcaccccccaactaacacattattttcccctcccactcccatactactaatctcatcaacacaacccccgcccatcctacccagcacacacacaccgctgctaaccccataccccgaaccaaccaaaccccaaagacaccccccacagtttatgtagcttacctcctcaaagcaatacactgaaaatgtttagacgggctcacatcaccccataaacaaataggtttggtcctagcctttctattagctcttagtaagattacacatgcaagcatccccgttccagtgagttcaccctctaaatcaccacgatcaaaagggacaagcatcaagcacgcagcaatgcagctcaaaacgcttagcctagccacacccccacgggagacagcagtgattaacctttagcaataaacgaaagtttaactaagctatactaaccccagggttggtcaatttcgtgccagccaccgcggtcacacgattaacccaagtcaatagaagccggcgtaaagagtgttttagatcaccccctccccaataaagctaaaactcacctgagttgtaaaaaactccagttgacacaaaatagactacgaaagtggctttaacatatctgaacacacaatagctaagacccaaactgggattagataccccactatgcttagccctaaacctcaacagttaaatcaacaaaactgctcgccagaacactacgagccacagcttaaaactcaaaggacctggcggtgcttcatatccctctagaggagcctgttctgtaatcgataaaccccgatcaacctcaccacctcttgctcagcctatataccgccatcttcagcaaaccctgatgaaggctacaaagtaagcgcaagtacccacgtaaagacgttaggtcaaggtgtagcccatgaggtggcaagaaatgggctacattttctaccccagaaaactacgatagcccttatgaaacttaagggtcgaaggtggatttagcagtaaactgagagtagagtgcttagttgaacagggccctgaagcgcgtacacaccgcccgtcaccctcctcaagtatacttcaaaggacatttaactaaaacccctacgcatttatatagaggagacaagtcgtaacatggtaagtgtactggaaagtgcacttggacgaaccagagtgtagcttaacacaaagcacccaacttacacttaggagatttcaacttaacttgaccgctctgagctaaacctagccccaaacccactccaccttactaccagacaaccttagccaaaccatttacccaaataaagtataggcgatagaaattgaaacctggcgcaatagatatagtaccgcaagggaaagatgaaaaattataaccaagcataatatagcaaggactaacccctataccttctgcataatgaattaactagaaataactttgcaaggagagccaaagctaagacccccgaaaccagacgagctacctaagaacagctaaaagagcacacccgtctatgtagcaaaatagtgggaagatttataggtagaggcgacaaacctaccgagcctggtgatagctggttgtccaagatagaatcttagttcaactttaaatttgcccacagaaccctctaaatccccttgtaaatttaactgttagtccaaagaggaacagctctttggacactaggaaaaaaccttgtagagagagtaaaaaatttaacacccatagtaggcctaaaagcagccaccaattaagaaagcgttcaagctcaacacccactacctaaaaaatcccaaacatataactgaactcctcacacccaattggaccaatctatcaccctatagaagaactaatgttagtataagtaacatgaaaacattctcctccgcataagcctgcgtcagattaaaacactgaactgacaattaacagcccaatatctacaatcaaccaacaagtcattattaccctcactgtcaacccaacacaggcatgctcataaggaaaggttaaaaaaagtaaaaggaactcggcaaatcttaccccgcctgtttaccaaaaacatcacctctagcatcaccagtattagaggcaccgcctgcccagtgacacatgtttaacggccgcggtaccctaaccgtgcaaaggtagcataatcacttgttccttaaatagggacctgtatgaatggctccacgagggttcagctgtctcttacttttaaccagtgaaattgacctgcccgtgaagaggcgggcatgacacagcaagacgagaagaccctatggagctttaatttattaatgcaaacagtacctaacaaacccacaggtcctaaactaccaaacctgcattaaaaatttcggttggggcgacctcggagcagaacccaacctccgagcagtacatgctaagacttcaccagtcaaagcgaactactatactcaattgatccaataacttgaccaacggaacaagttaccctagggataacagcgcaatcctattctagagtccatatcaacaatagggtttacgacctcgatgttggatcaggacatcccgatggtgcagccgctattaaaggttcgtttgttcaacgattaaagtcctacgtgatctgagttcagaccggagtaatccaggtcggtttctatctacnttcaaattcctccctgtacgaaaggacaagagaaataaggcctacttcacaaagcgccttcccccgtaaatgatatcatctcaacttagtattatacccacacccacccaagaacagggtttgttaagatggcagagcccggtaatcgcataaaacttaaaactttacagtcagaggttcaattcctcttcttaacaacatacccatggccaacctcctactcctcattgtacccattctaatcgcaatggcattcctaatgcttaccgaacgaaaaattctaggctatatacaactacgcaaaggccccaacgttgtaggcccctacgggctactacaacccttcgctgacgccataaaactcttcaccaaagagcccctaaaacccgccacatctaccatcaccctctacatcaccgccccgaccttagctctcaccatcgctcttctactatgaacccccctccccatacccaaccccctggtcaacctcaacctaggcctcctatttattctagccacctctagcctagccgtttactcaatcctctgatcagggtgagcatcaaactcaaactacgccctgatcggcgcactacgagcagtagcccaaacaatctcatatgaagtcaccctagccatcattctactatcaacattactaataagtggctcctttaacctctccacccttatcacaacacaagaacacctctgattactcctgccatcatgacccttggccataatatgatttatctccacactagcagagaccaaccgaacccccttcgaccttgccgaaggggagtccgaactagtctcaggcttcaacatcgaatacgccgcaggccccttcgccctattcttcatagccgaatacacaaacattattataataaataccctcaccactacaatcttcctaggaacaacatatgacgcactctcccctgaactctacacaacatattttgtcaccaagaccctacttctaacctccctgttcttatgaattcgaacagcatacccccgattccgctacgaccaactcatacacctcctatgaaaaaacttcctaccactcaccctagcattacttatatgatatgtctccatacccattacaatctccagcattccccctcaaacctaagaaatatgtctgataaaagagttactttgatagagtaaataataggagcttaaacccccttatttctaggactatgagaatcgaacccatccctgagaatccaaaattctccgtgccacctatcacaccccatcctaaagtaaggtcagctaaataagctatcgggcccataccccgaaaatgttggttatacccttcccgtactaattaatcccctggcccaacccgtcatctactctaccatctttgcaggcacactcatcacagcgctaagctcgcactgattttttacctgagtaggcctagaaataaacatgctagcttttattccagttctaaccaaaaaaataaaccctcgttccacagaagctgccatcaagtatttcctcacgcaagcaaccgcatccataatccttctaatagctatcctcttcaacaatatactctccggacaatgaaccataaccaatactaccaatcaatactcatcattaataatcataatggctatagcaataaaactaggaatagccccctttcacttctgagtcccagaggttacccaaggcacccctctgacatccggcctgcttcttctcacatgacaaaaactagcccccatctcaatcatataccaaatctctccctcactaaacgtaagccttctcctcactctctcaatcttatccatcatagcaggcagttgaggtggattaaaccaaacccagctacgcaaaatcttagcatactcctcaattacccacataggatgaataatagcagttctaccgtacaaccctaacataaccattcttaatttaactatttatattatcctaactactaccgcattcctactactcaacttaaactccagcaccacgaccctactactatctcgcacctgaaacaagctaacatgactaacacccttaattccatccaccctcctctccctaggaggcctgcccccgctaaccggctttttgcccaaatgggccattatcgaagaattcacaaaaaacaatagcctcatcatccccaccatcatagccaccatcaccctccttaacctctacttctacctacgcctaatctactccacctcaatcacactactccccatatctaacaacgtaaaaataaaatgacagtttgaacatacaaaacccaccccattcctccccacactcatcgcccttaccacgctactcctacctatctccccttttatactaataatcttatagaaatttaggttaaatacagaccaagagccttcaaagccctcagtaagttgcaatacttaatttctgtaacagctaaggactgcaaaaccccactctgcatcaactgaacgcaaatcagccactttaattaagctaagcccttactagaccaatgggacttaaacccacaaacacttagttaacagctaagcaccctaatcaactggcttcaatctacttctcccgccgccgggaaaaaaggcgggagaagccccggcaggtttgaagctgcttcttcgaatttgcaattcaatatgaaaatcacctcggagctggtaaaaagaggcctaacccctgtctttagatttacagtccaatgcttcactcagccattttacctcacccccactgatgttcgccgaccgttgactattctctacaaaccacaaagacattggaacactatacctattattcggcgcatgagctggagtcctaggcacagctctaagcctccttattcgagccgagctgggccagccaggcaaccttctaggtaacgaccacatctacaacgttatcgtcacagcccatgcatttgtaataatcttcttcatagtaatacccatcataatcggaggctttggcaactgactagttcccctaataatcggtgcccccgatatggcgtttccccgcataaacaacataagcttctgactcttacctccctctctcctactcctgctcgcatctgctatagtggaggccggagcaggaacaggttgaacagtctaccctcccttagcagggaactactcccaccctggagcctccgtagacctaaccatcttctccttacacctagcaggtgtctcctctatcttaggggccatcaatttcatcacaacaattatcaatataaaaccccctgccataacccaataccaaacacccctcttcgtctgatccgtcctaatcacagcagtcctacttctcctatctctcccagtcctagctgctggcatcactatactactaacagaccgcaacctcaacaccaccttcttcgaccccgccggaggaggagaccccattctataccaacacctattctgatttttcggtcaccctgaagtttatattcttatcctaccaggcttcggaataatctcccacattgtaacctactactccggaaaaaaagaaccatttggatacataggtatggtctgagctatgatatcaattggcttcctagggtttatcgtgtgagcacaccatatatttacagtaggaatagacgtagacacacgagcatatttcacctccgctaccataatcatcgctatccccaccggcgtcaaagtatttagctgactcgccacactccacggaagcaatatgaaatgatctgctgcagtgctctgagccctaggattcatctttcttttcaccgtaggtggcctgactggcattgtattagcaaactcatcactagacatcgtactacacgacacgtactacgttgtagctcacttccactatgtcctatcaataggagctgtatttgccatcataggaggcttcattcactgatttcccctattctcaggctacaccctagaccaaacctacgccaaaatccatttcactatcatattcatcggcgtaaatctaactttcttcccacaacactttctcggcctatccggaatgccccgacgttactcggactaccccgatgcatacaccacatgaaacatcctatcatctgtaggctcattcatttctctaacagcagtaatattaataattttcatgatttgagaagccttcgcttcgaagcgaaaagtcctaatagtagaagaaccctccataaacctggagtgactatatggatgccccccaccctaccacacattcgaagaacccgtatacataaaatctagacaaaaaaggaaggaatcgaaccccccaaagctggtttcaagccaaccccatggcctccatgactttttcaaaaaggtattagaaaaaccatttcataactttgtcaaagttaaattataggctaaatcctatatatcttaatggcacatgcagcgcaagtaggtctacaagacgctacttcccctatcatagaagagcttatcacctttcatgatcacgccctcataatcattttccttatctgcttcctagtcctgtatgcccttttcctaacactcacaacaaaactaactaatactaacatctcagacgctcaggaaatagaaaccgtctgaactatcctgcccgccatcatcctagtcctcatcgccctcccatccctacgcatcctttacataacagacgaggtcaacgatccctcccttaccatcaaatcaattggccaccaatggtactgaacctacgagtacaccgactacggcggactaatcttcaactcctacatacttcccccattattcctagaaccaggcgacctgcgactccttgacgttgacaatcgagtagtactcccgattgaagcccccattcgtataataattacatcacaagacgtcttgcactcatgagctgtccccacattaggcttaaaaacagatgcaattcccggacgtctaaaccaaaccactttcaccgctacacgaccgggggtatactacggtcaatgctctgaaatctgtggagcaaaccacagtttcatgcccatcgtcctagaattaattcccctaaaaatctttgaaatagggcccgtatttaccctatagcaccccctctaccccctctagagcccactgtaaagctaacttagcattaaccttttaagttaaagattaagagaaccaacacctctttacagtgaaatgccccaactaaatactaccgtatggcccaccataattacccccatactccttacactattcctcatcacccaactaaaaatattaaacacaaactaccacctacctccctcaccaaagcccataaaaataaaaaattataacaaaccctgagagccaaaatgaacgaaaatctgttcgcttcattcattgcccccacaatcctaggcctacccgccgcagtactgatcattctatttccccctctattgatccccacctccaaatatctcatcaacaaccgactaatcaccacccaacaatgactaatcaaactaacctcaaaacaaatgatagccatacacaacactaaaggacgaacctgatctcttatactagtatccttaatcatttttattgccacaactaacctcctcggactcctgcctcactcatttacaccaaccacccaactatctataaacctagccatggccatccccttatgagcgggcgcagtgattataggctttcgctctaagattaaaaatgccctagcccacttcttaccacaaggcacacctacaccccttatccccatactagttattatcgaaaccatcagcctactcattcaaccaatagccctggccgtacgcctaaccgctaacattactgcaggccacctactcatgcacctaattggaaacgccaccctagcaatatcaaccattaaccttccctctacacttatcatcttcacaattctaattctactgactatcctagaaatcgctgtcgccttaatccaagcctacgttttcacacttctagtaagcctctacctgcacgacaacacataatgacccaccaatcacatgcctatcatatagtaaaacccagcccatgacccctaacaggggccctctcagccctcctaatgacctccggcctagccatgtgatttcacttccactccataacgctcctcatactaggcctactaaccaacacactaaccatataccaatgatggcgcgatgtaacacgagaaagcacataccaaggccaccacacaccacctgtccaaaaaggccttcgatacgggataatcctatttattacctcagaagtttttttcttcgcaggatttttctgagccttttaccactccagcctagcccctaccccccaactaggggggcactggcccccaacaggcatcaccccgctaaatcccctagaagtcccactcctaaacacatccgtattactcgcatcaggagtatcaatcacctgagctcaccatagtctaatagaaaacaaccgaaaccaaataattcaagcactgcttattacaattttactgggtctctattttaccctcctacaagcctcagagtacttcgagtctcccttcaccatttccgacggcatctacggctcaacattttttgtagccacaggcttccacggacttcacgtcattattggctcaactttcctcactatctgcttcatccgccaactaatatttcactttacatccaaacatcactttggcttcgaagccgccgcctgatactggcattttgtagatgtggtttgactatttctgtatgtctccatctattgatgagggtcttactcttttagtataaatagtaccgttaacttccaattaactagttttgacaacattcaaaaaagagtaataaacttcgccttaattttaataatcaacaccctcctagccttactactaataattattacattttgactaccacaactcaacggctacatagaaaaatccaccccttacgagtgcggcttcgaccctatatcccccgcccgcgtccctttctccataaaattcttcttagtagctattaccttcttattatttgatctagaaattgccctccttttacccctaccatgagccctacaaacaactaacctgccactaatagttatgtcatccctcttattaatcatcatcctagccctaagtctggcctatgagtgactacaaaaaggattagactgagctgaattggtatatagtttaaacaaaacgaatgatttcgactcattaaattatgataatcatatttaccaaatgcccctcatttacataaatattatactagcatttaccatctcacttctaggaatactagtatatcgctcacacctcatatcctccctactatgcctagaaggaataatactatcgctgttcattatagctactctcataaccctcaacacccactccctcttagccaatattgtgcctattgccatactagtctttgccgcctgcgaagcagcggtgggcctagccctactagtctcaatctccaacacatatggcctagactacgtacataacctaaacctactccaatgctaaaactaatcgtcccaacaattatattactaccactgacatgactttccaaaaaacacataatttgaatcaacacaaccacccacagcctaattattagcatcatccccctactattttttaaccaaatcaacaacaacctatttagctgttccccaaccttttcctccgaccccctaacaacccccctcctaatactaactacctgactcctacccctcacaatcatggcaagccaacgccacttatccagtgaaccactatcacgaaaaaaactctatctctctatactaatctccctacaaatctccttaattataacattcacagccacagaactaatcatattttatatcttcttcgaaaccacacttatccccaccttggctatcatcacccgatgaggcaaccagccagaacgcctgaacgcaggcacatacttcctattctacaccctagtaggctcccttcccctactcatcgcactaatttacactcacaacaccctaggctcactaaacattctactactcactctcactgcccaagaactatcaaactcctgagccaacaacttaatatgactagcttacacaatagcttttatagtaaagatacctctttacggactccacttatgactccctaaagcccatgtcgaagcccccatcgctgggtcaatagtacttgccgcagtactcttaaaactaggcggctatggtataatacgcctcacactcattctcaaccccctgacaaaacacatagcctaccccttccttgtactatccctatgaggcataattataacaagctccatctgcctacgacaaacagacctaaaatcgctcattgcatactcttcaatcagccacatagccctcgtagtaacagccattctcatccaaaccccctgaagcttcaccggcgcagtcattctcataatcgcccacggacttacatcctcattactattctgcctagcaaactcaaactacgaacgcactcacagtcgcatcataatcctctctcaaggacttcaaactctactcccactaatagctttttgatgacttctagcaagcctcgctaacctcgccttaccccccactattaacctactgggagaactctctgtgctagtaaccacgttctcctgatcaaatatcactctcctacttacaggactcaacatactagtcacagccctatactccctctacatatttaccacaacacaatggggctcactcacccaccacattaacaacataaaaccctcattcacacgagaaaacaccctcatgttcatacacctatcccccattctcctcctatccctcaaccccgacatcattaccgggttttcctcttgtaaatatagtttaaccaaaacatcagattgtgaatctgacaacagaggcttacgaccccttatttaccgagaaagctcacaagaactgctaactcatgcccccatgtctaacaacatggctttctcaacttttaaaggataacagctatccattggtcttaggccccaaaaattttggtgcaactccaaataaaagtaataaccatgtacactactataaccaccctaaccctgacttccctaattccccccatccttaccaccttcgttaaccctaacaaaaaaaactcatacccccattatgtaaaatccattgtcgcatccacctttattatcagtctcttccccacaacaatattcatgtgcctagaccaagaagttattatctcgaactgacactgagccacaacccaaacaacccagctctccctaagcttcaaactagactacttctccataatattcatccctgtagcattgttcgttacatggtccatcatagaattctcactgtgatatataaactcagacccaaacattaatcagttcttcaaatatctactcattttcctaattaccatactaatcttagttaccgctaacaacctattccaactgttcatcggctgagagggcgtaggaattatatccttcttgctcatcagttgatgatacgcccgagcagatgccaacacagcagccattcaagcaatcctatacaaccgtatcggcgatatcggtttcatcctcgccttagcatgatttatcctacactccaactcatgagacccacaacaaatagcccttctaaccgctaatccaagcctcaccccactactaggcctcctcctagcagcagcaggcaaatcagcccaattaggtctccacccctgactcccctcagccatagaaggccccaccccagtctcagccctactccactcaagcactatagttgtagcaggaatcttcttactcatccgcttccaccccctagcagaaaatagcccactaatccaaactctaacactatgcttaggcgctatcaccactctgttcgcagcagtctgcgcccttacacaaaatgacatcaaaaaaatcgtagccttctccacttcaagtcaactaggactcataatagttacaatcggcatcaaccaaccacacctagcattcctgcacatctgtacccacgccttcttcaaagccatactatttatgtgctccgggtccatcatccacaaccttaacaatgaacaagatattcgaaaaataggaggactactcaaaaccatacctctcacttcaacctccctcaccattggcagcctagcattagcaggaatacctttcctcacaggtttctactccaaagaccacatcatcgaaaccgcaaacatatcatacacaaacgcctgagccctatctattactctcatcgctacctccctgacaagcgcctatagcactcgaataattcttctcaccctaacaggtcaacctcgcttccccacccttactaacattaacgaaaataaccccaccctactaaaccccattaaacgcctggcagccggaagcctattcgcaggatttctcattactaacaacatttcccccgcatcccccttccaaacaacaatccccctctacctaaaactcacagccctcgctgtcactttcctaggacttctaacagccctagacctcaactacctaaccaacaaacttaaaataaaatccccactatgcacattttatttctccaacatactcggattctaccctagcatcacacaccgcacaatcccctatctaggccttcttacgagccaaaacctgcccctactcctcctagacctaacctgactagaaaagctattacctaaaacaatttcacagcaccaaatctccacctccatcatcacctcaacccaaaaaggcataattaaactttacttcctctctttcctcttcccactcatcctaaccctactcctaatcacataacctattcccccgagcaatctcaattacaatatacacaccaacaaacaatgttcaaccagtaactactactaatcaacgcccataatcatacaaagcccccgcaccaataggatcctcccgaatcaaccctgacccctctccttcataaattattcagcttcctacactattaaagtttaccacaaccaccaccccatcatactctttcacccacagcaccaatcctacctccatcgctaaccccactaaaacactcaccaagacctcaacccctgacccccatgcctcaggatactcctcaatagccatcgctgtagtatatccaaagacaaccatcattccccctaaataaattaaaaaaactattaaacccatataacctcccccaaaattcagaataataacacacccgaccacaccgctaacaatcaatactaaacccccataaataggagaaggcttagaagaaaaccccacaaaccccattactaaacccacactcaacagaaacaaagcatacatcattattctcgcacggactacaaccacgaccaatgatatgaaaaaccatcgttgtatttcaactacaagaacaccaatgaccccaatacgcaaaattaaccccctaataaaactaattaaccactcattcatcgacctccccaccccatccaacatctccgcatgatgaaacttcggctcactccttggcgcctgcctgatcctccaaatcaccacaggactattcctagccatgcactactcaccagacgcctcaaccgccttttcatcaatcgcccacatcactcgagacgtaaattatggctgaatcatccgctaccttcacgccaatggcgcctcaatattctttatctgcctcttcctacacatcggacgaggcctatattacggatcatttctctactcagaaacctgaaacatcggcattatcctcctgcttgcaactatagcaacagccttcataggctatgtcctcccgtgaggccaaatatcattctgaggggccacagtaattacaaacttactatccgccatcccatacattgggacagacctagttcaatgaatctgaggaggctactcagtagacagtcccaccctcacacgattctttacctttcacttcatcttacccttcattattgcagccctagcagcactccacctcctattcttgcacgaaacgggatcaaacaaccccctaggaatcacctcccattccgataaaatcaccttccacccttactacacaatcaaagacgccctcggcttacttctcttccttctctccttaatgacattaacactattctcaccagacctcctaggcgacccagacaattataccctagccaaccccttaaacacccctccccacatcaagcccgaatgatatttcctattcgcctacacaattctccgatccgtccctaacaaactaggaggcgtccttgccctattactatccatcctcatcctagcaataatccccatcctccatatatccaaacaacaaagcataatatttcgcccactaagccaatcactttattgactcctagccgcagacctcctcattctaacctgaatcggaggacaaccagtaagctacccttttaccatcattggacaagtagcatccgtactatacttcacaacaatcctaatcctaataccaactatctccctaattgaaaacaaaatactcaaatgggcctgtccttgtagtataaactaatacaccagtcttgtaaaccggagatgaaaacctttttccaaggacaaatcagagaaaaagtctttaactccaccattagcacccaaagctaagattctaatttaaactattctctgttctttcatggggaagcagatttgggtaccacccaagtattgactcacccatcaacaaccgctatgtatttcgtacattactgccagccaccatgaatattgtacagtaccataaatacttgaccacctgtagtacataaaaacccaatccacatcaaacccccccccccatgcttacaagcaagtacagcaatcaaccatcaactatcacacatcaactgcaactccaaagccacccctcacccactaggataccaacaaacctacccacccttaacagtacatagcacataaagccatttaccgtacatagcacattacagtcaaatcccttcccgtccccatggatgacccccctcagataggggtcccttgaccaccatcctccgtgaaatcaatatcccgcacaagagtgctactctcctcgctccgggcccataacacttgggggtagctaaagtgaactgtatccgacatctggttcctacttcagggccataaagcctaaatagcccacacgttccccttaaataagacatcacgatg

SEQ ID NO: 289 - DNA, 16571 bp, Homo sapiens mitochondrial
  3109: "n" refers to a nucleotide at position 3107 of the Cambridge Reference Sequence (CRS, Anderson et al. 1981 Nature 290:457-465), later determined to be absent from the human mtDNA sequence according to the revised CRS (rCRS, Andrews et al. 1999 Nature Genetics 23:147); "n" therefore represents a single nucleotide deletion at a position corresponding to nucleotide 3107 of SEQ ID NO:1 as provided herein.
gatcacaggtctatcaccctattaaccactcacgggagctctccatgcatttggtattttcgtctggggggtatgcacgcgatagcattgcgagacgctggagccggagcaccctatgtcgcagtatctgtctttgattcctgcctcattctattatttatcgcacctacgttcaatattacaggcgaacatacttactaaagtgtgttaattaattaatgcttgtaggacataataataacaattgaatgtctgcacagccgctttccacacagacatcataacaaaaaatttccaccaaaccccccctcccccccgcttctggccacagcacttaaacacatctctgccaaaccccaaaaacaaagaaccctaacaccagcctaaccagatttcaaattttatctttaggcggtatgcacttttaacagtcaccccccaactaacacattattttcccctcccactcccatactactaatctcatcaatacaacccccgcccatcctacccagcacacacacaccgctgctaaccccataccccgaaccaaccaaaccccaaagacaccccccacagtttatgtagcttacctcctcaaagcaatacactgaaaatgtttagacgggctcacatcaccccataaacaaataggtttggtcctagcctttctattagctcttagtaagattacacatgcaagcatccccgttccagtgagttcaccctctaaatcaccacgatcaaaagggacaagcatcaagcacgcagcaatgcagctcaaaacgcttagcctagccacacccccacgggaaacagcagtgattaacctttagcaataaacgaaagtttaactaagctatactaaccccagggttggtcaatttcgtgccagccaccgcggtcacacgattaacccaagtcaatagaagccggcgtaaagagtgttttagatcaccccctccccaataaagctaaaactcacctgagttgtaaaaaactccagttgacacaaaatagactacgaaagtggctttaacatatctgaacacacaatagctaagacccaaactgggattagataccccactatgcttagccctaaacctcaacagttaaatcaacaaaactgctcgccagaacactacgagccacagcttaaaactcaaaggacctggcggtgcttcatatccctctagaggagcctgttctgtaatcgataaaccccgatcaacctcaccacctcttgctcagcctatataccgccatcttcagcaaaccctgatgaaggctacaaagtaagcgcaagtacccacgtaaagacgttaggtcaaggtgtagcccatgaggtggcaagaaatgggctacattttctaccccagaaaactacgatagcccttatgaaacttaagggtcgaaggtggatttagcagtaaactgagagtagagtgcttagttgaacagggccctgaagcgcgtacacaccgcccgtcaccctcctcaagtatacttcaaaggacatttaactaaaacccctacgcatttatatagaggagacaagtcgtaacatggtaagtgtactggaaagtgcacttggacgaaccagagtgtagcttaacacaaagcacccaacttacacttaggagatttcaacttaacttgaccgctctgagctaaacctagccccaaacccactccaccttactaccagacaaccttagccaaaccatttacccaaataaagtataggcgatagaaattgaaacctggcgcaatagatatagtaccgcaagggaaagatgaaaaattataaccaagcataatatagcaaggactaacccctataccttctgcataatgaattaactagaaataactttgcaaggagagccaaagctaagacccccgaaaccagacgagctacctaagaacagctaaaagagcacacccgtctatgtagcaaaatagtgggaagatttataggtagaggcgacaaacctaccgagcctggtgatagctggttgtccaagatagaatcttagttcaactttaaatttgcccacagaaccctctaaatccccttgtaaatttaactgttagtccaaagaggaacagctctttggacactaggaaaaaaccttgtagagagagtaaaaaatttaacacccatagtaggcctaaaagcagccaccaattaagaaagcgttcaagctcaacacccactacctaaaaaatcccaaacatataactgaactcctcacacccaattggaccaatctatcaccctatagaagaactaatgttagtataagtaacatgaaaacattctcctccgcataagcctgcgtcagattaaaacactgaactgacaattaacagcccaatatctacaatcaaccaacaagtcattattaccctcactgtcaacccaacacaggcatgctcataaggaaaggttaaaaaaagtaaaaggaactcggcaaatcttaccccgcctgtttaccaaaaacatcacctctagcatcaccagtattagaggcaccgcctgcccagtgacacatgtttaacggccgcggtaccctaaccgtgcaaaggtagcataatcacttgttccttaaatagggacctgtatgaatggctccacgagggttcagctgtctcttacttttaaccagtgaaattgacctgcccgtgaagaggcgggcataacacagcaagacgagaagaccctatggagctttaatttattaatgcaaacagtacctaacaaacccacaggtcctaaactaccaaacctgcattaaaaatttcggttggggcgacctcggagcagaacccaacctccgagcagtacatgctaagacttcaccagtcaaagcgaactactatactcaattgatccaataacttgaccaacggaacaagttaccctagggataacagcgcaatcctattctagagtccatatcaacaatagggtttacgacctcgatgttggatcaggacatcccgatggtgcagccgctattaaaggttcgtttgttcaacgattaaagtcctacgtgatctgagttcagaccggagtaatccaggtcggtttctatctacnttcaaattcctccctgtacgaaaggacaagagaaataaggcctacttcacaaagcgccttcccccgtaaatgatatcatctcaacttagtattatacccacacccacccaagaacagggtttgttaagatggcagagcccggtaatcgcataaaacttaaaactttacagtcagaggttcaattcctcttcttaacaacatacccatggccaacctcctactcctcattgtacccattctaatcgcaatggcattcctaatgcttaccgaacgaaaaattctaggctatatacaactacgcaaaggccccaacgttgtaggcccctacgggctactacaacccttcgctgacgccataaaactcttcaccaaagagcccctaaaacccgccacatctaccatcaccctctacatcaccgccccgaccttagctctcaccatcgctcttctactatgaacccccctccccatacccaaccccctggtcaacctcaacctaggcctcctatttattctagccacctctagcctagccgtttactcaatcctctgatcagggtgagcatcaaactcaaactacgccctgatcggcgcactgcgagcagtagcccaaacaatctcatatgaagtcaccctagccatcattctactatcaacattactaataagtggctcctttaacctctccacccttatcacaacacaagaacacctctgattactcctgccatcatgacccttggccataatatgatttatctccacactagcagagaccaaccgaacccccttcgaccttgccgaaggggagtccgaactagtctcaggcttcaacatcgaatacgccgcaggccccttcgccctattcttcatagccgaatacacaaacattattataataaacaccctcaccactacaatcttcctaggaacaacatatgacgcactctcccctgaactctacacaacatattttgtcaccaagaccctacttctaacctccctgttcttatgaattcgaacagcatacccccgattccgctacgaccaactcatacacctcctatgaaaaaacttcctaccactcaccctagcattacttatatgatatgtctccatacccattacaatctccagcattccccctcaaacctaagaaatatgtctgataaaagagttactttgatagagtaaataataggagcttaaacccccttatttctaggactatgagaatcgaacccatccctgagaatccaaaattctccgtgccacctatcacaccccatcctaaagtaaggtcagctaaataagctatcgggcccataccccgaaaatgttggttatacccttcccgtactaattaatcccctggcccaacccgtcatctactctaccatctttgcaggcacactcatcacagcgctaagctcgcactgattttttacctgagtaggcctagaaataaacatgctagcttttattccagttctaaccaaaaaaataaaccctcgttccacagaagctgccatcaagtatttcctcacgcaagcaaccgcatccataatccttctaatagctatcctcttcaacaatatactctccggacaatgaaccataaccaatactaccaatcaatactcatcattaataatcataatggctatagcaataaaactaggaatagccccctttcacttctgagtcccagaggttacccaaggcacccctctgacatccggcctgcttcttctcacatgacaaaaactagcccccatctcaatcatataccaaatctctccctcactaaacgtaagccttctcctcactctctcaatcttatccatcatagcaggcagttgaggtggattaaaccaaacccagctacgcaaaatcttagcatactcctcaattacccacataggatgaataatagcagttctaccgtacaaccctaacataaccattcttaatttaactatttatattatcctaactactaccgcattcctactactcaacttaaactccagcaccacgaccctactactatctcgcacctgaaacaagctaacatgactaacacccttaattccatccaccctcctctccctaggaggcctgcccccgctaaccggctttttgcccaaatgggccattatcgaagaattcacaaaaaacaatagcctcatcatccccaccatcatagccaccatcaccctccttaacctctacttctacctacgcctaatctactccacctcaatcacactactccccatatctaacaacgtaaaaataaaatgacagtttgaacatacaaaacccaccccattcctccccacactcatcgcccttaccacgctactcctacctatctccccttttatactaataatcttatagaaatttaggttaaatacagaccaagagccttcaaagccctcagtaagttgcaatacttaatttctgtaacagctaaggactgcaaaaccccactctgcatcaactgaacgcaaatcagccactttaattaagctaagcccttactagaccaatgggacttaaacccacaaacacttagttaacagctaagcaccctaatcaactggcttcaatctacttctcccgccgccgggaaaaaaggcgggagaagccccggcaggtttgaagctgcttcttcgaatttgcaattcaatatgaaaatcacctcggagctggtaaaaagaggcctaacccctgtctttagatttacagtccaatgcttcactcagccattttacctcacccccactgatgttcgccgaccgttgactattctctacaaaccacaaagacattggaacactatacctattattcggcgcatgagctggagtcctaggcacagctctaagcctccttattcgagccgagctgggccagccaggcaaccttctaggtaacgaccacatctacaacgttatcgtcacagcccatgcatttgtaataatcttcttcatagtaatacccatcataatcggaggctttggcaactgactagttcccctaataatcggtgcccccgatatggcgtttccccgcataaacaacataagcttctgactcttacctccctctctcctactcctgctcgcatctgctatagtggaggccggagcaggaacaggttgaacagtctaccctcccttagcagggaactactcccaccctggagcctccgtagacctaaccatcttctccttacacctagcaggtgtctcctctatcttaggggccatcaatttcatcacaacaattatcaatataaaaccccctgccataacccaataccaaacgcccctcttcgtctgatccgtcctaatcacagcagtcctacttctcctatctctcccagtcctagctgctggcatcactatactactaacagaccgcaacctcaacaccaccttcttcgaccccgccggaggaggagaccccattctataccaacacctattctgatttttcggtcaccctgaagtttatattcttatcctaccaggcttcggaataatctcccatattgtaacttactactccggaaaaaaagaaccatttggatacataggtatggtctgagctatgatatcaattggcttcctagggtttatcgtgtgagcacaccacatatttacagtaggaatagacgtagacacacgagcatatttcacctccgctaccataatcatcgctatccccaccggcgtcaaagtatttagctgactcgccacactccacggaagcaatatgaaatgatctgctgcagtgctctgagccctaggattcatctttcttttcaccgtaggtggcctgactggcattgtattagcaaactcatcactagacatcgtactacacgacacgtactacgttgtagcccacttccactatgtcctatcaataggagctgtatttgccatcataggaggcttcattcactgatttcccctattctcaggctacaccctagaccaaacctacgccaaaatccatttcactatcatattcatcggcgtaaatctaactttcttcccacaacactttctcggcctatccggaatgccccgacgttactcggactaccccgatgcatacaccacatgaaacatcctatcatctgtaggctcattcatttctctaacagcagtaatattaataattttcatgatttgagaagccttcgcttcgaagcgaaaagtcctaatagtagaagaaccctccataaacctggagtgactatatggatgccccccaccctaccacacattcgaagaacccgtatacataaaatctagacaaaaaaggaaggaatcgaaccccccaaagctggtttcaagccaaccccatggcctccatgactttttcaaaaaggtattagaaaaaccatttcataactttgtcaaagttaaattataggctaaatcctatatatcttaatggcacatgcagcgcaagtaggtctacaagacgctacttcccctatcatagaagagcttatcacctttcatgatcacgccctcataatcattttccttatctgcttcctagtcctgtatgcccttttcctaacactcacaacaaaactaactaatactaacatctcagacgctcaggaaatagaaaccgtctgaactatcctgcccgccatcatcctagtcctcatcgccctcccatccctacgcatcctttacataacagacgaggtcaacgatccctcccttaccatcaaatcaattggccaccaatggtactgaacctacgagtacaccgactacggcggactaatcttcaactcctacatacttcccccattattcctagaaccaggcgacctgcgactccttgacgttgacaatcgagtagtactcccgattgaagcccccattcgtataataattacatcacaagacgtcttgcactcatgagctgtccccacattaggcttaaaaacagatgcaattcccggacgtctaaaccaaaccactttcaccgctacacgaccgggggtatactacggtcaatgctctgaaatctgtggagcaaaccacagtttcatgcccatcgtcctagaattaattcccctaaaaatctttgaaatagggcccgtatttaccctatagcaccccctctaccccctctagagcccactgtaaagctaacttagcattaaccttttaagttaaagattaagagaaccaacacctctttacagtgaaatgccccaactaaatactaccgtatggcccaccataattacccccatactccttacactattcctcatcacccaactaaaaatattaaacacaaactaccacctacctccctcaccaaagcccataaaaataaaaaattataacaaaccctgagaaccaaaatgaacgaaaatctgttcgcttcattcattgcccccacaatcctaggcctacccgccgcagtactgatcattctatttccccctctattgatccccacctccaaatatctcatcaacaaccgactaatcaccacccaacaatgactaatcaaactaacctcaaaacaaatgataaccatacacaacactaaaggacgaacctgatctcttatactagtatccttaatcatttttattgccacaactaacctcctcggactcctgcctcactcatttacaccaaccacccaactatctataaacctagccatggccatccccttatgagcgggcgcagtgattataggctttcgctctaagattaaaaatgccctagcccacttcttaccacaaggcacacctacaccccttatccccatactagttattatcgaaaccatcagcctactcattcaaccaatagccctggccgtacgcctaaccgctaacattactgcaggccacctactcatgcacctaattggaagcgccaccctagcaatatcaaccattaaccttccctctacacttatcatcttcacaattctaattctactgactatcctagaaatcgctgtcgccttaatccaagcctacgttttcacacttctagtaagcctctacctgcacgacaacacataatgacccaccaatcacatgcctatcatatagtaaaacccagcccatgacccctaacaggggccctctcagccctcctaatgacctccggcctagccatgtgatttcacttccactccataacgctcctcatactaggcctactaaccaacacactaaccatataccaatgatggcgcgatgtaacacgagaaagcacataccaaggccaccacacaccacctgtccaaaaaggccttcgatacgggataatcctatttattacctcagaagtttttttcttcgcaggatttttctgagccttttaccactccagcctagcccctaccccccaattaggagggcactggcccccaacaggcatcaccccgctaaatcccctagaagtcccactcctaaacacatccgtattactcgcatcaggagtatcaatcacctgagctcaccatagtctaatagaaaacaaccgaaaccaaataattcaagcactgcttattacaattttactgggtctctattttaccctcctacaagcctcagagtacttcgagtctcccttcaccatttccgacggcatctacggctcaacattttttgtagccacaggcttccacggacttcacgtcattattggctcaactttcctcactatctgcttcatccgccaactaatatttcactttacatccaaacatcactttggcttcgaagccgccgcctgatactggcattttgtagatgtggtttgactatttctgtatgtctccatctattgatgagggtcttactcttttagtataaatagtaccgttaacttccaattaactagttttgacaacattcaaaaaagagtaataaacttcgccttaattttaataatcaacaccctcctagccttactactaataattattacattttgactaccacaactcaacggctacatagaaaaatccaccccttacgagtgcggcttcgaccctatatcccccgcccgcgtccctttctccataaaattcttcttagtagctattaccttcttattatttgatctagaaattgccctccttttacccctaccatgagccctacaaacaactaacctgccactaatagttatgtcatccctcttattaatcatcatcctagccctaagtctggcctatgagtgactacaaaaaggattagactgaaccgaattggtatatagtttaaacaaaacgaatgatttcgactcattaaattatgataatcatatttaccaaatgcccctcatttacataaatattatactagcatttaccatctcacttctaggaatactagtatatcgctcacacctcatatcctccctactatgcctagaaggaataatactatcgctgttcattatagctactctcataaccctcaacacccactccctcttagccaatattgtgcctattgccatactagtctttgccgcctgcgaagcagcggtgggcctagccctactagtctcaatctccaacacatatggcctagactacgtacataacctaaacctactccaatgctaaaactaatcgtcccaacaattatattactaccactgacatgactttccaaaaaacacataatttgaatcaacacaaccacccacagcctaattattagcatcatccctctactattttttaaccaaatcaacaacaacctatttagctgttccccaaccttttcctccgaccccctaacaacccccctcctaatactaactacctgactcctacccctcacaatcatggcaagccaacgccacttatccagtgaaccactatcacgaaaaaaactctacctctctatactaatctccctacaaatctccttaattataacattcacagccacagaactaatcatattttatatcttcttcgaaaccacacttatccccaccttggctatcatcacccgatgaggcaaccagccagaacgcctgaacgcaggcacatacttcctattctacaccctagtaggctcccttcccctactcatcgcactaatttacactcacaacaccctaggctcactaaacattctactactcactctcactgcccaagaactatcaaactcctgagccaacaacttaatatgactagcttacacaatagcttttatagtaaagatacctctttacggactccacttatgactccctaaagcccatgtcgaagcccccatcgctgggtcaatagtacttgccgcagtactcttaaaactaggcggctatggtataatacgcctcacactcattctcaaccccctgacaaaacacatagcctaccccttccttgtactatccctatgaggcataattataacaagctccatctgcctacgacaaacagacctaaaatcgctcattgcatactcttcaatcagccacatagccctcgtagtaacagccattctcatccaaaccccctgaagcttcaccggcgcagtcattctcataatcgcccacgggcttacatcctcattactattctgcctagcaaactcaaactacgaacgcactcacagtcgcatcataatcctctctcaaggacttcaaactctactcccactaatagctttttgatgacttctagcaagcctcgctaacctcgccttaccccccactattaacctactgggagaactctctgtgctagtaaccacgttctcctgatcaaatatcactctcctacttacaggactcaacatactagtcacagccctatactccctctacatatttaccacaacacaatggggctcactcacccaccacattaacaacataaaaccctcattcacacgagaaaacaccctcatgttcatacacctatcccccattctcctcctatccctcaaccccgacatcattaccgggttttcctcttgtaaatatagtttaaccaaaacatcagattgtgaatctgacaacagaggcttacgaccccttatttaccgagaaagctcacaagaactgctaactcatgcccccatgtctaacaacatggctttctcaacttttaaaggataacagctatccattggtcttaggccccaaaaattttggtgcaactccaaataaaagtaataaccatgcacactactataaccaccctaaccctgacttccctaattccccccatccttaccaccctcgttaaccctaacaaaaaaaactcatacccccattatgtaaaatccattgtcgcatccacctttattatcagtctcttccccacaacaatattcatgtgcctagaccaagaagttattatctcgaactgacactgagccacaacccaaacaacccagctctccctaagcttcaaactagactacttctccataatattcatccctgtagcattgttcgttacatggtccatcatagaattctcactgtgatatataaactcagacccaaacattaatcagttcttcaaatatctactcatcttcctaattaccatactaatcttagttaccgctaacaacctattccaactgttcatcggctgagagggcgtaggaattatatccttcttgctcatcagttgatgatacgcccgagcagatgccaacacagcagccattcaagcaatcctatacaaccgtatcggcgatatcggtttcatcctcgccttagcatgatttatcctacactccaactcatgagacccacaacaaatagcccttctaaacgctaatccaagcctcaccccactactaggcctcctcctagcagcagcaggcaaatcagcccaattaggtctccacccctgactcccctcagccatagaaggccccaccccagtctcagccctactccactcaagcactatagttgtagcaggaatcttcttactcatccgcttccaccccctagcagaaaatagcccactaatccaaactctaacactatgcttaggcgctatcaccactctgttcgcagcagtctgcgcccttacacaaaatgacatcaaaaaaatcgtagccttctccacttcaagtcaactaggactcataatagttacaatcggcatcaaccaaccacacctagcattcctgcacatctgtacccacgccttcttcaaagccatactatttatgtgctccgggtccatcatccacaaccttaacaatgaacaagatattcgaaaaataggaggactactcaaaaccatacctctcacttcaacctccctcaccattggcagcctagcattagcaggaatacctttcctcacaggtttctactccaaagaccacatcatcgaaaccgcaaacatatcatacacaaacgcctgagccctatctattactctcatcgctacctccctgacaagcgcctatagcactcgaataattcttctcaccctaacaggtcaacctcgcttccccacccttactaacattaacgaaaataaccccaccctactaaaccccattaaacgcctggcagccggaagcctattcgcaggatttctcattactaacaacatttcccccgcatcccccttccaaacaacaatccccctctacctaaaactcacagccctcgctgtcactttcctaggacttctaacagccctagacctcaactacctaaccaacaaacttaaaataaaatccccactatgcacattttatttctccaacatactcggattctaccctagcatcacacaccgcacaatcccctatctaggccttcttacgagccaaaacctgcccctactcctcctagacctaacctgactagaaaagctattacctaaaacaatttcacagcaccaaatctccacctccatcatcacctcaacccaaaaaggcataattaaactttacttcctctctttcttcttcccactcatcctaaccctactcctaatcacataacctattcccccgagcaatctcaattacaatatatacaccaacaaacaatgttcaaccagtaactactactaatcaacgcccataatcatacaaagcccccgcaccaataggatcctcccgaatcaaccctgacccctctccttcataaattattcagcttcctacactattaaagtttaccacaaccaccaccccatcatactctttcacccacagcaccaatcctacctccatcgctaaccccactaaaacactcaccaagacctcaacccctgacccccatgcctcaggatactcctcaatagccatcgctgtagtatatccaaagacaaccatcattccccctaaataaattaaaaaaactattaaacccatataacctcccccaaaattcagaataataacacacccgaccacaccgctaacaatcaatactaaacccccataaataggagaaggcttagaagaaaaccccacaaaccccattactaaacccacactcaacagaaacaaagcatacatcattattctcgcacggactacaaccacgaccaatgatatgaaaaaccatcgttgtatttcaactacaagaacaccaatgaccccaatacgcaaaactaaccccctaataaaattaattaaccactcattcatcgacctccccaccccatccaacatctccgcatgatgaaacttcggctcactccttggcgcctgcctgatcctccaaatcaccacaggactattcctagccatgcactactcaccagacgcctcaaccgccttttcatcaatcgcccacatcactcgagacgtaaattatggctgaatcatccgctaccttcacgccaatggcgcctcaatattctttatctgcctcttcctacacatcgggcgaggcctatattacggatcatttctctactcagaaacctgaaacatcggcattatcctcctgcttgcaactatagcaacagccttcataggctatgtcctcccgtgaggccaaatatcattctgaggggccacagtaattacaaacttactatccgccatcccatacattgggacagacctagttcaatgaatctgaggaggctactcagtagacagtcccaccctcacacgattctttacctttcacttcatcttgcccttcattattgcagccctagcagcactccacctcctattcttgcacgaaacgggatcaaacaaccccctaggaatcacctcccattccgataaaatcaccttccacccttactacacaatcaaagacgccctcggcttacttctcttccttctctccttaatgacattaacactattctcaccagacctcctaggcgacccagacaattataccctagccaaccccttaaacacccctccccacatcaagcccgaatgatatttcctattcgcctacacaattctccgatccgtccctaacaaactaggaggcgtccttgccctattactatccatcctcatcctagcaataatccccatcctccatatatccaaacaacaaagcataatatttcgcccactaagccaatcactttattgactcctagccgcagacctcctcattctaacctgaatcggaggacaaccagtaagctacccttttaccatcattggacaagtagcatccgtactatacttcacaacaatcctaatcctaataccaactatctccctaattgaaaacaaaatactcaaatgggcctgtccttgtagtataaactaatacaccagtcttgtaaaccggagatgaaaacctttttccaaggacaaatcagagaaaaagtctttaactccaccattagcacccaaagctaagattctaatttaaactattctctgttctttcatggggaagcagatttgggtaccacccaagtattgactcacccatcaacaaccgctatgtatctcgtacattactgccagccaccatgaatattgtacggtaccataaatacttgaccacctgtagtacataaaaacccaatccacatcaaaaccccctccccatgcttacaagcaagtacagcaatcaaccctcaactatcacacatcaactgcaactccaaagccacccctcacccactaggataccaacaaacctacccacccttaacagtacatagtacataaagccatttaccgtacatagcacattacagtcaaatcccttctcgtccccatggatgacccccctcagataggggtcccttgaccaccatcctccgtgaaatcaatatcccgcacaagagtgctactctcctcgctccgggcccataacacttgggggtagctaaagtgaactgtatccgacatctggttcctacttcagggccataaagcctaaatagcccacacgttccccttaaataagacatcacgatg

SEQ ID NO: 290 - DNA, 16571 bp, Homo sapiens mitochondrial
  3109: "n" refers to a nucleotide at position 3107 of the Cambridge Reference Sequence (CRS, Anderson et al. 1981 Nature 290:457-465), later determined to be absent from the human mtDNA sequence according to the revised CRS (rCRS, Andrews et al. 1999 Nature Genetics 23:147); "n" therefore represents a single nucleotide deletion at a position corresponding to nucleotide 3107 of SEQ ID NO:1 as provided herein.
gatcacaggtctatcaccctattaaccactcacgggagctctccatgcatttggtattttcgtctggggggtatgcacgcgatagcattgcgagacgctggagccggagcaccctatgtcgcagtatctgtctttgattcctgcctcatcctattatttatcgcacctacgttcaatattacaggcgaacatacttactaaagtgtgttaattaattaatgcttgtaggacataataataacaattgaatgtctgcacagccgctttccacacagacatcataacaaaaaatttccaccaaaccccccctcccccccgcttctggccacagcacttaaacacatctctgccaaaccccaaaaacaaagaaccctaacaccagcctaaccagatttcaaattttatcttttggcggtatgcacttttaacagtcaccccccaactaacacattattttcccctcccactcccatactactaatctcatcaatacaacccccgcccatcctacccagcacacacacaccgctgctaaccccataccccgaaccaaccaaaccccaaagacaccccccacagtttatgtagcttacctcctcaaagcaatacactgaaaatgtttagacgggctcacatcaccccataaacaaataggtttggtcctagcctttctattagctcttagtaagattacacatgcaagcatccccgttccagtgagttcaccctctaaatcaccacgatcaaaagggacaagcatcaagcacgcagcaatgcagctcaaaacgcttagcctagccacacccccacgggaaacagcagtgattaacctttagcaataaacgaaagtttaactaagctatactaaccccagggttggtcaatttcgtgccagccaccgcggtcacacgattaacccaagtcaatagaagccggcgtaaagagtgttttagatcaccccctccccaataaagctaaaactcacctgagttgtaaaaaactccagttgacacaaaatagactacgaaagtggctttaacatatctgaacacacaatagctaagacccaaactgggattagataccccactatgcttagccctaaacctcaacagttaaatcaacaaaactgctcgccagaacactacgagccacagcttaaaactcaaaggacctggcggtgcttcatatccctctagaggagcctgttctgtaatcgataaaccccgatcaacctcaccacctcttgctcagcctatataccgccatcttcagcaaaccctgatgaaggctacaaagtaagcgcaagtacccacgtaaagacgttaggtcaaggtgtagcccatgaggtggcaagaaatgggctacattttctaccccagaaaactacgatagcccttatgaaacttaagggtcgaaggtggatttagcagtaaactaagagtagagtgcttagttgaacagggccctgaagcgcgtacacaccgcccgtcaccctcctcaagtatacttcaaaggacatttaactaaaacccctacgcatttatatagaggagacaagtcgtaacatggtaagtgtactggaaagtgcacttggacgaaccagagtgtagcttaacacaaagcacccaacttacacttaggagatttcaacttaacttgaccgctctgagctaaacctagccccaaacccactccaccttactaccagacaaccttagccaaaccatttacccaaataaagtataggcgatagaaattgaaacctggcgcaatagatatagtaccgcaagggaaagatgaaaaattataaccaagcataatatagcaaggactaacccctataccttctgcataatgaattaactagaaataactttgcaaggagagccaaagctaagacccccgaaaccagacgagctacctaagaacagctaaaagagcacacccgtctatgtagcaaaatagtgggaagatttataggtagaggcgacaaacctaccgagcctggtgatagctggttgtccaagatagaatcttagttcaactttaaatttgcccacagaaccctctaaatccccttgtaaatttaactgttagtccaaagaggaacagctctttggacactaggaaaaaaccttgtagagagagtaaaaaatttaacacccatagtaggcctaaaagcagccaccaattaagaaagcgttcaagctcaacacccactacctaaaaaatcccaaacatataactgaactcctcacacccaattggaccaatctatcaccctatagaagaactaatgttagtataagtaacatgaaaacattctcctccgcataagcctgcgtcagattaaaacactgaactgacaattaacagcccaatatctacaatcaaccaacaagtcattattaccctcactgtcaacccaacacaggcatgctcataaggaaaggttaaaaaaagtaaaaggaactcggcaaatcttaccccgcctgtttaccaaaaacatcacctctagcatcaccagtattagaggcaccgcctgcccagtgacacatgtttaacggccgcggtaccctaaccgtgcaaaggtagcataatcacttgttccttaaatagggacctgtatgaatggctccacgagggttcagctgtctcttacttttaaccagtgaaattgacctgcccgtgaagaggcgggcataacacagcaagacgagaagaccctatggagctttaatttattaatgcaaacagtacctaacaaacccacaggtcctaaactaccaaacctgcattaaaaatttcggttggggcgacctcggagcagaacccaacctccgagcagtacatgctaagacttcaccagtcaaagcgaactactatactcaattgatccaataacttgaccaacggaacaagttaccctagggataacagcgcaatcctattctagagtccatatcaacaatagggtttacgacctcgatgttggatcaggacatcccgatggtgcagccgctattaaaggttcgtttgttcaacgattaaagtcctacgtgatctgagttcagaccggagtaatccaggtcggtttctatctacnttcaaattcctccctgtacgaaaggacaagagaaataaggcctacttcacaaagcgccttcccccgtaaatgatatcatctcaacttagtattatacccacacccacccaagaacagggtttgttaagatggcagagcccggtaatcgcataaaacttaaaactttacagtcagaggttcaattcctcttcttaacaacatacccatggccaacctcctactcctcattgtacccattctaatcgcaatggcattcctaatgcttaccgaacgaaaaattctaggctatatacaactacgcaaaggccccaacgttgtaggcccctacgggctactacaacccttcgctgacgccataaaactcttcaccaaagagcccctaaaacccgccacatctaccatcaccctctacatcaccgccccgaccttagctctcaccatcgctcttctactatgaacccccctccccatacccaaccccctggtcaacctcaacctaggcctcctatttattctagccacctctagcctagccgtttactcaatcctctgatcagggtgagcatcaaactcaaactacgccctgatcggcgcactgcgagcagtagcccaaacaatctcatatgaagtcaccctagccatcattctactatcaacattactaataagtggctcctttaacctctccacccttatcacaacacaagaacacctctgattactcctgccatcatgacccttggccataatatgatttatctccacactagcagagaccaaccgaacccccttcgaccttgccgaaggggagtccgaactagtctcaggcttcaacatcgaatacgccgcaggccccttcgccctattcttcatagccgaatacacaaacattattataataaacaccctcaccactacaatcttcctaggaacaacatatgacgcactctcccctgaactctacacaacatattttgtcaccaagaccctacttctaacctccctgttcttatgaattcgaacagcatacccccgattccgctacgaccaactcatacacctcctatgaaaaaacttcctaccactcaccctagcattacttatatgatatgtctccatacccattacaatctccagcattccccctcaaacctaagaaatatgtctgataaaagagttactttgatagagtaaataataggagcttaaacccccttatttctaggactatgagaatcgaacccatccctgagaatccaaaattctccgtgccacctatcacaccccatcctaaagtaaggtcagctaaataagctatcgggcccataccccgaaaatgttggttatacccttcccgtactaattaatcccctggcccaacccgtcatctactctaccatctttgcaggcacactcatcacagcgctaagctcgcactgattttttacctgagtaggcctagaaataaacatgctagcttttattccagttctaaccaaaaaaataaaccctcgttccacagaagctgccatcaagtatttcctcacgcaagcaaccgcatccataatccttctaatagctatcctcttcaacaatatactctccggacaatgaaccataaccaatactaccaatcaatactcatcattaataatcataatagctatagcaataaaactaggaatagccccctttcacttctgagtcccagaggttacccaaggcacccctctgacatccggcctgcttcttctcacatgacaaaaactagcccccatctcaatcatataccaaatctctccctcactaaacgtaagccttctcctcactctctcaatcttatccatcatagcaggcagttgaggtggattaaaccaaacccagctacgcaaaatcttagcatactcctcaattacccacataggatgaataatagcagttctaccgtacaaccctaacataaccattcttaatttaactatttatattatcctaactactaccgcattcctactactcaacttaaactccagcaccacgaccctactactatctcgcacctgaaacaagctaacatgactaacacccttaattccatccaccctcctctccctaggaggcctgcccccgctaaccggctttttgcccaaatgggccattatcgaagaattcacaaaaaacaatagcctcatcatccccaccatcatagccaccatcaccctccttaacctctacttctacctacgcctaatctactccacctcaatcacactactccccatatctaacaacgtaaaaataaaatgacagtttgaacatacaaaacccaccccattcctccccacactcatcgcccttaccacgctactcctacctatctccccttttatactaataatcttatagaaatttaggttaaatacagaccaagagccttcaaagccctcagtaagttgcaatacttaatttctgtaacagctaaggactgcaaaaccccactctgcatcaactgaacgcaaatcagccactttaattaagctaagcccttactagaccaatgggacttaaacccacaaacacttagttaacagctaagcaccctaatcaactggcttcaatctacttctcccgccgccgggaaaaaaggcgggagaagccccggcaggtttgaagctgcttcttcgaatttgcaattcaatatgaaaatcacctcggagctggtaaaaagaggcctaacccctgtctttagatttacagtccaatgcttcactcagccattttacctcacccccactgatgttcgccgaccgttgactattctctacaaaccacaaagacattggaacactatacctattattcggcgcatgagctggagtcctaggcacagctctaagcctccttattcgagccgagctgggccagccaggcaaccttctaggtaacgaccacatctacaacgttatcgtcacagcccatgcatttgtaataatcttcttcatagtaatacccatcataatcggaggctttggcaactgactagttcccctaataatcggtgcccccgatatggcgtttccccgcataaacaacataagcttctgactcttacctccctctctcctactcctgctcgcatctgctatagtggaggccggagcaggaacaggttgaacagtctaccctcccttagcagggaactactcccaccctggagcctccgtagacctaaccatcttctccttacacctagcaggtgtctcctctatcttaggggccatcaatttcatcacaacaattatcaatataaaaccccctgccataacccaataccaaacgcccctcttcgtctgatccgtcctaatcacagcagtcctacttctcctatctctcccagtcctagctgctggcatcactatactactaacagaccgcaacctcaacaccaccttcttcgaccccgccggaggaggagaccccattctataccaacacctattctgatttttcggtcaccctgaagtttatattcttatcctaccaggcttcggaataatctcccatattgtaacttactactccggaaaaaaagaaccatttggatacataggtatggtctgagctatgatatcaattggcttcctagggtttatcgtgtgagcacaccatatatttacagtaggaatagacgtagacacacgagcatatttcacctccgctaccataatcatcgctatccccaccggcgtcaaagtatttagctgactcgccacactccacggaagcaatatgaaatgatctgctgcagtgctctgagccctaggattcatctttcttttcaccgtaggtggcctgactggcattgtattagcaaactcatcactagacatcgtactacacgacacgtactacgttgtagcccacttccactatgtcctatcaataggagctgtatttgccatcataggaggcttcattcactgatttcccctattctcaggctacaccctagaccaaacctacgccaaaatccatttcactatcatattcatcggcgtaaatctaactttcttcccacaacactttctcggcctatccggaatgccccgacgttactcggactaccccgatgcatacaccacatgaaacatcctatcatctgtaggctcattcatttctctaacagcagtaatattaataattttcatgatttgagaagccttcgcttcgaagcgaaaagtcctaatagtagaagaaccctccataaacctggagtgactatatggatgccccccaccctaccacacattcgaagaacccgtatacataaaatctagacaaaaaaggaaggaatcgaaccccccaaagctggtttcaagccaaccccatggcctccatgactttttcaaaaaggtattagaaaaaccatttcataactttgtcaaagttaaattataggctaaatcctatatatcttaatggcacatgcagcgcaagtaggtctacaagacgctacttcccctatcatagaagagcttatcacctttcatgatcacgccctcataatcattttccttatctgcttcctagtcctgtatgcccttttcctaacactcacaacaaaactaactaatactaacatctcagacgctcaggaaatagaaaccgtctgaactatcctgcccgccatcatcctagtcctcatcgccctcccatccctacgcatcctttacataacagacgaggtcaacgatccctcccttaccatcaaatcaattggccaccaatggtactgaacctacgagtacaccgactacggcggactaatcttcaactcctacatacttcccccattattcctagaaccaggcgacctgcgactccttgacgttgacaatcgagtagtactcccgattgaagcccccattcgtataataattacatcacaagacgtcttgcactcatgagctgtccccacattaggcttaaaaacagatgcaattcccggacgtctaaaccaaaccactttcaccgctacacgaccgggggtatactacggtcaatgctctgaaatctgtggagcaaaccacagtttcatgcccatcgtcctagaattaattcccctaaaaatctttgaaatagggcccgtatttaccctatagcaccccctctaccccctctagagcccactgtaaagctaacttagcattaaccttttaagttaaagattaagagaaccaacacctctttacagtgaaatgccccaactaaatactaccgtatggcccaccataattacccccatactccttacactattcctcatcacccaactaaaaatattaaacacaaactaccacctacctccctcaccaaagcccataaaaataaaaaattataacaaaccctgagaaccaaaatgaacgaaaatctgttcgcttcattcattgcccccacaatcctaggcctacccgccgcagtactgatcattctatttccccctctattgatccccacctccaaatatctcatcaacaaccgactaatcaccacccaacaatgactaatcaaactaacctcaaaacaaatgataaccatacacaacactaaaggacgaacctgatctcttatactagtatccttaatcatttttattgccacaactaacctcctcggactcctgcctcactcatttacaccaaccacccaactatctataaacctagccatggccacccccttatgagcgggcgcagtgattataggctttcgctctaagattaaaaatgccctagcccacttcttaccacaaggcacacctacaccccttatccccatactagttattatcgaaaccatcagcctactcattcaaccaatagccctggccgtacgcctaaccgctaacattactgcaggccacctactcatgcacctaattggaagcgccaccctagcaatatcaaccattaaccttccctctacacttatcatcttcacaattctaattctactgactatcctagaaatcgctgtcgccttaatccaagcctacgttttcacacttctagtaagcctctacctgcacgacaacacataatgacccaccaatcacatgcctatcatatagtaaaacccagcccatgacccctaacaggggccctctcagccctcctaatgacctccggcctagccatgtgatttcacttccactccataacgctcctcatactaggcctactaaccaacacactaaccatataccaatgatggcgcgatgtaacacgagaaagcacataccaaggccaccacacaccacctgtccaaaaaggccttcgatacgggataatcctatttattacctcagaagtttttttcttcgcaggatttttctgagccttttaccactccagcctagcccctaccccccaattaggagggcactggcccccaacaggcatcaccccgctaaatcccctagaagtcccactcctaaacacatccgtattactcgcatcaggagtatcaatcacctgagctcaccatagtctaatagaaaacaaccgaaaccaaataattcaagcactgcttattacaattttactgggtctctattttaccctcctacaagcctcagagtacttcgagtctcccttcaccatttccgacggcatctacggctcaacattttttgtagccacaggcttccacggacttcacgtcattattggctcaactttcctcactatctgcttcatccgccaactaatatttcactttacatccaaacatcactttggcttcgaagccgccgcctgatactggcattttgtagatgtggtttgactatttctgtatgtctccatctattgatgagggtcttactcttttagtataaatagtaccgttaacttccaattaactagttttgacaacattcaaaaaagagtaataaacttcgccttaattttaataatcaacaccctcctagccttactactaataattattacattttgactaccacaactcaacggctacatagaaaaatccaccccttacgagtgcggcttcgaccctatatcccccgcccgcgtccctttctccataaaattcttcttagtagctattaccttcttattatttgatctagaaattgccctccttttacccctaccatgagccctacaaacaactaacctgccactaatagttatgtcatccctcttattaatcatcatcctagccctaagtctggcctatgagtgactacaaaaaggattagactgaaccgaattggtatatagtttaaacaaaacgaatgatttcgactcattaaattatgataatcatatttaccaaatgcccctcatttacataaatattatactagcatttaccatctcacttctaggaatactagtatatcgctcacacctcatatcctccctactatgcctagaaggaataatactatcgctgttcattatagctactctcataaccctcaacacccactccctcttagccaatattgtgcctattgccatactagtctttgccgcctgcgaagcagcggtgggcctagccctactagtctcaatctccaacacatatggcctagactacgtacataacctaaacctactccaatgctaaaactaatcgtcccaacaattatattactaccactgacatgactttccaaaaaacacataatttgaatcaacacaaccacccacagcctaattattagcatcatccctctactattttttaaccaaatcaacaacaacctatttagctgttccccaaccttttcctccgaccccctaacaacccccctcctaatactaactacctgactcctacccctcacaatcatggcaagccaacgccacttatccagtgaaccactatcacgaaaaaaactctacctctctatactaatctccctacaaatctccttaattataacattcacagccacagaactaatcatattttatatcttcttcgaaaccacacttatccccaccttggctatcatcacccgatgaggcaaccagccagaacgcctgaacgcaggcacatacttcctattctacaccctagtaggctcccttcccctactcatcgcactaatttacacccacaacaccctaggctcactaaacattctactactcactctcactgcccaagaactatcaaactcctgagccaacaacttaatatgactagcttacacaatagcttttatagtaaagatacctctttacggactccacttatgactccctaaagcccatgtcgaagcccccatcgctgggtcaatagtacttgccgcagtactcttaaaactaggcggctatggtataatacgcctcacactcattctcaaccccctgacaaaacacatagcctaccccttccttgtactatccctatgaggcataattataacaagctccatctgcctacgacaaacagacctaaaatcgctcattgcatactcttcaatcagccacatagccctcgtagtaacagccattctcatccaaaccccctgaagcttcaccggcgcagtcattctcataatcgcccacgggcttacatcctcattactattctgcctagcaaactcaaactacgaacgcactcacagtcgcatcataatcctctctcaaggacttcaaactctactcccactaatagctttttgatgacttctagcaagcctcgctaacctcgccttaccccccactattaacctactgggagaactctctgtgctagtaaccacgttctcctgatcaaatatcactctcctacttacaggactcaacatactagtcacagccctatactccctctacatatttaccacaacacaatggggctcactcacccaccacattaacaacataaaaccctcattcacacgagaaaacaccctcatgttcatacacctatcccccattctcctcctatccctcaaccccgacatcattaccgggttttcctcttgtaaatatagtttaaccaaaacatcagattgtgaatctgacaacagaggcttacgaccccttatttaccgagaaagctcacaagaactgctaactcatgcccccatgtctaacaacatggctttctcaacttttaaaggataacagctatccattggtcttaggccccaaaaattttggtgcaactccaaataaaagtaataaccatgcacactactataaccaccctaaccctgacttccctaattccccccatccttaccaccctcgttaaccctaacaaaaaaaactcatacccccattatgtaaaatccattgtcgcatccacctttattatcagtctcttccccacaacaatattcatgtgcctagaccaagaagttattatctcgaactgacactgagccacaacccaaacaacccagctctccctaagcttcaaactagactacttctccataatattcatccctgtagcattgttcgttacatggtccatcatagaattctcactgtgatatataaactcagacccaaacattaatcagttcttcaaatatctactcatcttcctaattaccatactaatcttagttaccgctaacaacctattccaactgttcatcggctgagagggcgtaggaattatatccttcttgctcatcagttgatgatacgcccgagcagatgccaacacagcagccattcaagcaatcctatacaaccgtatcggcgatatcggtttcatcctcgccttagcatgatttatcctacactccaactcatgagacccacaacaaatagcccttctaaacgctaatccaagcctcaccccactactaggcctcctcctagcagcagcaggcaaatcagcccaattaggtctccacccctgactcccctcagccatagaaggccccaccccagtctcagccctactccactcaagcactatagttgtagcaggaatcttcttactcatccgcttccaccccctagcagaaaatagcccactaatccaaactctaacactatgcttaggcgctatcaccactctgttcgcagcagtctgcgcccttacacaaaatgacatcaaaaaaatcgtagccttctccacttcaagtcaactaggactcataatagttacaatcggcatcaaccaaccacacctagcattcctgcacatctgtacccacgccttcttcaaagccatactatttatgtgctccgggtccatcatccacaaccttaacaatgaacaagatattcgaaaaataggaggactactcaaaaccatacctctcacttcaacctccctcaccattggcagcctagcattagcaggaatacctttcctcacaggtttctactccaaagaccacatcatcgaaaccgcaaacatatcatacacaaacgcctgagccctatctattactctcatcgctacctccctgacaagcgcctatagcactcgaataattcttctcaccctaacaggtcaacctcgcttccccacccttactaacattaacgaaaataaccccaccctactaaaccccattaaacgcctgacagccggaagcctattcgcaggatttctcattactaacaacatttcccccgcatcccccttccaaacaacaatccccctctacctaaaactcacagccctcgctgtcactttcctaggacttctaacagccctagacctcaactacctaaccaacaaacttaaaataaaatccccactatgcacattttatttctccaacatactcggattctaccctagcatcacacaccgcacaatcccctatctaggccttcttacgagccaaaacctgcccctactcctcctagacctaacctgactagaaaagctattacctaaaacaatttcacagcaccaaatctccacctccatcatcacctcaacccaaaaaggcataattaaactttacttcctctctttcttcttcccactcatcctaaccctactcctaatcacataacctattcccccgagcaatctcaattacaatatatacaccaacaaacaatgttcaaccagtaactactactaatcaacgcccataatcatacaaagcccccgcaccaataggatcctcccgaatcaaccctgacccctctccttcataaattattcagcttcctacactattaaagtttaccacaaccaccaccccatcatactctttcacccacagcaccaatcctacctccatcgctaaccccactaaaacactcaccaagacctcaacccctgacccccatgcctcaggatactcctcaatagccatcgctgtagtatatccaaagacaaccatcattccccctaaataaattaaaaaaactattaaacccatataacctcccccaaaattcagaataataacacacccgaccacaccgctaacaatcaatactaaacccccataaataggagaaggcttagaagaaaaccccacaaaccccattactaaacccacactcaacagaaacaaagcatacatcattattctcgcacggactacaaccacgaccaatgatatgaaaaaccatcgttgtatttcaactacaagaacaccaatgaccccaatacgcaaaactaaccccctaataaaattaattaaccactcattcatcgacctccccaccccatccaacatctccgcatgatgaaacttcggctcactccttggcgcctgcctgatcctccaaatcaccacaggactattcctagccatgcactactcaccagacgcctcaaccgccttttcatcaatcgcccacatcactcgagacgtaaattatggctgaatcatccgctaccttcacgccaatggcgcctcaatattctttatctgcctcttcctacacatcgggcgaggcctatattacggatcatttctctactcagaaacctgaaacatcggcattatcctcctgcttgcaactatagcaacagccttcataggctatgtcctcccgtgaggccaaatatcattctgaggggccacagtaattacaaacttactatccgccatcccatacattgggacagacctagttcaatgaatctgaggaggctactcagtagacagtcccaccctcacacgattctttacctttcacttcatcttgcccttcattattgcagccctagcagcactccacctcctattcttgcacgaaacgggatcaaacaaccccctaggaatcacctcccattccgataaaatcaccttccacccttactacacaatcaaagacgccctcggcttacttctcttccttctctccttaatgacattaacactattctcaccagacctcctaggcgacccagacaattataccctagccaaccccttaaacacccctccccacatcaagcccgaatgatatttcctattcgcctacacaattctccgatccgtccctaacaaactaggaggcgtccttgccctattactatccatcctcatcctagcaataatccccatcctccatatatccaaacaacaaagcataatatttcgcccactaagccaatcactttattgactcctagccgcagacctcctcattctaacctgaatcggaggacaaccagtaagctacccttttaccatcattggacaagtagcatccgtactatacttcacaacaatcctaatcctaataccaactatctccctaattgaaaacaaaatactcaaatgggcctgtccttgtagtataaactaatacaccagtcttgtaaaccggagatgaaaacctttttccaaggacaaatcagagaaaaagtctttaactccaccattagcacccaaagctaagattctaatttaaactattctctgttctttcatggggaagcagatttgggtaccacccaagtattgactcacccatcaacaaccgctatgtatttcgtacattactgccagccaccatgaatattgtacggtaccataaatacttgaccacctgtagtacataaaaacccaatccacatcaaaaccccctccccatgcttacaagcaagtacagcaatcaaccctcaactatcacacatcaactgcaactccaaagccacccctcacccactaggataccaacaaacctacccacccttaacagtacatagtacataaagccatttaccgtacatagcacattacagtcaaatcccttctcgtccccatggatgacccccctcagataggggtcccttgaccaccatcctccgtgaaatcaatatcccgcacaagagtgctactctcctcgctccgggcccataacacttgggggtagctaaagtgaactgtatccgacatctggttcctacttcagggccataaagcctaaatagcccacacgttccccttaaataagacatcacgatg

SEQ ID NO: 291 - DNA, 16570 bp, Homo sapiens mitochondrial
  3108: "n" refers to a nucleotide at position 3107 of the Cambridge Reference Sequence (CRS, Anderson et al. 1981 Nature 290:457-465), later determined to be absent from the human mtDNA sequence according to the revised CRS (rCRS, Andrews et al. 1999 Nature Genetics 23:147); "n" therefore represents a single nucleotide deletion at a position corresponding to nucleotide 3107 of SEQ ID NO:1 as provided herein.
gatcacaggtctatcaccctattaaccactcacgggagctctccatgcatttggtattttcgtctggggggtatgcacgcgatagcattgcgagacgctggagccggagcaccctatgtcgcagtatctgtctttgattcctgcctcatcctattatttatcgcacctacgttcaatattacaggcgaacatacttactaaagtgtgttaattaattaatgcttgtaggacataataataacaattgaatgtctgcacagccgctttccacacagacatcataacaaaaaatttccaccaaaccccccctcccccgccttctggccacagcacttaaacacatctctgccaaaccccaaaaacaaagaaccctaacaccagcctaaccagatttcaaattttatcttttggcggtatgcacttttaacagtcaccccccaactaacacattattttcccctcccactcccatactaccaatctcatcaatacaacccccgcccatcctacccagcacacacacaccgctgctaaccccataccccgaaccaaccaaaccccaaagacaccccccacagtttatgtagcttacctcctcaaagcaatacactgaaaatgtttagacgggctcacatcaccccataaacaaataggtttggtcctagcctttctattagctcttagtaagattacacatgcaagcatccccgttccagtgagttcaccctctaaatcaccacgatcaaaagggacaagcatcaagcacgcagcaatgcagctcaaaacgcttagcctagccacacccccacgggaaacagcagtgattaacctttagcaataaacgaaagtttaactaagctatactaaccccagggttggtcaatttcgtgccagccaccgcggtcacacgattaacccaagtcaatagaagccggcgtaaagagtgttttagatcaccccctccccaataaagctaaaactcacctgagttgtaaaaaactccagttgacacaaaatagactacgaaagtggctttaacatatctgaacacacaatagctaagacccaaactgggattagataccccactatgcttagccctaaacctcaacagttaaatcaacaaaactgctcgccagaacactacgagccacagcttaaaactcaaaggacctggcggtgcttcatatccctctagaggagcctgttctgtaatcgataaaccccgatcaacctcaccacctcttgctcagcctatataccgccatcttcagcaaaccctgatgaaggctacaaagtaagcgcaagtacccacgtaaagacgttaggtcaaggtgtagcccatgaggtggcaagaaatgggctacattttctaccccagaaaactacgatagcccttatgaaacttaagggtcgaaggtggatttagcagtaaactgagagtagagtgcttagttgaacagggccctgaagcgcgtacacaccgcccgtcaccctcctcaagtatacttcaaaggacatttaactaaaacccctacgcatttatatagaggagacaagtcgtaacatggtaagtgtactggaaagtgcacttggacgaaccagagtgtagcttaacacaaagcacccaacttacacttaggagatttcaacttaacttgaccgctctgagctaaacctagccccaaacccactccaccttactaccagacaaccttagccaaaccatttacccaaataaagtataggcgatagaaattgaaacctggcgcaatagatatagtaccgcaagggaaagatgaaaaattataaccaagcataatatagcaaggactaacccctataccttctgcataatgaattaactagaaataactttgcaaggagagccaaagctaagacccccgaaaccagacgagctacctaagaacagctaaaagagcacacccgtctatgtagcaaaatagtgggaagatttataggtagaggcgacaaacctaccgagcctggtgatagctggttgtccaagatagaatcttagttcaactttaaatttgcccacagaaccctctaaatccccttgtaaatttaactgttagtccaaagaggaacagctctttggacactaggaaaaaaccttgtagagagagtaaaaaatttaacacccatagtaggcctaaaagcagccaccaattaagaaagcgttcaagctcaacacccactacctaaaaaatcccaaacatataactgaactcctcacacccaattggaccaatctatcaccctatagaagaactaatgttagtataagtaacatgaaaacattctcctccgcataagcctgcgtcagattaaaacactgaactgacaattaacagcccaatatctacaatcaaccaacaagtcattattaccctcactgtcaacccaacacaggcatgctcataaggaaaggttaaaaaaagtaaaaggaactcggcaaatcttaccccgcctgtttaccaaaaacatcacctctagcatcaccagtattagaggcaccgcctgcccagtgacacatgtttaacggccgcggtaccctaaccgtgcaaaggtagcataatcacttgttccttaaatagggacctgtatgaatggctccacgagggttcagctgtctcttacttttaaccagtgaaattgacctgcccgtgaagaggcgggcataacacagcaagacgagaagaccctatggagctttaatttattaatgcaaacagtacctaacaaacccacaggtcctaaactaccaaacctgcattaaaaatttcggttggggcgacctcggagcagaacccaacctccgagcagtacatgctaagacttcaccagtcaaagcgaactactatactcaattgatccaataacttgaccaacggaacaagttaccctagggataacagcgcaatcctattctagagtccatatcaacaatagggtttacgacctcgatgttggatcaggacatcccaatggtgcagccgctattaaaggttcgtttgttcaacgattaaagtcctacgtgatctgagttcagaccggagtaatccaggtcggtttctatctacnttcaaattcctccctgtacgaaaggacaagagaaataaggcctacttcacaaagcgccttcccccgtaaatgatatcatctcaacttagtattatacccacacccacccaagaacagggtttgttaagatggcagagcccggtaatcgcataaaacttaaaactttacagtcagaggttcaattcctcttcttaacaacatacccatggccaacctcctactcctcattgtacccattctaatcgcaatggcattcctaatgcttaccgaacgaaaaattctaggctatatacaactacgcaaaggccccaacgttgtaggcccctacgggctactacaacccttcgctgacgccataaaactcttcaccaaagagcccctaaaacccgccacatctaccatcaccctctacatcaccgccccgaccttagctctcaccatcgctcttctactatgaacccccctccccatacccaaccccctggtcaacctcaacctaggcctcctatttattctagccacctctagcctagccgtttactcaatcctctgatcagggtgagcatcaaactcaaactacgccctgatcggcgcactgcgagcagtagcccaaacaatctcatatgaagtcaccctagccatcattctactatcaacattactaataagtggctcctttaacctctccacccttatcacaacacaagaacacctctgattactcctgccatcatgacccttggccataatatgatttatctccacactagcagagaccaaccgaacccccttcgaccttgccgaaggggagtccgaactagtctcaggcttcaacatcgaatacgccgcaggccccttcgccctattcttcatagccgaatacacaaacattattataataaacaccctcaccactacaatcttcctaggaacaacatatgacgcactctcccctgaactctacacaacatattttgtcaccaagaccctacttctaacctccctgttcttatgaattcgaacagcatacccccgattccgctacgaccaactcatacacctcctatgaaaaaacttcctaccactcaccctagcattacttatatgatatgtctccatacccattacaatctccagcattccccctcaaacctaagaaatatgtctgataaaagagttactttgatagagtaaataataggagcttaaacccccttatttctaggactatgagaatcgaacccatccctgagaatccaaaattctccgtgccacctatcacaccccatcctaaagtaaggtcagctaaataagctatcgggcccataccccgaaaatgttggttatacccttcccgtactaattaatcccctggcccaacccgtcatctactctaccatctttgcaggcacactcatcacagcgctaagctcgcactgattttttacctgagtaggcctagaaataaacatgctagcttttattccagttctaaccaaaaaaataaaccctcgttccacagaagctgccatcaagtatttcctcacgcaagcaaccgcatccataatccttctaatagctatcctcttcaacaatatactctccggacaatgaaccataaccaatactaccaatcaatactcatcattaataatcataatggctatagcaataaaactaggaatagccccctttcacttctgagtcccagaggttacccaaggcacccctctgacatccggcctgcttcttctcacatgacaaaaactagcccccatctcaatcatataccaaatctctccctcactaaacgtaagccttctcctcactctctcaatcttatccatcatagcaggcagttgaggtggattaaaccaaacccagctacgcaaaatcttagcatactcctcaattacccacataggatgaataatagcagttctaccgtacaaccctaacataaccattcttaatttaactatttatattatcctaactactaccgcattcctactactcaacttaaactccagcaccacgaccctactactatctcgcacctgaaacaagctaacatgactaacacccttaattccatccaccctcctctccctaggaggcctgcccccgctaaccggctttttgcccaaatgggccattatcgaagaattcacaaaaaacaatagcctcatcatccccaccatcatagccaccatcaccctccttaacctctacttctacctacgcctaatctactccacctcaatcacactactccccatatctaacaacgtaaaaataaaatgacagtttgaacatacaaaacccaccccattcctccccacactcatcgcccttaccacgctactcctacctatctccccttttatactaataatcttatagaaatttaggttaaatacagaccaagagccttcaaagccctcagtaagttgcaatacttaatttctgtaacagctaaggactgcaaaaccccactctgcatcaactgaacgcaaatcagccactttaattaagctaagcccttactagaccaatgggacttaaacccacaaacacttagttaacagctaagcaccctaatcaactggcttcaatctacttctcccgccgccgggaaaaaaggcgggagaagccccggcaggtttgaagctgcttcttcgaatttgcaattcaatatgaaaatcacctcggagctggtaaaaagaggcctaacccctgtctttagatttacagtccaatgcttcactcagccattttacctcacccccactgatgttcgccgaccgttgactattctctacaaaccacaaagacattggaacactatacctattattcggcgcatgagctggagtcctaggcacagctctaagcctccttattcgagccgagctgggccagccaggcaaccttctaggtaacgaccacatctacaacgttatcgtcacagcccatgcatttgtaataatcttcttcatagtaatacccatcataatcggaggctttggcaactgactagttcccctaataatcggtgcccccgatatggcgtttccccgcataaacaacataagcttctgactcttacctccctctctcctactcctgctcgcatctgctatagtggaggccggagcaggaacaggttgaacagtctaccctcccttagcagggaactactcccaccctggagcctccgtagacctaaccatcttctccttacacctagcaggtgtctcctctatcttaggggccatcaatttcatcacaacaattatcaatataaaaccccctgccataacccaataccaaacgcccctcttcgtctgatccgtcctaatcacagcagtcctacttctcctatctctcccagtcctagctgctggcatcactatactactaacagaccgcaacctcaacaccaccttcttcgaccccgccggaggaggagaccccattctataccaacacctattctgatttttcggtcaccctgaagtttatattcttatcctaccaggcttcggaataatctcccatattgtaacttactactccggaaaaaaagaaccatttggatacataggtatggtctgagctatgatatcaattggcttcctagggtttatcgtgtgagcacaccatatatttacagtaggaatagacgtagacacacgagcatatttcacctccgctaccataatcatcgctatccccaccggcgtcaaagtatttagctgactcgccacactccacggaagcaatatgaaatgatctgctgcagtgctctgagccctaggattcatctttcttttcaccgtaggtggcctgactggcattgtattagcaaactcatcactagacatcgtactacacgacacgtactacgttgtagcccacttccactatgtcctatcaataggagctgtatttgccatcataggaggcttcattcactgatttcccctattctcaggctacaccctagaccaaacctacgccaaaatccatttcactatcatattcatcggcgtaaatctaactttcttcccacaacactttctcggcctatccggaatgccccgacgttactcggactaccccgatgcatacaccacatgaaacatcctatcatctgtaggctcattcatttctctaacagcagtaatattaataattttcatgatttgagaagccttcgcttcgaagcgaaaagtcctaatagtagaagaaccctccataaacctggagtgactatatggatgccccccaccctaccacacattcgaagaacccgtatacataaaatctagacaaaaaaggaaggaatcgaaccccccaaagctggtttcaagccaaccccatggcctccatgactttttcaaaaaggtattagaaaaaccatttcataactttgtcaaagttaaattataggctaaatcctatatatcttaatggcacatgcagcgcaagtaggtctacaagacgctacttcccctatcatagaagagcttatcacctttcatgatcacgccctcataatcattttccttatctgcttcctagtcctgtatgcccttttcctaacactcacaacaaaactaactaatactaacatctcagacgctcaggaaatagaaaccgtctgaactatcctgcccgccatcatcctagtcctcatcgccctcccatccctacgcatcctttacataacagacgaggtcaacgatccctcccttaccatcaaatcaattggccaccaatggtactgaacctacgagtacaccgactacggcggactaatcttcaactcctacatacttcccccattattcctagaaccaggcgacctgcgactccttgacgttgacaatcgagtagtactcccgattgaagcccccattcgtataataattacatcacaagacgtcttgcactcatgagctgtccccacattaggcttaaaaacagatgcaattcccggacgtctaaaccaaaccactttcaccgctacacgaccgggggtatactacggtcaatgctctgaaatctgtggagcaaaccacagtttcatgcccatcgtcctagaattaattcccctaaaaatctttgaaatagggcccgtatttaccctatagcaccccctctaccccctctagagcccactgtaaagctaacttagcattaaccttttaagttaaagattaagagaaccaacacctctttacagtgaaatgccccaactaaatactaccgtatggcccaccataattacccccatactccttacactattcctcatcacccaactaaaaatattaaacacaaactaccacctacctccctcaccaaagcccataaaaataaaaaattataacaaaccctgagaaccaaaatgaacgaaaatctgttcgcttcattcattgcccccacaatcctaggcctacccgccgcagtactgatcattctatttccccctctattgatccccacctccaaatatctcatcaacaaccgactaatcaccacccaacaatgactaatcaaactaacctcaaaacaaatgataaccatacacaacactaaaggacgaacctgatctcttatactagtatccttaatcatttttattgccacaactaacctcctcggactcctgcctcactcatttacaccaaccacccaactatctataaacctagccatggccatccccttatgagcgggcgcagtgattataggctttcgctctaagattaaaaatgccctagcccacttcttaccacaaggcacacctacaccccttatccccatactagttattatcgaaaccatcagcctactcattcaaccaatagccctggccgtacgcctaaccgctaacattactgcaggccacctactcatgcacctaattggaagcgccaccctagcaatatcaaccattaaccttccctctacacttatcatcttcacaattctaattctactgactatcctagaaatcgctgtcgccttaatccaagcctacgttttcacacttctagtaagcctctacctgcacgacaacacataatgacccaccaatcacatgcctatcatatagtaaaacccagcccatgacccctaacaggggccctctcagccctcctaatgacctccggcctagccatgtgatttcacttccactccataacgctcctcatactaggcctactaaccaacacactaaccatataccaatgatggcgcgatgtaacacgagaaagcacataccaaggccaccacacaccacctgtccaaaaaggccttcgatacgggataatcctatttattacctcagaagtttttttcttcgcaggatttttctgagccttttaccactccagcctagcccctaccccccaattaggagggcactggcccccaacaggcatcaccccgctaaatcccctagaagtcccactcctaaacacatccgtattactcgcatcaggagtatcaatcacctgagctcaccatagtctaatagaaaacaaccgaaaccaaataattcaagcactgcttattacaattttactgggtctctattttaccctcctacaagcctcagagtacttcgagtctcccttcaccatttccgacggcatctacggctcaacattttttgtagccacaggcttccacggacttcacgtcattattggctcaactttcctcactatctgcttcatccgccaactaatatttcactttacatccaaacatcactttggcttcgaagccgccgcctgatactggcattttgtagatgtggtttgactatttctgtatgtctccatctattgatgagggtcttactcttttagtataaatagtaccgttaacttccaattaactagttttgacaacattcaaaaaagagtaataaacttcgccttaattttaataatcaacaccctcctagccttactactaataattattacattttgactaccacaactcaacggctacatagaaaaatccaccccttacgagtgcggcttcgaccctatatcccccgcccgcgtccctttctccataaaattcttcttagtagctattaccttcttattatttgatctagaaattgccctccttttacccctaccatgagccctacaaacaactaacctgccactaatagttatgtcatccctcttattaatcatcatcctagccctaagtctggcctatgagtgactacaaaaaggattagactgaaccgaattggtatatagtttaaacaaaacgaatgatttcgactcattaaattatgataatcatatttaccaaatgcccctcatttacataaatattatactagcatttaccatctcacttctaggaatactagtatatcgctcacacctcatatcctccctactatgcctagaaggaataatactatcgctgttcattatagctactctcataaccctcaacacccactccctcttagccaatattgtgcctattgccatactagtctttgccgcctgcgaagcagcggtgggcctagccctactagtctcaatctccaacacatatggcctagactacgtacataacctaaacctactccaatgctaaaactaatcgtcccaacaattatattactaccactgacatgactttccaaaaaacacataatttgaatcaacacaaccacccacagcctaattattagcatcatccctctactattttttaaccaaatcaacaacaacctatttagctgttccccaaccttttcctccgaccccctaacaacccccctcctaatactaactacctgactcctacccctcacaatcatggcaagccaacgccacttatccagtgaaccactatcacgaaaaaaactctacctctctatactaatctccctacaaatctccttaattataacattcacagccacagaactaatcatattttatatcttcttcgaaaccacacttatccccaccttggctatcatcacccgatgaggcaaccagccagaacgcctgaacgcaggcacatacttcctattctacaccctagtaggctcccttcccctactcatcgcactaatttacactcacaacaccctaggctcactaaacattctactactcactctcactgcccaagaactatcaaactcctgagccaacaacttaatatgactagcttacacaatagcttttatagtaaagatacctctttacggactccacttatgactccctaaagcccatgtcgaagcccccatcgctgggtcaatagtacttgccgcagtactcttaaaactaggcggctatggtataatacgcctcacactcattctcaaccccctgacaaaacacatagcctaccccttccttgtactatccctatgaggcataattataacaagctccatctgcctacgacaaacagacctaaaatcgctcattgcatactcttcaatcagccacatagccctcgtagtaacagccattctcatccaaaccccctgaagcttcaccggcgcagtcattctcataatcgcccacgggcttacatcctcattactattctgcctagcaaactcaaactacgaacgcactcacagtcgcatcataatcctctctcaaggacttcaaactctactcccactaatagctttttgatgacttctagcaagcctcgctaacctcgccttaccccccactattaacctactgggagaactctctgtgctagtaaccacgttctcctgatcaaatatcactctcctacttacaggactcaacatactagtcacagccctatactccctctacatatttaccacaacacaatggggctcactcacccaccacattaacaacataaaaccctcattcacacgagaaaacaccctcatgttcatacacctatcccccattctcctcctatccctcaaccccgacatcattaccgggttttcctcttgtaaatatagtttaaccaaaacatcagattgtgaatctgacaacagaggcttacgaccccttatttaccgagaaagctcacaagaactgctaactcatgcccccatgtctaacaacatggctttctcaacttttaaaggataacagctatccattggtcttaggccccaaaaattttggtgcaactccaaataaaagtaataaccatgcacactactataaccaccctaaccctgacttccctaattccccccatccttaccaccctcgttaaccctaacaaaaaaaactcatacccccattatgtaaaatccattgtcgcatccacctttattatcagtctcttccccacaacaatattcatgtgcctagaccaagaagttattatctcgaactgacactgagccacaacccaaacaacccagctctccctaagcttcaaactagactacttctccataatattcatccctgtagcattgttcgttacatggtccatcatagaattctcactgtgatatataaactcagacccaaacattaatcagttcttcaaatatctactcatcttcctaattaccatactaatcttagttaccgctaacaacctattccaactgttcatcggctgagagggcgtaggaattatatccttcttgctcatcagttgatgatacgcccgagcagatgccaacacagcagccattcaagcaatcctatacaaccgtatcggcgatatcggtttcatcctcgccttagcatgatttatcctacactccaactcatgagacccacaacaaatagcccttctaaacgctaatccaagcctcaccccactactaggcctcctcctagcagcagcaggcaaatcagcccaattaggtctccacccctgactcccctcagccatagaaggccccaccccagtctcagccctactccactcaagcactatagttgtagcaggaatcttcttactcatccgcttccaccccctagcagaaaatagcccactaatccaaactctaacactatgcttaggcgctatcaccactctgttcgcagcagtctgcgcccttacacaaaatgacatcaaaaaaatcgtagccttctccacttcaagtcaactaggactcataatagttacaatcggcatcaaccaaccacacctagcattcctgcacatctgtacccacgccttcttcaaagccatactatttatgtgctccgggtccatcatccacaaccttaacaatgaacaagatattcgaaaaataggaggactactcaaaaccatacctctcacttcaacctccctcaccattggcagcctagcattagcaggaatacctttcctcacaggtttctactccaaagaccacatcatcgaaaccgcaaacatatcatacacaaacgcctgagccctatctattactctcatcgctacctccctgacaagcgcctatagcactcgaataattcttctcaccctaacaggtcaacctcgcttccccacccttactaacattaacgaaaataaccccaccctactaaaccccattaaacgcctggcagccggaagcctattcgcaggatttctcattactaacaacatttcccccgcatcccccttccaaacaacaatccccctctacctaaaactcacagccctcgctgtcactttcctaggacttctaacagccctagacctcaactacctaaccaacaaacttaaaataaaatccccactatgcacattttatttctccaacatactcggattctaccctagcatcacacaccgcacaatcccctatctaggccttcttacgagccaaaacctgcccctactcctcctagacctaacctgactagaaaagctattacctaaaacaatttcacagcaccaaatctccacctccatcatcacctcaacccaaaaaggcataattaaactttacttcctctctttcttcttcccactcatcctaaccctactcctaatcacataacctattcccccgagcaatctcaattacaatatatacaccaacaaacaatgttcaaccagtaactactactaatcaacgcccataatcatacaaagcccccgcaccaataggatcctcccgaatcaaccctgacccctctccttcataaattattcagcttcctacactattaaagtttaccacaaccaccaccccatcatattctttcacccacagcaccaatcctacctccatcgctaaccccactaaaacactcaccaagacctcaacccctgacccccatgcctcaggatactcctcaatagccatcgctgtagtatatccaaagacaaccatcattccccctaaataaattaaaaaaactattaaacccatataacctcccccaaaattcagaataataacacacccgaccacaccgctaacaatcaatactaaacccccataaataggagaaggcttagaagaaaaccccacaaaccccattactaaacccacactcaacagaaacaaagcatacatcattattctcgcacggactacaaccacgaccaatgatatgaaaaaccatcgttgtatttcaactacaagaacaccaatgaccccaatacgcaaaactaaccccctaataaaattaattaaccactcattcatcgacctccccaccccatccaacatctccgcatgatgaaacttcggctcactccttggcgcctgcctgatcctccaaatcaccacaggactattcctagccatgcactactcaccagacgcctcaaccgccttttcatcaatcgcccacatcactcgagacgtaaattatggctgaatcatccgctaccttcacgccaatggcgcctcaatattctttatctgcctcttcctacacatcgggcgaggcctatattacggatcatttctctactcagaaacctgaaacatcggcattatcctcctgcttgcaactatagcaacagccttcataggctatgtcctcccgtgaggccaaatatcattctgaggggccacagtaattacaaacttactatccgccatcccatacattgggacagacctagttcaatgaatctgaggaggctactcagtagacagtcccaccctcacacgattctttacctttcacttcatcttgcccttcattattgcagccctagcagcactccacctcctattcttgcacgaaacgggatcaaacaaccccctaggaatcacctcccattccgataaaatcaccttccacccttactacacaatcaaagacgccctcggcttacttctcttccttctctccttaatgacattaacactattctcaccagacctcctaggcgacccagacaattataccctagccaaccccttaaacacccctccccacatcaagcccgaatgatatttcctattcgcctacacaattctccgatccgtccctaacaaactaggaggcgtccttgccctattactatccatcctcatcctagcaataatccccatcctccatatatccaaacaacaaagcataatatttcgcccactaagccaatcactttattgactcctagccgcagacctcctcattctaacctgaatcggaggacaaccagtaagctacccttttaccatcattggacaagtagcatccgtactatacttcacaacaatcctaatcctaataccaactatctccctaattgaaaacaaaatactcaaatgggcctgtccttgtagtataaactaatacaccagtcttgtaaaccggagatgaaaacctttttccaaggacaaatcagagaaaaagtctttaactccaccattagcacccaaagctaagattctaatttaaactattctctgttctttcatggggaagcagatttgggtaccacccaagtattgactcacccatcaacaaccgctatgtatttcgtacattactgccagccaccatgaatattgtacggtaccataaatacttgaccacctgtagtacataaaaacccaatccacatcaaaaccccctcctcatgcttacaagcaagtacagcaatcaaccctcaactatcacacatcaactgcaactccaaagccacccctcacccactaggataccaacaaacctacccacccttaacagtacatagtacataaagccatttaccgtacatagcacattacagtcaaatcccttctcgtccccatggatgacccccctcagataggggtcccttgaccaccatcctccgtgaaatcaatatcccgcacaagagtgctactctcctcgctccgggcccataacacttgggggtagctaaagtgaactgtatccgacatctggttcctacttcagggccataaagcctaaatagcccacacgttccccttaaataagacatcacgatg

SEQ ID NO: 292 - DNA, 16572 bp, Homo sapiens mitochondrial
  3110: "n" refers to a nucleotide at position 3107 of the Cambridge Reference Sequence (CRS, Anderson et al. 1981 Nature 290:457-465), later determined to be absent from the human mtDNA sequence according to the revised CRS (rCRS, Andrews et al. 1999 Nature Genetics 23:147); "n" therefore represents a single nucleotide deletion at a position corresponding to nucleotide 3107 of SEQ ID NO:1 as provided herein.
gatcacaggtctatcaccctattaaccactcacgggagctctccatgcatttggtattttcgtctggggggtatgcacgcgatagcattgcgagacgctggagccggagcaccctatgtcgcagtatctgtctttgattcctgcctcatcctattatttatcgcacctacgttcaatattacaggcgaacatacttactaaagtgtgttaattaattaatgcttgtaggacataataataacaattgaatgtctgcacagccgctttccacacagacatcataacaaaaaatttccaccaaaccccccctccccccccgcttctggccacagcacttaaacacatctctgccaaaccccaaaaacaaagaaccctaacaccagcctaaccagatttcaaattttatcttttggcggtatgcacttttaacagtcaccccccaactaacacattattttcccctcccactcccatactactaatctcatcaatacaacccccgcccatcctacccagcacacacacaccgctgctaaccccataccccgaaccaaccaaaccccaaagacaccccccacagtttatgtagcttacctcctcaaagcaatacactgaaaatgtttagacgggctcacatcaccccataaacaaataggtttggtcctagcctttctattagctcttagtaagattacacatgcaagcatccccgttccagtgagttcaccctctaaatcaccacgatcaaaagggacaagcatcaagcacgcagcaatgcagctcaaaacgcttagcctagccacacccccacgggaaacagcagtgattaacctttagcaataaacgaaagtttaactaagctatactaaccccagggttggtcaatttcgtgccagccaccgcggtcacacgattaacccaagtcaatagaagccggcgtaaagagtgttttagatcaccccctccccaataaagctaaaactcacctgagttgtaaaaaactccagttgacacaaaatagactacgaaagtggctttaacatatctgaacacacaatagctaagacccaaactgggattagataccccactatgcttagccctaaacctcaacagttaaatcaacaaaactgctcgccagaacactacgagccacagcttaaaactcaaaggacctggcggtgcttcatatccctctagaggagcctgttctgtaatcgataaaccccgatcaacctcaccacctcttgctcagcctatataccgccatcttcagcaaaccctgatgaaggctacaaagtaagcgcaagtacccacgtaaagacgttaggtcaaggtgtagcccatgaggtggcaagaaatgggctacattttctaccccagaaaactacgatagcccttatgaaacttaagggtcgaaggtggatttagcagtaaactgagagtagagtgcttagttgaacagggccctgaagcgcgtacacaccgcccgtcaccctcctcaagtatacttcaaaggacatttaactaaaacccctacgcatttatatagaggagacaagtcgtaacatggtaagtgtactggaaagtgcacttggacgaaccagagtgtagcttaacacaaagcacccaacttacacttaggagatttcaacttaacttgaccgctctgagctaaacctagccccaaacccactccaccttactaccagacaaccttagccaaaccatttacccaaataaagtataggcgatagaaattgaaacctggcgcaatagatatagtaccgcaagggaaagatgaaaaattataaccaagcataatatagcaaggactaacccctgtaccttctgcataatgaattaactagaaataactttgcaaggagagccaaagctaagacccccgaaaccagacgagctacctaagaacagctaaaagagcacacccgtctatgtagcaaaatagtgggaagatttataggtagaggcgacaaacctaccgagcctggtgatagctggttgtccaagatagaatcttagttcaactttaaatttgcccacagaaccctctaaatccccttgtaaatttaactgttagtccaaagaggaacagctctttggacactaggaaaaaaccttgtagagagagtaaaaaatttaacacccatagtaggcctaaaagcagccaccaattaagaaagcgttcaagctcaacacccactacctaaaaaatcccaaacatataactgaactcctcacacccaattggaccaatctatcaccctatagaagaactaatgttagtataagtaacatgaaaacattctcctccgcataagcctgcgtcagattaaaacactgaactgacaattaacagcccaatatctacaatcaaccaacaagtcattattaccctcactgtcaacccaacacaggcatgctcataaggaaaggttaaaaaaagtaaaaggaactcggcaaatcttaccccgcctgtttaccaaaaacatcacctctagcatcaccagtattagaggcaccgcctgcccagtgacacatgtttaacggccgcggtaccctaaccgtgcaaaggtagcataatcacttgttccttaaatagggacctgtatgaatggctccacgagggttcagctgtctcttacttttaaccagtgaaattgacctgcccgtgaagaggcgggcatgacacagcaagacgagaagaccctatggagctttaatttattaatgcaaacagtacctaacaaacccacaggtcctaaactaccaaacctgcattaaaaatttcggttggggcgacctcggagcagaacccaacctccgagcagtacatgctaagacttcaccagtcaaagcgaactactatactcaattgatccaataacttgaccaacggaacaagttaccctagggataacagcgcaatcctattctagagtccatatcaacaatagggtttacgacctcgatgttggatcaggacatcccgatggtgcagccgctattaaaggttcgtttgttcaacgattaaagtcctacgtgatctgagttcagaccggagtaatccaggtcggtttctatctacnttcaaattcctccctgtacgaaaggacaagagaaataaggcctacttcacaaagcgccttcccccgtaaatgatatcatctcaacttagtattatacccacacccacccaagaacagggtttgttaagatggcagagcccggtaatcgcataaaacttaaaactttacagtcagaggttcaattcctcttcttaacaacatacccatggccaacctcctactcctcattgtacccattctaatcgcaatggcattcctaatgcttaccgaacgaaaaattctaggctatatacaactacgcaaaggccccaacgttgtaggcccctacgggctactacaacccttcgctgacgccataaaactcttcaccaaagagcccctaaaacccgccacatctaccatcaccctctacatcaccgccccgaccttagctctcaccatcgctcttctactatgaacccccctccccatacccaaccccctggtcaacctcaacctaggcctcctatttattctagccacctctagcctagccgtttactcaatcctctgatcagggtgagcatcaaactcaaactacgccctgatcggcgcactgcgagcagtagcccaaacaatctcatatgaagtcaccctagccatcattctactatcaacattactaataagtggctcctttaacctctccacccttatcacaacacaagaacacctctgattactcctgccatcatgacccttggccataatatgatttatctccacactagcagagaccaaccgaacccccttcgaccttgccgaaggggagtccgaactagtctcaggcttcaacatcgaatacgccgcaggccccttcgccctattcttcatagccgaatacacaaacattattataataaacaccctcaccactacaatcttcctaggaacaacatatgacgcactctcccctgaactctacacaacatattttgtcaccaagaccctacttctaacctccctgttcttatgaattcgaacagcatacccccgattccgctacgaccaactcatacacctcctatgaaaaaacttcctaccactcaccctagcattacttatatgatatgtctccatacccattacaatctccagcattccccctcaaacctaagaaatatgtctgataaaagagttactttgatagagtaaataataggagcttaaacccccttatttctaggactatgagaatcgaacccatccctgagaatccaaaattctccgtgccacctatcacaccccatcctaaagtaaggtcagctaaataagctatcgggcccataccccgaaaatgttggttatacccttcccgtactaattaatcccctggcccaacccgtcatctactctaccatctttgcaggcacactcatcacagcgctaagctcgcactgattttttacctgagtaggcctagaaataaacatactagcttttattccagttctaaccaaaaaaataaaccctcgttccacagaagctgccaccaagtatttcctcacgcaagcaaccgcatccataatccttctaatagctatcctcttcaacaatatactctccggacaatgaaccataaccaatactaccaatcaatactcatcattaataatcataatggctatagcaataaaactaggaatagccccctttcacttctgagtcccagaggttacccaaggcacccctctgacatccggcctgcttcttctcacatgacaaaaactagcccccatctcaatcatataccaaatctctccctcactaaacgtaagccttctcctcactctctcaatcttatccatcatagcaggcagttgaggtggattaaaccaaacccagctacgcaaaatcttagcatactcctcaattacccacataggatgaataatagcagttctaccgtacaaccctaacataaccattcttaatttaactatttatattatcctaactactaccgcattcctactactcaacttaaactccagcaccacgaccctactactatctcgcacctgaaacaagctaacatgactaacacccttaattccatccaccctcctctccctaggaggcctgcccccgctaaccggctttttgcccaaatgggccattatcgaagaattcacaaaaaacaatagcctcatcatccccaccatcatagccaccatcaccctccttaacctctacttctacctacgcctaatctactccacctcaatcacactactccccatatctaacaacgtaaaaataaaatgacagtttgaacatacaaaacccaccccattcctccccacactcatcgcccttaccacgctactcctacctatctccccttttatactaataatcttatagaaatttaggttaaatacagaccaagagccttcaaagccctcagtaagttgcaatacttaatttctgtaacagctaaggactgcaaaaccccactctgcatcaactgaacgcaaatcagccactttaattaagctaagcccttactagaccaatgggacttaaacccacaaacacttagttaacagctaagcaccctaatcaactggcttcaatctacttctcccgccgccgggaaaaaaggcgggagaagccccggcaggtttgaagctgcttcttcgaatttgcaattcaatatgaaaatcacctcggagctggtaaaaagaggcctaacccctgtctttagatttacagtccaatgcttcactcagccattttacctcacccccactgatgttcgccgaccgttgactattctctacaaaccacaaagacattggaacactatacctattattcggcgcatgagctggagtcctaggcacagctctaagcctccttattcgagccgagctgggccagccaggcaaccttctaggtaacgaccacatctacaacgttatcgtcacagcccatgcatttgtaataatcttcttcatagtaatacccatcataatcggaggctttggcaactgactagttcccctaataatcggtgcccccgatatggcgtttccccgcataaacaacataagcttctgactcttacctccctctctcctactcctgctcgcatctgctatagtggaggccggagcaggaacaggttgaacagtctaccctcccttagcagggaactactcccaccctggagcctccgtagacctaaccatcttctccttacacctagcaggtgtctcctctatcttaggggccatcaatttcatcacaacaattatcaatataaaaccccctgccataacccaataccaaacgcccctcttcgtctgatccgtcctaatcacagcagtcctacttctcctatctctcccagtcctagctgctggcatcactatactactaacagaccgcaacctcaacaccaccttcttcgaccccgccggaggaggagaccccattctataccaacacctattctgatttttcggtcaccctgaagtttatattcttatcctaccaggcttcggaataatctcccatattgtaacttactactccggaaaaaaagaaccatttggatacataggtatggtctgagctatgatatcaattggcttcctagggtttatcgtgtgagcacaccatatatttacagtaggaatagacgtagacacacgagcatatttcacctccgctaccataatcatcgctatccccaccggcgtcaaagtatttagctgactcgccacactccacggaagcaatatgaaatgatctgctgcagtgctctgagccctaggattcatctttcttttcaccgtaggtggcctgactggcattgtattagcaaactcatcactagacatcgtactacacgacacgtactacgttgtagctcacttccactatgtcctatcaataggagctgtatttgccatcataggaggcttcattcactgatttcccctattctcaggctacaccctagaccaaacctacgccaaaatccatttcactatcatattcatcggcgtaaatctaactttcttcccacaacactttctcggcctatccggaatgccccgacgttactcggactaccccgatgcatacaccacatgaaacatcctatcatctgtaggctcattcatttctctaacagcagtaatattaataattttcatgatttgagaagccttcgcttcgaagcgaaaagtcctaatagtagaagaaccctccataaacctggagtgactatatggatgccccccaccctaccacacattcgaagaacccgtatacataaaatctagacaaaaaaggaaggaatcgaaccccccaaagctggtttcaagccaaccccatggcctccatgactttttcaaaaaggtattagaaaaaccatttcataactttgtcaaagttaaattataggctaaatcctatatatcttaatggcacatgcagcgcaagtaggtctacaagacgctacttcccctatcatagaagagcttatcacctttcatgatcacgccctcataatcattttccttatctgcttcctagtcctgtatgcccttttcctaacactcacaacaaaactaactaatactaacatctcagacgctcaggaaatagaaaccgtctgaactatcctgcccgccatcatcctagtcctcatcgccctcccatccctacgcatcctttacataacagacgaggtcaacgatccctcccttaccatcaaatcaattggccaccaatggtactgaacctacgagtacaccgactacggcggactaatcttcaactcctacatacttcccccattattcctagaaccaggcgacctgcgactccttgacgttgacaatcgagtagtactcccgattgaagcccccattcgtataataattacatcacaagacgtcttgcactcatgagctgtccccacattaggcttaaaaacagatgcaattcccggacgtctaaaccaaaccactttcaccgctacacgaccgggggtatactacggtcaatgctctgaaatctgtggagcaaaccacagtttcatgcccatcgtcctagaattaattcccctaaaaatctttgaaatagggcccgtatttaccctatagcaccccctctaccccctctagagcccactgtaaagctaacttagcattaaccttttaagttaaagattaagagaaccaacacctctttacagtgaaatgccccaactaaatactaccgtatggcccaccataattacccccatactccttacactattcctcatcacccaactaaaaatattaaacacaaactaccacctacctccctcaccaaagcccataaaaataaaaaattataacaaaccctgagaaccaaaatgaacgaaaatctgttcgcttcattcattgcccccacaatcctaggcctacccgccgcagtactgatcattctatttccccctctattgatccccacctccaaatatctcatcaacaaccgactaatcaccacccaacaatgactaatcaaactaacctcaaaacaaatgataaccatacacaacactaaaggacgaacctgatctcttatactagtatccttaatcatttttattgccacaactaacctcctcggactcctgcctcactcatttacaccaaccacccaactatctataaacctagccatggccatccccttatgagcgggcgcagtgattgtaggctttcgctctaagattaaaaatgccctagcccacttcttaccacaaggcacacctacaccccttatccccatactagttattatcgaaaccatcagcctactcattcaaccaatagccctggccgtacgcctaaccgctaacattactgcaggccacctactcatgcacctaattggaagcgccaccctagcaatatcaaccattaaccttccctctacacttatcatcttcacaattctaattctactgactatcctagaaatcgctgtcgccttaatccaagcctacgttttcacacttctagtaagcctctacctgcacgacaacacataatgacccaccaatcacatgcctatcatatagtaaaacccagcccatgacccctaacaggggccctctcagccctcctaatgacctccggcctagccatgtgatttcacttccactccataacgctcctcatactaggcctactaaccaacacactaaccatataccaatgatggcgcgatgtaacacgagaaagcacataccaaggccaccacacaccacctgtccaaaaaggccttcgatacgggataatcctatttattacctcagaagtttttttcttcgcaggatttttctgagccttttaccactccagcctagcccctaccccccaattaggagggcactggcccccaacaggcatcaccccgctaaatcccctagaagtcccactcctaaacacatccgtattactcgcatcaggagtatcaatcacctgagctcaccatagtctaatagaaaacaaccgaaaccaaataattcaagcactgcttattacaattttactgggtctctattttaccctcctacaagcctcagagtacttcgagtctcccttcaccatttccgacggcatctacggctcaacattttttgtagccacaggcttccacggacttcacgtcattattggctcaactttcctcactatctgcttcatccgccaactaatatttcactttacatccaaacatcactttggcttcgaagccgccgcctgatactggcattttgtagatgtggtttgactatttctgtatgtctccatctattgatgagggtcttactcttttagtataaatagtaccgttaacttccaattaactagttttgacaacattcaaaaaagagtaataaacttcgccttaattttaataatcaacaccctcctagccttactactaataattattacattttgactaccacaactcaacggctacatagaaaaatccaccccttacgagtgcggcttcgaccctatatcccccgcccgcgtccctttctccataaaattcttcttagtagctattaccttcttattatttgatctagaaattgccctccttttacccctaccatgagccctacaaacaactaacctgccactaatagttatgtcatccctcttattaatcatcatcctagccctaagtctggcctatgagtgactacaaaaaggattagactgaaccgaattggtatatagtttaaacaaaacgaatgatttcgactcattaaattatgataatcatatttaccaaatgcccctcatttacataaatattatactagcatttaccatctcacttctaggaatactagtatatcgctcacacctcatatcctccctactatgcctagaaggaataatactatcgctgttcattatagctactctcataaccctcaacacccactccctcttagccaatattgtgcctattgccatactagtctttgccgcctgcgaagcagcggtgggcctagccctactagtctcaatctccaacacatatggcctagactacgtacataacctaaacctactccaatgctaaaactaatcgtcccaacaattatattactaccactgacatgactttccaaaaaacacataatttgaatcaacacaaccacccacagcctaattattagcatcatccctctactattttttaaccaaatcaacaacaacctatttagctgttccccaaccttttcctccgaccccctaacaacccccctcctaatactaactacctgactcctacccctcacaatcatggcaagccaacgccacttatccagtgaaccactatcacgaaaaaaactctacctctctatactaatctccctacaaatctccttaattataacattcacagccacagaactaatcatattttatatcttcttcgaaaccacacttatccccaccttggctatcatcacccgatgaggcaaccagccagaacgcctgaacgcaggcacatacttcctattctacaccctagtaggctcccttcccctactcatcgcactaatttacactcacaacaccctaggctcactaaacattctactactcactctcactgcccaagaactatcaaactcctgagccaacaacttaatatgactagcttacacaatagcttttatagtaaagatacctctttacggactccacttatgactccctaaagcccatgtcgaagcccccatcgctgggtcaatagtacttgccgcagtactcttaaaactaggcggctatggtataatacgcctcacactcattctcaaccccctgacaaaacacatagcctaccccttccttgtactatccctatgaggcataattataacaagctccatctgcctacgacaaacagacctaaaatcgctcattgcatactcttcaatcagccacatagccctcgtagtaacagccattctcatccaaaccccctgaagcttcaccggcgcagtcattctcataatcgcccacgggcttacatcctcattactattctgcctagcaaactcaaactacgaacgcactcacagtcgcatcataatcctctctcaaggacttcaaactctactcccactaatagctttttgatgacttctagcaagcctcgctaacctcgccttaccccccactattaacctactgggagaactctctgtgctagtaaccacgttctcctgatcaaatatcactctcctacttacaggactcaacatactagtcacagccctatactccctctacatatttaccacaacacaatggggctcactcacccaccacattaacaacataaaaccctcattcacacgagaaaacaccctcatgttcatacacctatcccccattctcctcctatccctcaaccccgacatcattaccgggttttcctcttgtaaatatagtttaaccaaaacatcagattgtgaatctgacaacagaggcttacgaccccttatttaccgagaaagctcacaagaactgctaactcatgcccccatgtctaacaacatggctttctcaacttttaaaggataacagctatccattggtcttaggccccaaaaattttggtgcaactccaaataaaagtaataaccatgcacactactataaccaccctaaccctgacttccctaattccccccatccttaccaccctcgttaaccctaacaaaaaaaactcatacccccattatgtaaaatccattgtcgcatccacctttattatcagtctcttccccacaacaatattcatgtgcctagaccaagaagttattatctcgaactgacactgagccacaacccaaacaacccagctctccctaagcttcaaactagactacttctccataatattcatccctgtagcattgttcgttacatggtccatcatagaattctcactgtgatatataaactcagacccaaacattaatcagttcttcaaatatctactcatcttcctaattaccatactaatcttagttaccgctaacaacctattccaactgttcatcggctgagagggcgtaggaattatatccttcttgctcatcagttgatgatacgcccgagcagatgccaacacagcagccattcaagcaatcctatacaaccgtatcggcgatatcggtttcatcctcgccttagcatgatttatcctacactccaactcatgagacccacaacaaatagcccttctaaacgctaatccaagcctcaccccactactaggcctcctcctagcagcagcaggcaaatcagcccaattaggtctccacccctgactcccctcagccatagaaggccccaccccagtctcagccctactccactcaagcactatagttgtagcaggaatcttcttactcatccgcttccaccccctagcagaaaatagcccactaatccaaactctaacactatgcttaggcgctatcaccactctgttcgcagcagtctgcgcccttacacaaaatgacatcaaaaaaatcgtagccttctccacttcaagtcaactaggactcataatagttacaatcggcatcaaccaaccacacctagcattcctgcacatctgtacccacgccttcttcaaagccatactatttatgtgctccgggtccatcatccacaaccttaacaatgaacaagatattcgaaaaataggaggactactcaaaaccatacctctcacttcaacctccctcaccattggcagcctagcattagcaggaatacctttcctcacaggtttctactccaaagaccacatcatcgaaaccgcaaacatatcatacacaaacgcctgagccctatctattactctcatcgctacctccctgacaagcgcctatagcactcgaataattcttctcaccctaacaggtcaacctcgcttccccacccttactaacattaacgaaaataaccccaccctactaaaccccattaaacgcctggcagccggaagcctattcgcaggatttctcattactaacaacatttcccccgcatcccccttccaaacaacaatccccctctacctaaaactcacagccctcgctgtcactttcctaggacttctaacagccctagacctcaactacctaaccaacaaacttaaaataaaatccccactatgcacattttatttctccaacatactcggattctaccctagcatcacacaccgcacaatcccctatctaggccttcttacgagccaaaacctgcccctactcctcctagacctaacctgactagaaaagctattacctaaaacaatttcacagcaccaaatctccacctccatcatcacctcaacccaaaaaggcataattaaactttacttcctctctttcttcttcccactcatcctaaccctactcctaatcacataacctattcccccgagcaatctcaattacaatatatacaccaacaaacaatgttcaaccagtaactactactaatcaacgcccataatcatacaaagcccccgcaccaataggatcctcccgaatcaaccctgacccctctccttcataaattattcagcttcctacactattaaagtttaccacaaccaccaccccatcatactctttcacccacagcaccaatcctacctccatcgctaaccccactaaaacactcaccaagacctcaacccctgacccccatgcctcaggatactcctcaatagccatcgctgtagtatatccaaagacaaccatcattccccctaaataaattaaaaaaactattaaacccatataacctcccccaaaattcagaataataacacacccgaccacaccgctaacaatcaatactaaacccccataaataggagaaggcttagaagaaaaccccacaaaccccattactaaacccacactcaacagaaacaaagcatacatcattattctcgcacggactacaaccacgaccaatgatatgaaaaaccatcgttgtatttcaactacaagaacaccaatgaccccaatacgcaaaactaaccccctaataaaattaattaaccactcattcatcgacctccccaccccatccaacatctccgcatgatgaaacttcggctcactccttggcgcctgcctgatcctccaaatcaccacaggactattcctagccatgcactactcaccagacgcctcaaccgccttttcatcaatcgcccacatcactcgagacgtaaattatggctgaatcatccgctaccttcacgccaatggcgcctcaatattctttatctgcctcttcctacacatcgggcgaggcctatattacggatcatttctctactcagaaacctgaaacatcggcattatcctcctgcttgcaactatagcaacagccttcataggctatgtcctcccgtgaggccaaatatcattctgaggggccacagtaattacaaacttactatccgccatcccatacattgggacagacctagttcaatgaatctgaggaggctactcagtagacagtcccaccctcacacgattctttacctttcacttcatcttgcccttcattattgcagccctagcagcactccacctcctattcttgcacgaaacgggatcaaacaaccccctaggaatcacctcccattccgataaaatcaccttccacccttactacacaatcaaagacgccctcggcttacttctcttccttctctccttaatgacattaacactattctcaccagacctcctaggcgacccagacaattataccctagccaaccccttaaacacccctccccacatcaagcccgaatgatatttcctattcgcctacacaattctccgatccgtccctaacaaactaggaggcgtccttgccctattactatccatcctcatcctagcaataatccccatcctccatatatccaaacaacaaagcataatatttcgcccactaagccaatcactttattgactcctagccgcagacctcctcattctaacctgaatcggaggacaaccagtaagctacccttttaccatcattggacaagtagcatccgtactatacttcacaacaatcctaatcctaataccaactatctccctaattgaaaacaaaatactcaaatgggcctgtccttgtagtataaattaatacaccagtcttgtaaaccggagatgaaaacctttttccaaggacaaatcagagaaaaagtctttaactccaccattagcacccaaagctaagattctaatttaaactattctctgttctttcatggggaagcagatttgggtaccacccaagtattgactcacccatcaacaaccgctatgtatttcgtacattactgccagccaccatgaatattgtacggtaccataaatacttgaccacctgtagtacataaaaacccaatccacatcaaaaccccctccccatgcttacaagcaagtacagcaatcaaccctcaactatcacacatcaactgcaactccaaagccacccctcacccactaggataccaacaaacctacccaccctcaacagtacatagtacataaagccatttaccgtacatagcacattacagtcaaatcccttctcgtccccatggatgacccccctcagataggagtcccttgaccaccatcctccgtgaaatcaatatcccgcacaagagtgctactctcctcgctccgggcccataacacttgggggtagctaaagtgaactgtatccgacatctggttcctacttcagggccataaagcctaaatagcccacacgttccccttaaataagacatcacgatg

SEQ ID NO: 293 - DNA, 16571 bp, Homo sapiens mitochondrial
  3109: "n" refers to a nucleotide at position 3107 of the Cambridge Reference Sequence (CRS, Anderson et al. 1981 Nature 290:457-465), later determined to be absent from the human mtDNA sequence according to the revised CRS (rCRS, Andrews et al. 1999 Nature Genetics 23:147); "n" therefore represents a single nucleotide deletion at a position corresponding to nucleotide 3107 of SEQ ID NO:1 as provided herein.
gatcacaggtctatcaccctattaaccactcacgggagctctccatgcatttggtattttcgtctggggggtgtgcacgcgatagcattgcgagacgctggagccggagcaccctatgtcgcagtatctgtctttgattcctgcctcatcctattatttatcgcacctacgttcaatattacaggcgaacatacttactaaagtgtgttaattaattaatgcttgtaggacataataataacaattgaatgtctgcacagccgctttccacacagacatcataacaaaaaatttccaccaaaccccccctcccccccgcttccggccacagcacttaaacacatctctgccaaaccccaaaaacaaagaaccctaacaccagcctaaccagatttcaaattttatcttttggcggtatgcacttttaacagtcaccccccaactaacacattattttcccctcccactcccatactactaatctcatcaatacaacccccgcccatcctacccagcacacacacaccgctgctaaccccataccccgaaccaaccaaaccccaaagacaccccccacagtttatgtagcttacctcctcaaagcaatacactgaaaatgtttagacgggctcacatcaccccataaacaaataggtttggtcctagcctttctattagctcttagtaagattacacatgcaagcatccccattccagtgagttcaccctctaaatcaccacgatcaaaagggacaagcatcaagcacgcagcaatgcagctcaaaacgcttagcctagccacacccccacgggaaacagcagtgattaacctttagcaataaacgaaagtttaactaagctatactaaccccagggttggtcaatttcgtgccagccaccgcggtcacacgattaacccaagtcaatagaaaccggcgtaaagagtgttttagatcaccccctccccaataaagctaaaactcacctgagttgtaaaaaactccagttgacacaaaatagactacgaaagtggctttaacatatctgaacacacaatagctaagacccaaactgggattagataccccactatgcttagccctaaacctcaacagttaaatcaacaaaactgctcgccagaacactacgagccacagcttaaaactcaaaggacctggcggtgcttcatatccctctagaggagcctgttctgtaatcgataaaccccgatcaacctcaccacctcttgctcagcctatataccgccatcttcagcaaaccctgatgaaggctacaaagtaagcgcaagtacccacgtaaagacgttaggtcaaggtgtagcccatgaggtggcaagaaatgggctacattttctaccccagaaaactacgatagcccttatgaaacttaagggtcgaaggtggatttagcagtaaactgagagtagagtgcttagttgaacagggccctgaagcgcgtacacaccgcccgtcaccctcctcaagtatacttcaaaggacatttaactaaaacccctacgcatttatatagaggagacaagtcgtaacatggtaagtgtactggaaagtgcacttggacgaaccagagtgtagcttaacacaaagcacccaacttacacttaggagatttcaacttaacttgaccgctctgagctaaacctagccccaaacccactccaccttactaccagacaaccttagccaaaccatttacccaaataaagtataggcgatagaaattgaaacctggcgcaatagatatagtaccgcaagggaaagatgaaaaattataaccaagcataatatagcaaggactaacccctataccttctgcataatgaattaactagaaataactttgcaaggagaaccaaagctaagacccccgaaaccagacgagctacctaagaacagctaaaagagcacacccgtctatgtagcaaaatagtgggaagatttataggtagaggcgacaaacctaccgagcctggtgatagctggttgtccaagatagaatcttagttcaactttaaatttgcccacagaaccctctaaatccccttgtaaatttaactgttagtccaaagaggaacagctctttggacactaggaaaaaaccttgtagagagagtaaaaaatttaacacccatagtaggcctaaaagcagccaccaattaagaaagcgttcaagctcaacacccactacctaaaaaatcccaaacatataactgaactcctcacacccaattggaccaatctatcaccctatagaagaactaatgttagtataagtaacatgaaaacattctcctccgcataagcctgcgtcagattaaaacactgaactgacaattaacagcccaatatctacaatcaaccaacaagtcattattaccctcactgtcaacccaacacaggcatgctcataaggaaaggttaaaaaaagtaaaaggaactcggcaaatcttaccccgcctgtttaccaaaaacatcacctctagcatcaccagtattagaggcaccgcctgcccagtgacacatgtttaacggccgcggtaccctaaccgtgcaaaggtagcataatcacttgttccttaaatagggacctgtatgaatggctccacgagggttcagctgtctcttacttttaaccagtgaaattgacctgcccgtgaagaggcgggcatgacacagcaagacgagaagaccctatggagctttaatttattaatgcaaacagtacctaacaaacccacaggtcctaaactaccaaacctgcattaaaaatttcggttggggcgacctcggagcagaacccaacctccgagcagtacatgctaagacttcaccagtcaaagcgaactactatactcaattgatccaataacttgaccaacggaacaagttaccctagggataacagcgcaatcctattctagagtccatatcaacaatagggtttacgacctcgatgttggatcaggacatcccgatggtgcagccgctattaaaggttcgtttgttcaacgattaaagtcctacgtgatctgagttcagaccggagtaatccaggtcggtttctatctacnttcaaattcctccctgtacgaaaggacaagagaaataaggcctacttcacaaagcgccttcccccgtaaatgatatcatctcaacttagtattatacccacacccacccaagaacagggtttgttaagatggcagagcccggtaatcgcataaaacttaaaactttacagtcagaggttcaattcctcttcttaacaacatacccatggccaacctcctactcctcattgtacccattctaatcgcaatggcattcctaatgcttaccgaacgaaaaattctaggctatatacaactacgcaaaggccccaacgttgtaggcccctacgggctactacaacccttcgctgacgccataaaactcttcaccaaagagcccctaaaacccgccacatctaccatcaccctctacatcaccgccccgaccttagctctcaccatcgctcttctactatgaacccccctccccatacccaaccccctggtcaacctcaacctaggcctcctatttattctagccacctctagcctagccgtttactcaatcctctgatcagggtgagcatcaaactcaaactacgccctgatcggcgcactgcgagcagtagcccaaacaatctcatatgaagtcaccctagccatcattctactatcaacattactaataagtggctcctttaacctctccacccttatcacaacacaagaacacctctgattactcctgccatcatgacccttggccataatatgatttatctccacactagcagagaccaaccgaacccccttcgaccttgccgaaggggagtccgaactagtctcaggcttcaacatcgaatacgccgcaggccccttcgccctattcttcatagccgaatacacaaacattattataataaacaccctcaccactacaatcttcctaggaacaacatatgacgcactctcccctgaactctacacaacatattttgtcaccaagaccctacttctaacctccctgttcttatgaattcgaacagcatacccccgattccgctacgaccaactcatacacctcctatgaaaaaacttcctaccactcaccctagcattacttatatgacatgtctccatacccattacaatctccagcattccccctcaaacctaagaaatatgtctgataaaagagttactttgatagagtaaataataggagcttaaacccccttatttctaggactatgagaatcgaacccatccctgagaatccaaaattctccgtgccacctatcacaccccatcctaaagtaaggtcagctaaataagctatcgggcccataccccgaaaatgttggttatacccttcccgtactaattaatcccctggcccaacccgtcatctactctaccatctttgcaggcacactcatcacagcgctaagctcgcactgattttttacctgagtaggcctagaaataaacatgctagcttttattccagttctaaccaaaaaaataaaccctcgttccacagaagctgccatcaagtatttcctcacgcaagcaaccgcatccataatccttctaatagctatcctcttcaacaatatactctccggacaatgaaccataaccaatactaccaatcaatactcatcattaataatcataatggctatagcaataaaactaggaatagccccctttcacttctgagtcccagaggttacccaaggcacccctctgacatccggcctgcttcttctcacatgacaaaaactagcccccatctcaatcatataccaaatctctccctcactagacgtaagccttctcctcactctctcaatcttatccatcatagcaggcagttgaggtggattaaaccaaacccagctacgcaaaatcttagcatactcctcaattacccacataggatgaataatagcagttctaccgtacaaccctaacataaccattcttaatttaactatttatattatcctaactactaccgcattcctactactcaacttaaactccagcaccacaaccctactactatctcgcacctgaaacaagctaacatgactaacacccttaattccatccaccctcctctccctaggaggcctgcccccgctaaccggctttttgcccaaatgggccattatcgaagaattcacaaaaaacaatagcctcatcatccccaccatcatagccaccatcaccctccttaacctctacttctacctacgcctaatctactccacctcaatcacactactccccatatctaacaacgtaaaaataaaatgacagtttgaacacacaaaacccaccccattcctccccacactcatcgcccttaccacgctactcctacctatctccccttttatactaataatcttatagaaatttaggttaaatacagaccaagagccttcaaagccctcagtaagttgcaatacttaatttctgtaacagctaaggactgcaaaaccccactctgcatcaactgaacgcaaatcagccactttaattaagctaagcccttactagaccaatgggacttaaacccacaaacacttagttaacagctaagcaccctaatcaactggcttcaatctacttctcccgccgccgggaaaaaaggcgggagaagccccggcaggtttgaagctgcttcttcgaatttgcaattcaatatgaaaatcacctcggagctggtaaaaagaggcctaacccctgtctttagatttacagtccaatgcttcactcagccattttacctcacccccactgatgttcgccgaccgttgactattctctacaaaccacaaagacattggaacactatacctattattcggcgcatgagctggagtcctaggcacagctctaagcctccttattcgagccgagctgggccagccaggcaaccttctaggtaacgaccacatctacaacgttatcgtcacagcccatgcatttgtaataatcttcttcatagtaatacccatcataatcggaggctttggcaactgactagttcccctaataatcggtgcccccgatatggcgtttccccgcataaacaacataagcttctgactcttacctccctctctcctactcctgctcgcatctgctatagtggaggccggagcaggaacaggttgaacagtctaccctcccttagcagggaactactcccaccctggagcctccgtagacctaaccatcttctccttacacctagcaggtgtctcctctatcttaggggccatcaatttcatcacaacaattatcaatataaaaccccctgccataacccaataccaaacgcccctcttcgtctgatccgtcctaatcacagcagtcctacttctcctatctctcccagtcctagctgctggcatcactatactactaacagaccgcaacctcaacaccaccttcttcgaccccgccggaggaggagaccccattctataccaacacctattctgatttttcggtcaccctgaagtttatattcttatcctaccaggcttcggaataatctcccatattgtaacttactactccggaaaaaaagaaccatttggatacataggtatggtctgagctatgatatcaattggcttcctagggtttatcgtgtgagcacaccatatatttacagtaggaatagacgtagacacacgagcatatttcacctccgctaccataatcatcgctatccccaccggcgtcaaagtatttagctgactcgccacactccacggaagcaatatgaaatgatctgctgcagtgctctgagccctaggattcatctttcttttcaccgtaggtggcctgactggcattgtattagcaaactcatcactagacatcgtactacacgacacgtactacgttgtagctcacttccactatgtcctatcaataggagctgtatttgccatcataggaggcttcattcactgatttcccctattctcaggctacaccctagaccaaacctacgccaaaatccatttcactatcatattcatcggcgtaaatctaactttcttcccacaacactttctcggcctatccggaatgccccgacgttactcggactaccccgatgcatacaccacatgaaacatcctatcatctgtaggctcattcatttctctaacagcagtaatattaataattttcatgatttgagaagccttcgcttcgaagcgaaaagtcctaatagtagaagaaccctccataaacctggagtgactatatggatgccccccaccctaccacacattcgaagaacccgtatacataaaatctagacaaaaaaggaaggaatcgaaccccccaaagctggtttcaagccaaccccatggcctccatgactttttcaaaaaggtattagaaaaaccatttcataactttgtcaaagttaaattataggctaaatcctatatatcttaatggcacatgcagcgcaagtaggtctacaagacgctacttcccctatcatagaagagcttatcacctttcatgatcacgccctcataatcattttccttatctgcttcctagtcctgtatgcccttttcctaacactcacaacaaaactaactaatactaacatctcagacgctcaggaaatagaaaccgtctgaactatcctgcccgccatcatcctagtcctcatcgccctcccatccctacgcatcctttacataacagacgaggtcaacgatccctcccttaccatcaaatcaattggccaccaatggtactgaacctacgagtacaccgactacggcggactaatcttcaactcctacatacttcccccattattcctagaaccaggcgacctgcgactccttgacgttgacaatcgagtagtactcccgattgaagcccccattcgtataataattacatcacaagacgtcttgcactcatgagctgtccccacattaggcttaaaaacagatgcaattcccggacgtctaaaccaaaccactttcaccgctacacgaccgggggtatactacggtcaatgctctgaaatctgtggagcaaaccacagtttcatgcccatcgtcctagaattaattcccctaaaaatctttgaaatagggcccgtatttaccctatagcaccccctctaccccctctagagcccactgtaaagctaacttagcattaaccttttaagttaaagattaagagaaccaacacctctttacagtgaaatgccccaactaaatactaccgtatggcccaccataattacccccatactccttacactattcctcatcacccaactaaaaatattaaacacaaactaccacctacctccctcaccaaagcccataaaaataaaaaattataacaaaccctgagaaccaaaatgaacgaaaatctgttcgcttcattcattgcccccacaatcctaagcctacccgccgcagtactgatcattctatttccccctctattgatccccacctccaaatatctcatcaacaaccgactaatcaccacccaacaatgactaatcaaactaacctcaaaacaaataataaccatacacaacactaaaggacgaacctgatctcttatactagtatccttaatcatttttattgccacaactaacctcctcggactcctgcctcactcatttacaccaaccacccaactatctataaacctagccatggccatccccttatgagcgggcgcagtgattataggctttcgctctaagattaaaaatgccctagcccacttcttaccacaaggcacacctacaccccttatccccatactagttattatcgaaaccatcagcctactcattcaaccaatagccctggccgtacgcctaaccgctaacattactgcaggccacctactcatgcacctaattggaagcgccaccctagcaatatcaaccattaaccttccctctacacttatcatcttcacaattctaattctactgactatcctagaaatcgctgtcgccttaatccaagcctacgttttcacacttctagtaagcctctacctgcacgacaacacataatgacccaccaatcacatgcctatcatatagtaaaacccagcccatgacccctaacaggggccctctcagccctcctaatgacctccggcctagccatgtgatttcacttccactccataacgctcctcatactaggcctactaaccaacacactaaccatataccaatgatggcgcgatgtaacacgagaaagcacataccaaggccaccacacaccacctgtccaaaaaggccttcgatacgggataatcctatttattacctcagaagtttttttcttcgcaggatttttctgagccttttaccactccagcctagcccctaccccccaattaggagggcactggcccccaacaggcatcaccccgctaaatcccctagaagtcccactcctaaacacatccgtattactcgcatcaggagtatcaatcacctgagctcaccatagtctaatagaaaacaaccgaaaccaaataattcaagcactgcttattacaattttactgggtctctattttaccctcctacaagcctcagagtacttcgagtctcccttcaccatttccgacggcatctacggctcaacattttttgtagccacaggcttccacggacttcacgtcattattggctcaactttcctcactatctgcttcatccgccaactaatatttcactttacatccaaacatcactttggcttcgaagccgccgcctgatactggcattttgtagatgtggtttgactatttctgtatgtctccatctattgatgagggtcttactcttttagtataaatagtaccgttaacttccaattaactagttttgacaacattcaaaaaagagtaataaacttcgccttaattttaataatcaacaccctcctagccttactactaataattattacattttgactaccacaactcaacggctacatagaaaaatccaccccttacgagtgcggcttcgaccctatatcccccgcccgcgtccctttctccataaaattcttcttagtagctattaccttcttattatttgatctagaaattgccctccttttacccctaccatgagccctacaaacaactaacctgccactaatagttatgtcatccctcttattaatcatcatcctagccctaagtctggcctatgagtgactacaaaaaggattagactgaaccgaattggtatatagtttaaacaaaacgaatgatttcgactcattaaattatgataatcatatctaccaaatgcccctcatttacataaatattatactagcatttaccatctcacttctaggaatactagtatatcgctcacacctcatatcctccctactatgcctagaaggaataatactatcgctgttcattatagctactctcataaccctcaacacccactccctcttagccaatattgtgcctattgccatactagtctttgccgcctgcgaagcagcggtgggcctagccctactagtctcaatctccaacacatatggcctagactacgtacataacctaaacctactccaatgctaaaactaatcgtcccaacaattatattactaccactgacatgactttccaaaaaacacataatttgaatcaacacaaccacccacagcctaattattagcatcatccctctactattttttaaccaaatcaacaacaacctatttagctgttccccaaccttttcctccgaccccctaacaacccccctcctaatactaactacctgactcctacccctcacaatcatggcaagccaacgccacttatccagtgaaccactatcacgaaaaaaactctacctctctatactaatctccctacaaatctccttaattataacattcacagccacagaactaatcatattttatatcttcttcgaaaccacacttatccccaccttggctatcatcacccgatgaggcaaccagccagaacgcctgaacgcaggcacatacttcctattctacaccctagtaggctcccttcccctactcatcgcactgatttacactcacaacaccctaggctcactaaacattctactactcactctcactgcccaagaactatcaaactcctgagccaacaacttaatatgactagcttacacaatagcttttatagtaaagatacctctttacggactccacttatgactccctaaagcccatgtcgaagcccccatcgctgggtcaatagtacttgccgcagtactcttaaaactaggcggctatggtataatacgcctcacactcattctcaaccccctgacaaaacacatagcctaccccttccttgtactatccctatgaggcataattataacaagctccatctgcctacgacaaacagacctaaaatcgctcattgcatactcttcaatcagccacatagccctcgtagtaacagccattctcatccaaaccccctgaagcttcaccggcgcagtcattctcataatcgcccacggacttacatcctcattactattctgcctagcaaactcaaactacgaacgcactcacagtcgcatcataatcctctctcaaggacttcaaactctgctcccactaatagctttttgatgacttctagcaagcctcgctaacctcgccttaccccccactattaacctactgggagaactctctgtgctagtaaccacgttctcctgatcaaatatcactctcctacttacaggactcaacatactagtcacagccctatactccctctacatatttaccacaacacaatggggctcactcacccaccacattaacaacataaaaccctcattcacacgagaaaacaccctcatgttcatacacctatcccccattctcctcctatccctcaaccccgacatcattaccgggttttcctcttgtaaatatagtttaaccaaaacatcagattgtgaatctgacaacagaggcttacgaccccttatttaccgagaaagctcacaagaactgctaactcatgcccccatgtctaacaacatggctttctcaacttttaaaggataacagctatccattggtcttaggccccaaaaattttggtgcaactccaaataaaagtaataaccatgcacactactataaccaccctaaccctgacttccctaattccccccatccttaccaccctcgttaaccctaacaaaaaaaactcatacccccattatgtaaaatccattgtcgcatccacctttattatcagtctcttccccacaacaatattcatgtgcctagaccaagaagttattatctcgaactgacactgagccacaacccaaacaacccagctctccctaagcttcaaactagactacttctccataatattcatccctgtagcattgttcgttacatggtccatcatagaattctcactgtgatatataaactcagacccaaacattaatcagttcttcaaatatctactcatcttcctaattaccatactaatcttagttaccgctaacaacctattccaactgttcatcggctgagagggcgtaggaattatatccttcttgctcatcagttgatgatacgcccgagcagatgccaacacagcagccattcaagcaatcctatacaaccgtatcggcgatatcggtttcatcctcgccttagcatgatttatcctacactccaactcatgagacccacaacaaatagcccttctaaacgctaatccaagcctcaccccactactaggcctcctcctagcagcagcaggcaaatcagcccaattaggtctccacccctgactcccctcagccatagaaggccccaccccagtctcagccctactccactcaagcactatagttgtagcaggaatcttcttactcatccgcttccaccccctagcagaaaatagcccactaatccaaactctaacactatgcttaggcgctatcaccactctgttcgcagcagtctgcgcccttacacaaaatgacatcaaaaaaatcgtagccttctccacttcaagtcaactaggactcataatagttacaatcggcatcaaccaaccacacctagcattcctgcacatctgtacccacgccttcttcaaagccatactatttatgtgctccggatccatcatccacaaccttaacaatgaacaagatattcgaaaaataggaggactactcaaaaccatacctctcacttcaacctccctcaccattggcagcctagcattagcaggaatacctttcctcacaggtttctactccaaagaccacatcatcgaaaccgcaaacatatcatacacaaacgcctgagccctatctattactctcatcgctacctccctgacaagcgcctatagcactcgaataattcttctcaccctaacaggtcaacctcgcttccccacccttactaacattaacgaaaataaccccaccctactaaaccccattaaacgcctggcagccggaagcctattcgcaggatttctcattactaacaacatttcccccgcatcccccttccaaacaacaatccccctctacctaaaactcacagccctcgctgtcactttcctaggacttctaacagccctagacctcaactacctaaccaacaaacttaaaataaaatccccactatgcacattttatttctccaacatactcggattctaccctagcatcacacaccgcacaatcccctatctaggccttcttacgagccaaaacctgcccctactcctcctagacctaacctgactagaaaagctattacctaaaacaatttcacagcaccaaatctccacctccatcatcacctcaacccaaaaaggcataattaaactttacttcctctctttcttcttcccactcatcctaaccctactcctaatcacataacctattcccccgagcaatctcaattacaatatatacaccaacaaacaatgttcaaccagtaactactactaatcaacgcccatagtcatacaaagcccccgcaccaataggatcctcccgaatcaaccctgacccctctccttcataaattattcagcttcctacactattaaagtttaccacaaccaccaccccatcatactctttcacccacagcaccaatcctacctccatcgctaaccccactaaaacactcaccaagacctcaacccctgacccccatgcctcaggatactcctcaatagccatcgctgtagtatatccaaagacaaccatcattccccctaaataaattaaaaaaactattaaacccatataacctcccccaaaattcagaataataacacacccgaccacaccgctaacaatcaatactaaacccccataaataggagaaggcttagaagaaaaccccacaaaccccattactaaacccacactcaacagaaacaaagcatacatcattattctcgcacggactacaaccacgaccaatgatatgaaaaaccatcgttgtatttcaactacaagaacaccaatgaccccaatacgcaaaattaaccccctaataaaattaattaaccactcattcatcgacctccccaccccatccaacatctccgcatgatgaaacttcggctcactccttggcgcctgcctgatcctccaaatcaccacaggactattcctagccatacactactcaccagacgcctcaaccgccttttcatcaatcgcccacatcactcgagacgtaaattatggctgaatcatccgctaccttcacgccaatggcgcctcaatattctttatctgcctcttcctacacatcgggcgaggcctatattacggatcatttctctactcagaaacctgaaacatcggcattatcctcctgcttgcaactatagcaacagccttcataggctatgtcctcccgtgaggccaaatatcattctgaggggccacagtaattacaaacttactatccgccatcccatacattgggacagacctagttcaatgaatctgaggaggctactcagtagacagtcccaccctcacacgattctttacctttcacttcatcttgcccttcattattgcagccctagcagcactccacctcctattcttgcacgaaacgggatcaaacaaccccctaggaatcacctcccattccgataaaatcaccttccacccttactacacaatcaaagacgccctcggcttacttctcttcattctctccttaatgacattaacactattctcaccagacctcctaggcgacccagacaattataccctagccaaccccttaaacacccctccccacatcaagcccgaatgatatttcctattcgcctacacaattctccgatccgtccctaacaagctaggaggcgtccttgccctattactatccatcctcatcctagcaataatccccatcctccatatatccaaacaacaaagcataatatttcgcccactaagccaatcactttattgactcctagccgcagacctcctcattctaacctgaatcggaggacaaccagtaagctacccttttaccatcattggacaagtagcatccgtactatacttcacaacaatcctaatcctaataccaactatctccctaattgaaaacaaaatactcaaatgggcctgtccttgtagtataaactaatacaccagtcttgtaaaccgaagatgaaaacctttttccaaggacaaatcagagaaaaagtctttaactccaccattagcacccaaagctaagattctaatttaaactattctctgttctttcatggggaagcagatttgggtaccacccaagtattgactcacccatcaacaaccgctatgtatttcgtacattactgccagccaccatgaatattgcacggtaccataaatacttgaccacctgtagtacataaaaacccaatccacatcaaaaccccctccccatgcttacaagcaagtacagcaatcaaccctcaactatcacacatcaactgcaactccaaagccacccctcacccactaggataccaacaaacctacccatctttaacagcacatagtacataaagccatttaccgtacatagcacattacagtcaaatcccttctcgtccccatggatgacccccctcagataggggtcccttgaccaccatcctccgtgaaatcaatatcccgcacaagagtgctactctcctcgctccgggcccataacacttgggggtagctaaagtgaactgtatccgacatctggttcctacttcagggccataaagcctaaatagcccacacgttccccttaaataagacatcacgatg

SEQ ID NO: 294 - DNA, 16568 bp, Homo sapiens mitochondrial
  3106: "n" refers to a nucleotide at position 3107 of the Cambridge Reference Sequence (CRS, Anderson et al. 1981 Nature 290:457-465), later determined to be absent from the human mtDNA sequence according to the revised CRS (rCRS, Andrews et al. 1999 Nature Genetics 23:147); "n" therefore represents a single nucleotide deletion at a position corresponding to nucleotide 3107 of SEQ ID NO:1 as provided herein.
gatcacaggtctatcaccctattaaccactcacgggagctctccatgcatttggtattttcgtctggggggtgtgcacgcgatagcattgcgagacgctggagccggagcaccctatgtcgcagtatctgtctttgattcctgcctcatcccattatttatcgcacctacgttcaatattatagtcgaacatacctactaaagtgtgttaattaattaatgcttgtaggacataataataacaattaaatgtctgcacagccgctttccacacagacatcataacaaaaaatttccaccaaaccccccctcccccgccttctggccacagcacttaaacacatctctgccaaaccccgaaaacaaagaaccctaacaccagcctaaccagatttcaaattttatcttttggcggtatgcacttttaacagtcaccccccaactaacacattattttcccctcccactcccatactactaatctcatcaatacaacccccgcccatcctacccagcacacacaccgctgctaaccccataccccgaaccaaccaaaccccaaagacaccccccacagtttatgtagcttacctcctcaaagcaatacactgaaaatgtttagacgggctcacatcaccccataaacaaataggtttggtcctagcctttctattagctcttagtaagattacacatgcaagcatccccactccagtgagttcaccctctaaatcaccacgatcaaaagggacaagcatcaagcacgcaacaatgcagctcaaaacgcttagcctagccacacccccacgggaaacagcagtgataaacctttagcaataaacgaaagtttaactaagctatactaaccccagggttggtcaatttcgtgccagccaccgcggtcacacgattaacccaagtcaatagaagccggcgtaaagagtgttttagatcaccccctccccaataaagctaaaactcacctgagttgtaaaaaactccagttgacacaaaataaactacgaaagtggctttaacatatctgaacacacaatagctaagacccaaactgggattagataccccactatgcttagccctaaacctcaacagttaaatcaacaaaactgctcgccagaacactacgagccacagcttaaaactcaaaggacctggcggtgcttcatatccctctagaggagcctgttctgtaatcgataaaccccgatcaacctcaccacctcttgctcagcctatataccgccatcttcagcaaaccctgatgaaggctacaaagtaagcgcaagtacccacgtaaagacgttaggtcaaggtgtagcccatgaggtggcaagaaatgggctacattttctaccccagaaaactacgatagcccttatgaaacttaagggtcgaaggtggatttagcagtaaactaagagtagagtgcttagttgaacagggccctgaagcgcgtacacaccgcccgtcaccctcctcaagtatacttcaaaggacatttaactaaaacccctacgcatttatatagaggagacaagtcgtaacatggtaagtgtactggaaagtgcacttggacgaaccagagtgtagcttaacacaaagcacccaacttacacttaggagatttcaacttaacttgaccgctctgagctaaacctagccccaaacccactccaccttactaccagacaaccttagccaaaccatttacccaaacaaagtataggcgatagaaattgaaacctggcgcaatagatatagtaccgcaagggaaagatgaaaaattataaccaagcataatatagcaaggactaacccctataccttctgcataatgaattaactagaaataactttgcaaggagagccaaagctaagacccccgaaaccagacgagctacctaagaacagctaaaagagcacacccgtctatgtagcaaaatagtgggaagatttataggtagaggcgacaaacctaccgagcctggtgatagctggttgtccaagatagaatcttagttcaactttaaatttgcccacagaaccctctaaatccccttgtaaatttaactgttagtccaaagaggaacagctctttggacactaggaaaaaaccttgtagagagagtaaaaaatttaacacccatagtaggcctaaaagcagccaccaattaagaaagcgttcaagctcaacacccactacctaaaaaatcccaaacatataactgaactcctcacacccaattggaccaatctatcaccctatagaagaactaatgttagtataagtaacatgaaaacattctcctccgcataagcctgcgtcagatcaaaacactgaactgacaattaacagcccaatatctacaatcaaccaacaagtcattattaccctcactgtcaacccaacacaggcatgctcataaggaaaggttaaaaaaagtaaaaggaactcggcaaatcttaccccgcctgtttaccaaaaacatcacctctagcatcaccagtattagaggcaccgcctgcccagtgacacatgtttaacggccgcggtaccctaaccgtgcaaaggtagcataatcacttgttccttaaatagggacctgtatgaatggctccacgagggttcagctgtctcttacttttaaccagtgaaattgacctgcccgtgaagaggcgggcatgacacagcaagacgagaagaccctatggagctttaatttattaatgcaaacaatacctaacagacccacaggtcctaaactaccaaacctgcattaaaaatttcggttggggcgacctcggagcagaacccaacctccgagcagtacatgctaagacttcaccagtcaaagcgaactaccatactcaattgatccaataacttgaccaacggaacaagttaccctagggataacagcgcaatcctattctagagtccatatcaacaatagggtttacgacctcgatgttggatcaggacatcccgatggtgcagccgctattaaaggttcgtttgttcaacgattaaagtcctacgtgatctgagttcagaccggagtaatccaggtcggtttctatctacnttcaaattcctccctgtacgaaaggacaagagaaataaggcctacttcacaaagcgccttcccccgtaaatgatatcatctcaacttagtattatacccacacccacccaagaacagggtttgttaagatggcagagcccggtaatcgcataaaacttaaaactttacagtcagaggttcaattcctcttcttaacaacacacccatggccaacctcctactcctcattgtacccattctaatcgcaatggcattcctaatgcttaccgaacgaaaaattctaggctatatacaactacgcaaaggccccaacgttgtaggcccctacgggctactacaacccttcgctgacgccataaaactcttcaccaaagagcccctaaaacccgccacatctaccatcaccctctacatcaccgccccgaccttagctctcaccatcgctcttctactatgaacccccctccccatacccaaccccctggttaacctcaacctaggcctcctatttattctagccacctctagcctagccgtttactcaatcctctgatcaggatgagcatcaaactcaaactacgccctaatcggcgcactgcgagcagtagcccaaacaatctcatatgaagtcaccctagccatcattctactatcaacattactaataagtggctcctttaacctctccacccttatcacaacacaagaacacctctgattactcctgccatcatgacccttggccataatatgatttatctccacactagcagagaccaaccgaacccccttcgaccttgccgaaggggagtccgaactagtctcaggcttcaacatcgaatacgccgcaggccccttcgccctattcttcatagccgaatacacaaacattattataataaacaccctcaccactacaatcttcctaggaacaacatatgacgcactctcccctgaactctacacaacatattttgtcaccaagaccctacttctgacctccctgttcttatgaattcgaacagcatacccccgattccgctacgaccaactcatacacctcctatgaaaaaacttcctaccactcaccctagcattacttatatgatatgtctccatacccattacaatctccagcattccccctcaaacctaagaaatatgtctgataaaagagttactttgatagagtaaataataggagcttaaacccccttatttctaggactatgagaatcgaacccatccctgagaatccaaaattctccgtgccacctatcacaccccatcctaaagtaaggtcagctaaataagctatcgggcccataccccgaaaatgttggttatacccttcccgtactaattaatcccctggcccaacccgtcatctactctaccatctttgcaggcacactcatcacagcgctaagctcgcactgattttttacctgagtaggcctagaaataaacatgctagcttttattccagttctaaccaaaaaaataaaccctcgttccacagaagctgccatcaagtatttcctcacgcaagcaaccgcatccataatccttctaatagctatcctcttcaacaatatactctccggacaatgaaccataaccaatactaccaatcaatactcatcattaataatcataatggctatagcaataaaactaggaatagccccctttcacttctgagtcccagaggttacccaaggcacccctctgacatccggcctgcttcttctcacatgacaaaaactagcccccatctcaatcatataccaaatctctccctcactaaacgtaagccttctcctcactctctcaatcttatccatcatagcaggcagttgaggtggattaaaccaaacccagctacgcaaaatcttagcatactcctcaattacccacataggatggataatagcaattctaccgtacaaccctaacataaccattcttaatttaactatttatattatcctaactactaccgcattcctactactcaacttaaactccagcaccacgaccctactactatctcgcacctgaaacaagctaacatgactaacacccttaattccatccaccctcctctccctaggaggcctgcccccgctaaccggctttttgcccaaatgggccattatcgaagaattcacaaaaaacaatagcctcatcatccccaccatcatagccaccatcaccctccttaacctctacttctacctacgcctaatctactccacctcaatcacactactccccatatccaacaacgtaaaaataaaatgacagtttgaacatacaaaacccaccccattcctccccacactcatcgcccttaccacgctactcctacctatctccccttttatactaataatcttatagaaatttaggttaaatacagaccaagagccttcaaagccctcagtaagttgcaatacttaatttctgtaacagctaaggactgcaaaaccccactctgcatcaactgaacgcaaatcagccactttaattaagctaagccctcactagaccaatgggacttaaacccacaaacacttagttaacagctaagcaccctaatcaactggcttcaatctacttctcccgccgccgggaaaaaaggcgggagaagccccggcaggtttgaagctgcttcttcgaatttgcaattcaatatgaaaatcacctcggagctggtaaaaagaggcctaacccctgtctttagatttacagtccaatgcttcactcagccattttacctcacccccactgatgttcgccgaccgttgactattctctacaaaccacaaagacattggaacactatacctattattcggcgcatgagctggagtcctaggcacagctctaagcctccttattcgagccgagctgggccagccaggcaaccttctaggtaacgaccacatctacaacgttatcgtcacagcccatgcatttgtaataatcttcttcatagtaatacccatcataatcggaggctttggcaactgactagttcccctaataatcggtgcccccgatatggcgtttccccgcataaacaacataagcttctgactcttacctccctctctcctactcctgctcgcatctgctatagtggaggccggagcaggaacaggttgaacagtctaccctcccttagcagggaactactcccaccctggagcctccgtagacctaaccatcttctccttacacctagcaggtgtctcctctatcttaggggccatcaatttcatcacaacaattatcaatataaaaccccctgccataacccaataccaaacgcccctcttcgtctgatccgtcctaatcacagcagtcctacttctcctatctctcccagtcctagctgctggcatcactatactactaacagaccgcaaccttaacaccaccttcttcgaccccgccggaggaggagaccccattctataccaacacctattctgatttttcggtcaccctgaagtttatattcttatcctaccaggcttcggaataatctcccatattgtaacttactactccggaaaaaaagaaccatttggatacataggtatggtctgagctatgatatcaattggcttcctagggtttatcgtgtgagcacaccatatatttacagtaggaatagacgtagacacacgagcatatttcacctccgccaccataatcatcgctatccccaccggcgtcaaagtatttagctgactcgccacactccacggaagcaatatgaaatgatctgctgcagtgctctgagccctaggattcatctttcttttcaccgtaggtggcctgactggcattgtattagcaaactcatcgctagacatcgtactacacgacacgtactacgttgtagctcacttccactatgtcctatcaataggggctgtatttgccatcataggaggcttcattcactgatttcccctattctcaggctacaccctagaccaaacctacgccaaaatccatttcgctatcatattcatcggcgtaaatctaactttcttcccacaacactttctcggcctatccggaatgccccgacgttactcggactaccccgatgcatacaccacatgaaatatcctatcatctgtaggctcattcatttctctaacagcagtaatattaataattttcatgatttgagaagccttcgcttcgaagcgaaaagtcctaatagtagaagaaccctccataaacctggagtgactacatggatgccccccaccctaccacacattcgaagaacccgtatacataaaatctagacaaaaaaggaaggaatcgaaccccccaaagctggtttcaagccaaccccatggcctccatgactttttcaaaaagatattagaaaaaccatttcataactttgtcaaagttaaattataggctaaatcctatatatcttaatggcacatgcagcgcaagtaggtctacaagacgctacttcccctatcatagaagagcttatcacctttcatgatcacgccctcataatcattttccttatctgcttcctagtcctgtatgcccttttcctaacactcacaacaaaactaactaatactaacatctcagacgctcaggaaatagaaaccgtctgaactatcctgcccgccatcatcctagtcctcatcgccctcccatccctacgcatcctttacataacagacgaggtcaacgatccctctcttaccatcaaatcaattggccaccaatggtactgaacctacgagtacaccgactacggcggactaatcttcaactcctacatacttcccccattattcctagaaccaggcgacctgcgactccttgacgttgacaatcgagtagtactcccgattgaagcccccattcgtataataattacatcacaagacgtcttgcactcatgagctgtccccacattaggcttaaaaacagatgcaattcccggacgtctaaaccaaaccactttcaccgctacacgaccgggggtatactacggtcaatgctctgaaatctgtggagcaaaccacagtttcatgcccatcgtcctagaattaattcccctaaaaatctttgaaatggggcccgtatttaccctatagcaccccctctaccccctctagagcccactgtaaagctaacttagcattaaccttttaagttaaagattaagagaaccaacacctctttacagtgaaatgccccaactaaatactaccgtatggcccaccataattacccccatactccttacactattcctcatcacccaactaaaaatattaaacacaaactaccacttacctccctcaccaaagcccataaaaataaaaaattataacaaaccctgagaaccaaaatgaacgaaaatctgttcgcttcattcattgcccccacaatcctaggcctacccgccgcagtactgatcattctatttccccctctattgatccccacctccaaatatctcatcaacaaccgactaattaccacccaacaatgactaatcaaactaacctcaaaacaaatgatagccatacacaacactaaaggacgaacctgatctcttatactagtatccttaatcatttttattgccacaactaacctcctcggactcctgcctcactcatttacaccaaccacccaactatctataaacctagccatggccatccccttatgagcgggcgcagtgattataggctttcgctctaagattaaaaatgccctagcccacttcttaccacaaggcacacctacaccccttatccccatactagttattatcgaaaccatcagcctactcattcaaccaatagccctggccgtacgcctaaccgctaacattactgcaggccacctactcatgcacctaattggaagcgccaccctagcaatatcaaccattaaccttccctctacacttatcatcttcacaattctaattctactgactatcctagaaatcgctgtcgccttaatccaagcctacgttttcacacttctagtaagcctctacctgcacgacaacacataatgacccaccaatcacatgcctatcatatagtaaaacccagcccatgacccctaacaggggccctctcagccctcctaatgacctccggcctagccatgtgatttcacttccactccataacgctcctcatactaggcctactaaccaacacactaaccatataccaatgatggcgcgatgtaacacgagaaagcacataccaaggccaccacacaccacctgtccaaaaaggccttcgatacgggataatcctatttattacctcagaagtttttttcttcgcaggatttttctgagccttttaccactccagcctagcccctaccccccaactaggagggcactggcccccaacaggcatcaccccgctaaatcccctagaagtcccactcctaaacacatccgtattactcgcatcaggagtatcaatcacctgagctcaccatagtctaatagaaaacaaccgaaaccaaataattcaagcactgcttattacaattttactgggtctctattttaccctcctacaagcctcagagtacttcgagtctcccttcaccatttccgacggcatctacggctcaacattttttgtagccacaggcttccacggacttcacgtcattattggctcaactttcctcactatctgcttcatccgccaactaatatttcactttacatccaaacatcactttggcttcgaagccgccgcctgatactggcattttgtagatgtggtttgactatttctgtatgtctccatctattgatgagggtcttactcttttagtataaatagtaccgttaacttccaattaactagttttgacaacattcaaaaaagagtaataaacttcgccttaattttaataatcaacaccctcctagccttactactaataattattacattttgactaccacaactcaacggctacatagaaaaatccaccccttacgagtgcggcttcgaccctatatcccccgcccgcgtccctttctccataaaattcttcttagtagctattaccttcttattatttgatctagaaattgccctccttttacccctaccatgagccctacaaacaactaacctgccactaatagttatgtcatccctcttattaatcatcatcctagccctaagtctggcctatgagtgactacaaaaaggattagactgagccgaattggtatatagtttaaacaaaacgaatgatttcgactcattaaattatgataatcatatttaccaaatgcccctcatttacataaatattatactagcatttaccatctcacttctaggaatactagtatatcgctcacacctcatatcctccctactatgcctagaaggaataatactatcgctgttcattatagctactctcataaccctcaacacccactccctcttagccaatattgtgcctattgccatactagtctttgccgcctgcgaagcagcggtaggcctagccctactagtctcaatctccaacacatatggcctagactacgtacataacctaaacctactccaatgctaaaactaatcgtcccaacaattatattactaccactgacatgactctccaaaaaacacataatttgaatcaacacaaccacccacagcctaattattagcatcatccccctactattttttaaccaaatcaacaacaacctatttagctgttccccaaccttttcctccgaccccctaacaacccccctcctaatactaactacctgactcctacccctcacaatcatggcaagccaacgccacttatccagtgaaccactatcacgaaaaaaactctacctctctatactaatctccctacaaatctccttaattataacattcacagccacagaactaatcatattttatatcttcttcgaaaccacacttatccccaccttggctatcatcacccgatgaggcaaccagccagaacgcctgaacgcaggcacatacttcctattctacaccctagtaggctcccttcccctactcatcgcactaatttacactcacaacaccctaggctcactaaacattctactactcactctcactgcccaagaactatcaaactcctgagccaacaacttaatatgactagcttacacaatagcttttatagtaaagatacctctttacggactccacttatgactccctaaagcccatgtcgaagcccccatcgctgggtcaatagtacttgccgcagtactcttaaaactaggcggctatggtataatacgcctcacactcattctcaaccccctgacaaaacacatagcctaccccttccttgtactatccctatgaggcataattataacaagctccatctgcctacgacaaacagacctaaaatcgctcattgcatactcttcaatcagccacatagccctcgtagtaacagccattctcatccaaaccccctgaagcttcaccggcgcagtcattctcataatcgcccacggacttacatcctcattactattctgcctagcaaactcaaactacgaacgcactcacagtcgcatcataatcctctctcaaggacttcaaactctactcccactaatagctttttgatgacttctagcaagcctcgctaacctcgccttaccccccactattaacctactgggagaactctctgtgctagtaaccacgttctcctgatcaaatatcactctcctacttacaggactcaacatactagtcacagccctatactccctctacatatttaccacaacacaatggggctcactcacccaccacattaacaacataaaaccctcattcacacgagaaaacaccctcatgttcatacacctatcccccattctcctcctatccctcaaccccgacatcattaccgggttttcctcttgtaaatatagtttaaccaaaacatcagattgtgaatctgacaacagaggcttacgaccccttatttaccgagaaagctcacaagaactgctaactcatgcccccatgtctaacaacatggctttctcaacttttaaaggataacagctatccattggtcttaggccccaaaaattttggtgcaactccaaataaaagtaataaccatgcacactactataaccaccctaaccctgacttccctaattccccccatccttaccaccctcgttaaccctaacaaaaaaaactcatacccccattatgtaaaatccattgtcgcatccacctttattatcagtctcttccccacaacaatattcatgtgcctagaccaagaagtcattatctcgaactgacactgagccacaacccaaacaacccagctctccctaagcttcaaactagactacttctccataatattcatccctgtagcattgttcgttacatggtccatcatagaattctcactgtgatatataaactcagacccaaacattaatcagttcttcaaatatctactcattttcctaattaccatactaatcttagttaccgctaacaacctattccaactgttcatcggctgagagggcgtaggaattatatccttcttgctcatcagttgatgatacgcccgagcagatgccaacacagcagccattcaagcaatcctatacaaccgtatcggcgatatcggtttcatcctcgccttagcatgatttatcctacactccaactcatgagacccacaacaaatagcccttctaaacgctaatccaagcctcaccccactactaggcctcctcctagcagcagcaggcaaatcagcccaattaggtctccacccctgactcccctcagccatagaaggccccaccccagtctcagccctactccactcaagcactatagttgtagcaggagtcttcttactcatccgcttccaccccctagcagaaaatagcccactaatccaaactctaacactatgcttaggcgctatcaccactctgttcgcagcagtctgcgcccttacacaaaatgacatcaaaaaaatcgtagccttctccacttcaagtcaactaggactcataatagttacaatcggcatcaaccaaccacacctagcattcctgcacatctgtacccacgccttcttcaaagccatactatttatgtgctccgggtccatcatccacaaccttaacaatgaacaagatattcgaaaaataggaggactactcaaaaccatacctctcacttcaacctccctcaccattggcagcctagcattagcaggaatacctttcctcacaggtttctattccaaagaccacatcatcgaaaccgcaaacatatcatacacaaacgcctgagccctatctattactctcatcgctacctccctgacaagcgcctatagcactcgaataattcttctcaccctaacaggtcaacctcgcttccctacccttactaacattaacgaaaataaccccaccctactaaaccccattaaacgcctggcagccggaagcctattcgcaggatttctcattactaacaacatttcccccgcatcccccttccaaacaacaacccccctccacctaaaactcacagccctcgctgtcactttcctaggacttctaacagccctagacctcaactacctaaccaacaaacttaaaataaaatacccactatgcacattttatttctccaacatactcggattctaccctagcatcacacaccgcacaatcccctatctaggccttcttacgagccaaaacctgcccctactcctcctagacctaacctgactagaaaagctattacctaaaacaatttcacagcaccaaatctccacctccatcatcacctcaacccaaaaaggcataattaaactttacttcctctctttcttcttcccactcatcctaaccctactcctaatcacataacctattcccccgagcaatctcaattacaacatatacaccaacaaacaatgttcagccagtaactactactaatcaacgcccataatcatacaaagcccccgcaccaataggatcctcccgaatcaaccctgacccctctccttcataaattattcagcttcctacactattaaagtttaccacaaccaccaccccatcatactctttcacccacagcaccaatcctacctccatcgctaaccccactaaaacactcaccaagacctcaacccctgacccccatgcctcaggatactcctcaatagccatcgctgtagtatatccaaagacaaccatcattccccctaaataaattaaaaaaactattaaacccatataacctcccccaaaattcagaataataacacacccaaccacaccgctaacaatcaatactaaacccccataaataggagaaggcttagaagaaaaccccacaaaccccattactaaacccacactcaacagaaacaaagcatacatcattattctcgcacggactacaaccacgaccaatgatatgaaaaaccatcgttgtatttcaactacaagaacaccaatgaccccaatacgcaaaattagccccctaataaaattaattaaccactcattcatcgacctccccaccccatccaacatctccgcatgatgaaacttcggctcactccttggcgcctgcctgatcctccaaatcaccacaggactattcctagccatgcactactcaccagacgcctcaaccgccttttcatcaatcgcccacatcactcgagacgtaaattatggctgaatcatccgctaccttcacgccaatggcgcctcaatattctttatctgcctcttcctacacatcgggcgaggcctatattacggatcatttctctactcagaaacctgaaacatcggcattatcctcctgcttgcaaccatagcaacagccttcataggctatgtcctcccgtgaggccaaatatcattctgaggggccacagtaattacaaacttactatccgccatcccatacattgggacagacctagttcaatgaatctgaggaggctactcagtagacagtcccaccctcacacgattctttacctttcacttcatcttgcccttcattattgcagccctagcagcactccacctcctattcttgcacgaaacgggatcaaacaaccccctaggaatcacctcccattccgataaaatcaccttccacccttactacacaatcaaagacgccctcggcttacttctcttccttctctccttaatgacattaacactattctcaccagacctcctaggcgacccagacaattataccctagccaaccccttaaacacccctccccacatcaagcccgaatgatatttcctattcgcctacacaattctccgatccgtccctaacaaactaggaggcgtccttgccctattactatccatcctcatcctagcaataatccccatcctccatatatccaaacaacaaagcataatatttcgcccactaagccaatcactttattgactcctagccgcagacctcctcattctaacctgaatcggaggacaaccagtaagctacccttttaccatcattggacaagtagcatccgtactatacttcacaacaatcctaatcctaataccaactatctccctaattgaaaacaaaatactcaaatgggcctgtccttgtagtataaactaatacaccagtcttgtaaaccggagatgaaaacctttttccaaggacaaatcagagaaaaagtctttaactccaccattagcacccaaagctaagattctaatttaaactattctctgttctttcatggggaagcagatttgggtaccacccaagtattgactcacccatcaacaaccgctatgtatttcgtacattactgccagccaccatgaatattgcacggtaccataaatacttgaccacctgtagtacataaaaacccaatccacatcaaaaccctccccccatgcttacaagcaagtacagcaatcaaccttcaactatcacacatcaactgcaactccaaagccaccccttacccactaggatatcaacaaacctacccacccttaacagtacatagcacataaagccatttaccgtacatagcacattacagtcaaatcccttctcgtccccatggatgacccccctcagataggggtcccttgaccaccatcctccgtgaaatcaatatcccgcacaagagtgctactctcctcgctccgggcccataacacttgggggtagctaaagtgaactgtatccgacatctggttcctacttcagggtcataaagcctaaatagcccacacgttccccttaaataagacatcacgatg

SEQ ID NO: 295 - DNA, 16571 bp, Homo sapiens mitochondrial
  3109: "n" refers to a nucleotide at position 3107 of the Cambridge Reference Sequence (CRS, Anderson et al. 1981 Nature 290:457-465), later determined to be absent from the human mtDNA sequence according to the revised CRS (rCRS, Andrews et al. 1999 Nature Genetics 23:147); "n" therefore represents a single nucleotide deletion at a position corresponding to nucleotide 3107 of SEQ ID NO:1 as provided herein.
gatcacaggtctatcaccctattaaccactcacgggagctctccatgcatttggtattttcgtctggggggtgtgcacgcgatagcattgcgagacgctggagccggagcaccctatgtcgcagtatctgtctttgattcctgcctcatcctattatttatcgcacctacgttcaatattacagacgaacatacttactaaagtgtgttaattaattaatgcttgtaagacataataataacaattgaatgtctgcacagccgctttccacacagacatcataacaaaaaattttcaccaaaccccccctcccccgccttctggccacagcacttaaacacatctctgccaaaccccaaaaacaaagaaccctaacaccagcctaaccagatttcaaattttatcttttggcggtatgcacttttaacagtcaccccccaactaacacattattttcccctctcactcccatactactaatctcatcaacacaacccccgcccatcctacccagcacacacacaccacgctgctaaccccataccccgaaccaaccaaaccccaaagacaccccccacagtttatgtagcttacctcctcaaagcaatacactgaaaatgtttagacgggctcacatcaccccataaacaaataggtttggtcctagcctttctattagctcttagtaagattacacatgcaagcatccccgttccagtgagttcaccctctaaatcaccacgatcaaaagggacaagcatcaagcacgcagcaatgcagctcaaaacgcttagcctagccacacccccacgggaaacagcagtgattaacctttagcaataaacgaaagtttaactaagctatactaaccccagggttggtcaatttcgtgccagccaccgcggtcacacgattaacccaagtcaatagaagccggcgtaaagagtgttttagatcacccctccccaataaagctaaaactcacctgagttgtaaaaaactccagttgacacaaaatagactacgaaagtggctttaacatatctgaacacacaatagctaagacccaaactgggattagataccccactatgcttagccctaaacctcaacagttaaatcaacaaaactgctcgccagaacactacgagccacagcttaaaactcaaaggacctggcggtgcttcatatccctctagaggagcctgttctgtaatcgataaaccccgatcaacctcaccacctcttgctcagcctatataccgccatcttcagcaaaccctgatgaaggctacaaagtaagcgcaagtacccacgtaaagacgttaggtcaaggtgtagcccatgaggtggcaagaaatgggctacattttctaccccagaaaactacgatagcccttatgaaacttaagggtcgaaggtggatttagcagtaaactgagagtagagtgcttagttgaacagggccctgaagcgcgtacacaccgcccgtcaccctcctcaagtatacttcaaaggacatttaactaaaacccctacgcatttatatagaggagacaagtcgtaacatggtaagtgtactggaaagtgcacttggacgaaccagagtgtagcttaacacaaagcacccaacttacacttaggagatttcaacttaacttgaccgctctgagctaaacctagccccaaacccactccaccttactaccagacaaccttagccaaaccatttacccaaataaagtataggcgatagaaattgaaacctggcgcaatagatatagtaccgcaagggaaagatgaaaaattataaccaagcataatatagcaaggactaacccctataccttctgcataatgaattaactagaaataactttgcaaggagagccaaagctaagacccccgaaaccagacgagctacctaagaacagctaaaagagcacacccgtctatgtagcaaaatagtgggaagatttataggtagaggcgacaaacctaccgagcctggtgatagctggttgtccaagatagaatcttagttcaactttaaatttgcccacagaaccctctaaatccccttgtaaatttaactgttagtccaaagaggaacagctctttggacactaggaaaaaaccttgtagagagagtaaaaaatttaacacccatagtaggcctaaaagcagccaccaattaagaaagcgttcaagctcaacacccactacctaaaaaatcccaaacatataactgaactcctcacacccaattggaccaatctatcaccctatagaagaactaatgttagtataagtaacatgaaaacattctcctccgcataagcctgcgtcagattaaaacactgaactgacaattaacagcccaatatctacaatcaaccaacaagtcattattaccctcactgtcaacccaacacaggcatgctcataaggaaaggttaaaaaaagtaaaaggaactcggcaaatcttaccccgcctgtttaccaaaaacatcacctctagcatcaccagtattagaggcaccgcctgcccagtgacacatgtttaacggccgcggtaccctaaccgtgcaaaggtagcataatcacttgttccttaaatagggacctgtatgaatggctccacgagggttcagctgtctcttacttttaaccagtgaaattgacctgcccgtgaagaggcgggcatgacacagcaagacgagaagaccctatggagctttaatttattaatgcaaacagtacctaacaaacccacaggtcctaaactaccaaacctgcattaaaaatttcggttggggcgacctcggagcagaacccaacctccgagcagtacatgctaagacttcaccagtcaaagcgaactactatactcaattgatccaataacttgaccaacggaacaagttaccctagggataacagcgcaatcctattctagagtccatatcaacaatagggtttacgacctcgatgttggatcaggacatcccaatggtgcagccgctattaaaggttcgtttgttcaacgattaaagtcctacgtgatctgagttcagaccggagtaatccaggtcggtttctatctacnttcaaattcctccctgtacgaaaggacaagagaaataaggcctacttcacaaagcgccttcccccgtaaatgatatcatctcaacttagtattatacccacacccacccaagaacagggtttgttaagatggcagagcccggtaatcgcataaaacttaaaactttacagtcagaggttcaattcctcttcttaacaacatacccatggccaacctcctactcctcattgtacccattctaatcgcaatggcattcctaatgcttaccgaacgaaaaattctaggctatatacaactacgcaaaggccccaacgttgtaggcccctacgggctactacaacccttcgctgacgccataaaactcttcaccaaagagcccctaaaacccgccacatctaccatcaccctctacatcaccgccccgaccttagctctcaccatcgctcttctactatgaacccccctccccatacccaaccccctggtcaacctcaacctaggcctcctatttattctagccacctctagcctagccgtttactcaatcctctgatcagggtgagcatcaaactcaaactacgccctgatcggcgcactgcgagcagtagcccaaacaatctcatatgaagtcaccctagccatcattctactatcaacattactaataagtggctcctttaacctctccacccttatcacaacacaagaacacctctgattactcctgccatcatgacccttggccataatatgatttatctccacactagcagagaccaaccgaacccccttcgaccttgccgaaggggagtccgaactagtctcaggcttcaacatcgaatacgccgcaggccccttcgccctattcttcatagccgaatacacaaacattattataataaacaccctcaccactacaatcttcctaggaacaacatatgacgcactctcccctgaactctacacaacatattttgtcaccaagaccctacttctaacctccctgttcttatgaattcgaacagcatacccccgattccgctacgaccaactcatacacctcctatgaaaaaacttcctaccactcaccctagcattacttatatgacatgtctccatacccattacaatctccagcattccccctcaaacctaagaaatatgtctgataaaagagttactttgatagagtaaataataggagcttaaacccccttatttctaggactatgagaatcgaacccatccctgagaatccaaaattctccgtgccacctatcacaccccatcctaaagtaaggtcagctaaataagctatcgggcccataccccgaaaatgttggttatacccttcccgtactaattaatcccctggcccaacccgtcatctactctaccatctttgcaggcacactcatcacagcgctaagctcgcactgattttttacctgagtaggcctagaaataaacatgctagcttttattccagttctaaccaaaaaaataaaccctcgttccacagaagctgccatcaagtatttcctcacgcaagcaaccgcatccataatccttctaatagctatcctcttcaacaatatactctccggacaatgaaccataaccaatactaccaatcaatactcatcattaataatcataatggctatagcaataaaactaggaatagccccctttcacttctgagtcccagaggttacccaaggcacccctctgacatccggcctgcttcttctcacatgacaaaaactagcccccatctcaatcatataccaaatctctccctcactaaacgtaagccttctcctcactctctcaatcttatccatcatagcaggcagttgaggtggattaaaccaaacccagctacgcaaaatcttagcatactcctcaattacccacataggatgaataatagcagttctaccgtacaaccctaacataaccattcttaatttaactatttatattatcctaactactaccgcattcctactactcaacttaaactccagcaccacgaccctactactatctcgcacctgaaacaagctaacatgactaacacccttaattccatccaccctcctctccctaggaggcctgcccccgctaaccggctttttgcccaaatgggccattatcgaagaattcacaaaaaacaatagcctcatcatccccaccatcatagccaccatcaccctccttaacctctacttctacctacgcctaatctactccacctcaatcacactactccccatatctaacaacgtaaaaataaaatgacagtttgaacatacaaaacccaccccattcctccccacactcatcgcccttaccacgctactcctacctatctccccttttatactaataatcttatagaaatttaggttaaatacagaccaagagccttcaaagccctcagtaagttgcaatacttaatttctgtaacagctaaggactgcaaaaccccactctgcatcaactgaacgcaaatcagccactttaattaagctaagcccttactagaccaatgggacttaaacccacaaacacttagttaacagctaagcaccctaatcaactggcttcaatctacttctcccgccgccgggaaaaaaggcgggagaagccccggcaggtttgaagctgcttcttcgaatttgcaattcaatatgaaaatcacctcggagctggtaaaaagaggcctaacccctgtctttagatttacagtccaatgcttcactcagccattttacctcacccccactgatgttcgccgaccgttgactattctctacaaaccacaaagacattggaacactatacctattattcggcgcatgagctggagtcctaggcacagctctaagcctccttattcgagccgagctgggccagccaggcaaccttctaggtaacgaccacatctacaacgttatcgtcacagcccatgcatttgtaataatcttcttcatagtaatacccatcataatcggaggctttggcaactgactagttcccctaataatcggtgcccccgatatggcgtttccccgcataaacaacataagcttctgactcttacctccctctctcctactcctgctcgcatctgctatagtggaggccggagcaggaacaggttgaacagtctaccctcccttagcagggaactactcccaccctggagcctccgtagacctaaccatcttctccttacacctagcaggtgtctcctctatcttaggggccatcaatttcatcacaacaattatcaatataaaaccccctgccataacccaataccaaacgcccctcttcgtctgatccgtcctaatcacagcagtcctacttctcctatctctcccagtcctagctgctggcatcactatactactaacagaccgcaacctcaacaccaccttcttcgaccccgccggaggaggagaccccattctataccaacacctattctgatttttcggtcaccctgaagtttatattcttatcctaccaggcttcggaataatctcccatattgtaacttactactccggaaaaaaagaaccatttggatacataggtatggtctgagctatgatatcaattggcttcctagggtttatcgtgtgagcacaccatatatttacagtaggaatagacgtagacacacgagcatatttcacctccgctaccataatcatcgctatccccaccggcgtcaaagtatttagctgactcgccacactccacggaagcaatatgaaatgatctgctgcagtgctctgagccctaggattcatctttcttttcaccgtaggtggcctgactggcattgtattagcaaactcatcactagacatcgtactacacgacacgtactacgttgtagctcacttccactatgtcctatcaataggagctgtatttgccatcataggaggcttcattcactgatttcccctattctcaggctacaccctagaccaaacctacgccaaaatccatttcactatcatattcatcggcgtaaatctaactttcttcccacaacactttctcggcctatccggaatgccccgacgttactcggactaccccgatgcatacaccacatgaaacatcctatcatctgtaggctcattcatttctctaacagcagtaatattaataattttcatgatttgagaagccttcgcttcgaagcgaaaagtcctaatagtagaagaaccctccataaacctggagtgactatatggatgccccccaccctaccacacattcgaagaacccgtatacataaaatctagacaaaaaaggaaggaatcgaaccccccaaagctggtttcaagccaaccccatggcctccatgactttttcaaaaaggtattagaaaaaccatttcataactttgtcaaagttaaattataggctaaatcctatatatcttaatggcacatgcagcgcaagtaggtctacaagacgctacttcccctatcatagaagagcttatcacctttcatgatcacgccctcataatcattttccttatctgcttcctagtcctgtatgcccttttcctaacactcacaacaaaactaactaatactaacatctcagacgctcaggaaatagaaaccgtctgaactatcctgcccgccatcatcctagtcctcatcgccctcccatccctacgcatcctttacataacagacgaggtcaacgatccctcccttaccatcaaatcaattggccaccaatggtactgaacctacgagtacaccgactacggcggactaatcttcaactcctacatacttcccccattattcctagaaccaggcgacctgcgactccttgacgttgacaatcgagtagtactcccgattgaagcccccattcgtataataattacatcacaagacgtcttgcactcatgagctgtccccacattaggcttaaaaacagatgcaattcccggacgtctaaaccaaaccactttcaccgctacacgaccgggggtatactacggtcaatgctctgaaatctgtggagcaaaccacagtttcatgcccatcgtcctagaattaattcccctaaaaatctttgaaatagggcccgtatttaccctatagcaccccctctaccccctctagagcccactgtaaagctaacttagcattaaccttttaagttaaagattaagagaaccaacacctctttacagtgaaatgccccaactaaatactaccgtatggcccaccataattacccccatactccttacactattcctcatcacccaactaaaaatattaaacacaaactaccacctacctccctcaccaaagcccataaaaataaaaaattataacaaaccctgagaaccaaaatgaacgaaaatctgttcgcttcattcattgcccccacaatcctaggcctacccgccgcagtactgatcattctatttccccctctattgatccccacctccaaatatctcatcaacaaccgactaatcaccacccaacaatgactaatcaaactaacctcaaaacaaatgataaccatacacaacactaaaggacgaacctgatctcttatactagtatccttaatcatttttattgccacaactaacctcctcggactcctgcctcactcatttacaccaaccacccaactatctataaacctagccatggccatccccttatgagcgggcgcagtgattataggctttcgctctaagattaaaaatgccctagcccacttcttaccacaaggcacacctacaccccttatccccatactagttattatcgaaaccatcagcctactcattcaaccaatagccctggccgtacgcctaaccgctaacattactgcaggccacctactcatgcacctaattggaagcgccaccctagcaatatcaaccattaaccttccctctacacttatcatcttcacaattctaattctactgactatcctagaaatcgctgtcgccttaatccaagcctacgttttcacacttctagtaagcctctacctgcacgacaacacataatgacccaccaatcacatgcctatcatatagtaaaacccagcccatgacccctaacaggggccctctcagccctcctaatgacctccggcctagccatgtgatttcacttccactccataacgctcctcatactaggcctactaaccaacacactaaccatataccaatgatggcgcgatgtaacacgagaaagcacataccaaggccaccacacaccacctgtccaaaaaggccttcgatacgggataatcctatttattacctcagaagtttttttcttcgcaggatttttctgagccttttaccactccagcctagcccctaccccccaattaggagggcactggcccccaacaggcatcaccccgctaaatcccctagaagtcccactcctaaacacatccgtattactcgcatcaggagtatcaatcacctgagctcaccatagtctaatagaaaacaaccgaaaccaaataattcaagcactgcttattacaattttactgggtctctattttaccctcctacaagcctcagagtacttcgagtctcccttcaccatttccgacggcatctacggctcaacattttttgtagccacaggcttccacggacttcacgtcattattggctcaactttcctcactatctgcttcatccgccaactaatatttcactttacatccaaacatcactttggcttcgaagccgccgcctgatactggcattttgtagatgtggtttgactatttctgtatgtctccatctattgatgagggtcttactcttttagtataaatagtaccgttaacttccaattaactagttttgacaacattcaaaaaagagtaataaacttcgccttaattttaataaccaacaccctcctagccttactactaataattattacattttgactaccacaactcaacggctacatagaaaaatccaccccttacgagtgcggcttcgaccctatatcccccgcccgcgtccctttctccataaaattcttcttagtagctattaccttcttattatttgatctagaaattgccctccttttacccctaccatgagccctacaaacaactaacctgccactaatagttatgtcatccctcttattaatcatcatcctagccctaagtctggcctatgagtgactacaaaaaggattagactgaaccgaattggtatatagtttaaacaaaacgaatgatttcgactcattaaattatgataatcatatttaccaaatgcccctcatttacataaatattatactagcatttaccatctcacttctaggaatactagtatatcgctcacacctcatatcctccctactatgcctagaaggaataatactatcgctgttcattatagctactctcataaccctcaacacccactccctcttagccaatattgtgcctattgccatactagtctttgccgcctgcgaagcagcggtgggcctagccctactagtctcaatctccaacacatatggcctagactacgtacataacctaaacctactccaatgctaaaactaatcgtcccaacaattatattactaccactgacatgactttccaaaaaacacataatttgaatcaacacaaccacccacagcctaattattagcatcatccctctactattttttaaccaaatcaacaacaacctatttagctgttccccaaccttttcctccgaccccctaacaacccccctcctaatactaactacctgactcctacccctcacaatcatggcaagccaacgccacttatccagtgaaccactatcacgaaaaaaactctacctctctatactaatctccctacaaatctccttaattataacattcacagccacagaactaatcatattttatatcttcttcgaaaccacacttatccccaccttggctatcatcacccgatgaggcaaccagccagaacgcctgaacgcaggcacatacttcctattctacaccctagtaggctcccttcccctactcatcgcactgatttacactcacaacaccctaggctcactaaacattctactactcactctcactgcccaagaactatcaaactcctgagccaacaacttaatatgactagcttacacaatagcttttatagtaaagatacctctttacggactccacttatgactccctaaagcccatgtcgaagcccccatcgctgggtcaatagtacttgccgcagtactcttaaaactaggcggctatggtataatacgcctcacactcattctcaaccccctgacaaaacacatagcctaccccttccttgtactatccctatgaggcataattataacaagctccatctgcctacgacaaacagacctaaaatcgctcattgcatactcttcaatcagccacatagccctcgtagtaacagccattctcatccaaaccccctgaagcttcaccggcgcagtcattctcataatcgcccacggacttacatcctcattactattctgcctagcaaactcaaactacgaacgcactcacagtcgcatcataatcctctctcaaggacttcaaactctactcccactaatagctttttgatgacttctagcaagcctcgctaacctcgccttaccccccactattaacctactgggagaactctctgtgctagtaaccacgttctcctgatcaaatatcactctcctacttacaggactcaacatactagtcacagccctatactccctctacatatttaccacaacacaatggggctcactcacccaccacattaacaacataaaaccctcattcacacgagaaaacaccctcatgttcatacacctatcccccattctcctcctatccctcaaccccgacatcattaccgggttttcctcttgtaaatatagtttaaccaaaacatcagattgtgaatctgacaacagaggcttacgaccccttatttaccgagaaagctcacaagaactgctaactcatgcccccatgtctaacaacatggctttctcaacttttaaaggataacagctatccattggtcttaggccccaaaaattttggtgcaactccaaataaaagtaataaccatgcacactactataaccaccctaaccctgacttccctaattccccccatccttaccaccctcgttaaccctaacaaaaaaaactcatacccccattatgtaaaatccattgtcgcatccacctttattatcagtctcttccccacaacaatattcatgtgcctagaccaagaagttattatctcgaactgacactgagccacaacccaaacaacccagctctccctaagcttcaaactagactacttctccataatattcatccctgtggcattgttcgttacatggtccatcatagaattctcactgtgatatataaactcagacccaaacattaatcagttcttcaaatatctactcatcttcctaattaccatactaatcttagttaccgctaacaacctattccaactgttcatcggctgagagggcgtaggaattatatccttcttgctcatcagttgatgatacgcccgagcagatgccaacacagcagccattcaagcaatcctatacaaccgtatcggcgatatcggtttcatcctcgccttagcatgatttatcctacactccaactcatgagacccacaacaaatagcccttctaaacgctaatccaagcctcaccccactactaggcctcctcctagcagcagcaggcaaatcagcccaattaggtctccacccctgactcccctcagccatagaaggccccaccccagtctcagccctactccactcaagcactatagttgtagcaggaatcttcttactcatccgcttccaccccctagcagaaaatagcccactaatccaaactctaacactatgcttaggcgctatcaccactctgttcgcagcagtctgcgcccttacacaaaatgacatcaaaaaaatcgtagccttctccacttcaagtcaactaggactcataatagttacaatcggcatcaaccaaccacacctagcattcctgcacatctgtacccacgccttcttcaaagccatactatttatgtgctccgggtccatcatccacaaccttaacaatgaacaagatattcgaaaaataggaggactactcaaaaccatacctctcacttcaacctccctcaccattggcagcctagcattagcaggaatacctttcctcacaggtttctactccaaagaccacatcatcgaaaccgcaaacatatcatacacaaacgcctgagccctatctattactctcatcgctacctccctgacaagcgcctatagcactcgaataattcttctcaccctaacaggtcaacctcgcttccccacccttactaacattaacgaaaataaccccaccctactaaaccccattaaacgcctgacagccggaagcctattcgcaggatttctcattactaacaacatttcccccgcatcccccttccaaacaacaatccccctctacctaaaactcacagccctcgctgtcactttcctaggacttctaacagccctagacctcaactacctaaccaacaaacttaaaataaaatccccactatgcacattttatttctccaacatactcggattctaccctagcatcacacaccgcacaatcccctatctaggccttcttacgagccaaaacctgcccctactcctcctagacctaacctgactagaaaagctattacctaaaacaatttcacagcaccaaatctccacctccatcatcacctcaacccaaaaaggcataattaaactttacttcctctctttcttcttcccactcatcctaaccctactcctaatcacataacctattcccccgagcaatctcaattacaatatatacaccaacaaacaatgttcaaccagtaactactactaatcaacgcccataatcatacaaagcccccgcaccaataggatcctcccgaatcaaccctgacccctctccttcataaattattcagcttcctacactattaaagtttaccacaaccaccaccccatcatactctttcacccacagcaccaatcctacctccatcgctaaccccactaaaacactcaccaagacctcaacccctgacccccatgcctcaggatactcctcaatagccatcgctgtagtatatccaaagacaaccatcattccccctaaataaattaaaaaaactattaaacccatataacctcccccaaaattcagaataataacacacccgaccacaccgctaacaatcaatactaaacccccataaataggagaaggcttagaagaaaaccccacaaaccccattactaaacccacactcaacagaaacaaagcatacatcattattctcgcacggactacaaccacgaccaatgatatgaaaaaccatcgttgtatttcaactacaagaacaccaatgaccccaatacgcaaaattaaccccctaataaaattaattaaccactcactcatcgacctccccaccccatccaacatctccgcatgatgaaacttcggctcactccttggcgcctgcctgatcctccaaatcaccacaggactattcctagccatgcactactcaccagacgcctcaaccgccttttcatcaatcgcccacatcactcgagacgtaaattatggctgaatcatccgctaccttcacgccaatggcgcctcaatattctttatctgcctcttcctacacatcgggcgaggcctatattacggatcatttctctactcagaaacctgaaacatcggcattatcctcctgcttgcaactatagcaacagccttcataggctatgtcctcccgtgaggccaaatatcattctgaggggccacagtaattacaaacttactatccgccatcccatacattgggacagacctagttcaatgaatctgaggaggctactcagtagacagtcccaccctcacacgattctttacctttcacttcatcttgcccttcattattgcagccctagcagcactccacctcctattcttgcacgaaacgggatcaaacaaccccctaggaatcacctcccattccgataaaatcaccttccacccttactacacaatcaaagacgccctcggcttacttctcttcattctctccttaatgacattaacactattctcaccagacctcctaggcgacccagacaattataccctagccaaccccttaaacacccctccccacatcaagcccgaatgatatttcctattcgcctacacaattctccgatccgtccctaacaaactaggaggcgtccttgccctattactatccatcctcatcctagcaataatccccatcctccatatatccaaacaacaaagcataatatttcgcccactaagccaatcactttattgactcctagccgcagacctcctcattctaacctgaatcggaggacaaccagtaagctacccttttaccatcattggacaagtagcatccgtactatacttcacaacaatcctaatcctaataccaactatctccctaattgaaaacaaaatactcaaatgggcctgtccttgtagtataaactaatacaccagtcttgtaaaccggagatgaaaacctttttccaaggacaaatcagagaaaaagtctttaactccaccattagcacccaaagctaagattctaatttaaactattctctgttctttcatggggaagcagatttgggtaccacccaagtattgacttacccatcaacaaccgctatgtatttcgtacattactgccagccaccatgaatattgcacggtaccataaatacttgaccacctgtagtacataaaaacccaatccacatcaaaaccccctccccatgcttacaagcaagtacagcaatcaaccctcaactatcacacatcaactgcaactccaaagccacccctcacccactaggataccaacaaacctacccacccttaacagtacatagtacataaaaccatttaccgtacatagcacattacagtcaaatcccttctcgtccccatggatgacccccctcagataggggtcccttgaccaccatcctccgtgaaatcaatatcccgcacaagagtgctactctcctcgctccgggcccataacacttgggggtagctaaagtgaactgtatccgacatctggttcctacttcagggtcataaagcctaaatagcccacacgttccccttaaataagacatcacgatg

SEQ ID NO: 296 - DNA, 16571 bp, Homo sapiens mitochondrial
  3109: "n" refers to a nucleotide at position 3107 of the Cambridge Reference Sequence (CRS, Anderson et al. 1981 Nature 290:457-465), later determined to be absent from the human mtDNA sequence according to the revised CRS (rCRS, Andrews et al. 1999 Nature Genetics 23:147); "n" therefore represents a single nucleotide deletion at a position corresponding to nucleotide 3107 of SEQ ID NO:1 as provided herein.
gatcacaggtctatcaccctattaaccactcacgggagctctccatgcatttggtattttcgtctggggggtgtgcacgcgatagcattgcgagacgctggagccggagcaccctatgtcgcagtatctgtctttgattcctgcctcatcctattatttatcgcacctacgttcaatattacaggcgaacatacttactaaagtgtgttaattaattaatgcttgtaggacataataataacaattgaatgtctgcacagccgctttccacacagacatcataacaaaaaatttccaccaaaccccccctcccccccgcttctggccacagcacttaaacacatctctgccaaaccccaaaaacaaagaaccctaacaccagcctaaccagatttcaaattttatcttttggcggtatgcacttttaacagtcaccccccaactaacacattattttcccctcccactcccatactactaatctcatcaatacaacccccgcccatcctacccagcacacacacaccgctgctaaccccataccccgaaccaaccaaaccccaaagacaccccccacagtttatgtagcttacctcctcaaagcaatacactgaaaatgtttagacgggctcacatcaccccataaacaaataggtttggtcctagcctttctattagctcttagtaagattacacatgcaagcatccccattccagtgagttcaccctctaaatcaccacgatcaaaagggacaagcatcaagcacgcagcaatgcagctcaaaacgcttagcctagccacacccccacgggaaacagcagtgattaacctttagcaataaacgaaagtttaactaagctatactaaccccagggttggtcaatttcgtgccagccaccgcggtcacacgattaacccaagtcaatagaagccggcgtaaagagtgttttagatcaccccctccccaataaagctaaaactcacctgagttgtaaaaaactccagttgacacaaaatagactacgaaagtggctttaacatatctgaacacacaatagctaagacccaaactgggattagataccccactatgcttagccctaaacctcaacagttaaatcaacaaaactgctcgccagaacactacgagccacagcttaaaactcaaaggacctggcggtgcttcatatccctctagaggagcctgttctgtaatcgataaaccccgatcaacctcaccacctcttgctcagcctatataccgccatcttcagcaaaccctgatgaaggctacaaagtaagcgcaagtacccacgtaaagacgttaggtcaaggtgtagcccatgaggtggcaagaaatgggctacattttctaccccagaaaactacgatagcccttatgaaacttaagggtcgaaggtggatttagcagtaaactgagagtagagtgcttagttgaacagggccctgaagcgcgtacacaccgcccgtcaccctcctcaagtatacttcaaaggacatttaactaaaacccctacgcatttatatagaggagacaagtcgtaacatggtaagtgtactggaaagtgcacttggacgaaccagagtgtagcttaacacaaagcacccaacttacacttaggagatttcaacttaacttgaccgctctgagctaaacctagccccaaacccactccaccttactaccagacaaccttagccaaaccatttacccaaataaagtataggcgatagaaattgaaacctggcgcaatagatatagtaccgcaagggaaagatgaaaaattataaccaagcataatatagcaaggactaacccctataccttctgcataatgaattaactagaaataactttgcaaggagaaccaaagctaagacccccgaaaccagacgagctacctaagaacagctaaaagagcacacccgtctatgtagcaaaatagtgggaagatttataggtagaggcgacaaacctaccgagcctggtgatagctggttgtccaagatagaatcttagttcaactttaaatttgcccacagaaccctctaaatccccttgtaaatttaactgttagtccaaagaggaacagctctttggacactaggaaaaaaccttgtagagagagtaaaaaatttaacacccatagtaggcctaaaagcagccaccaattaagaaagcgttcaagctcaacacccactacctaaaaaatcccaaacatataactgaactcctcacacccaattggaccaatctatcaccctatagaagaactaatgttagtataagtaacatgaaaacattctcctccgcataagcctgcgtcagattaaaacactgaactgacaattaacagcccaatatctacaatcaaccaacaagtcattattaccctcactgtcaacccaacacaggcatgctcataaggaaaggttaaaaaaagtaaaaggaactcggcaaatcttaccccgcctgtttaccaaaaacatcacctctagcatcaccagtattagaggcaccgcctgcccagtgacacatgtttaacggccgcggtaccctaaccgtgcaaaggtagcataatcacttgttccttaaatagggacctgtatgaatggctccacgagggttcagctgtctcttacttttaaccagtgaaattgacctgcccgtgaagaggcgggcatgacacagcaagacgagaagaccctatggagctttaatttattaatgcaaacagtacctaacaaacccacaggtcctaaactaccaaacctgcattaaaaatttcggttggggcgacctcggagcagaacccaacctccgagcagtacatgctaagacttcaccagtcaaagcgaactactatactcaattgatccaataacttgaccaacggaacaagttaccctagggataacagcgcaatcctattctagagtccatatcaacaatagggtttacgacctcgatgttggatcaggacatcccgatggtgcagccgctattaaaggttcgtttgttcaacgattaaagtcctacgtgatctgagttcagaccggagtaatccaggtcggtttctatctacnttcaaattcctccctgtacgaaaggacaagagaaataaggcctacttcacaaagcgccttcccccgtaaatgatatcatctcaacttagtattatacccacacccacccaagaacagggtttgttaagatggcagagcccggtaatcgcataaaacttaaaactttacagtcagaggttcaattcctcttcttaacaacatacccatggccaacctcctactcctcattgtacccattctaatcgcaatggcattcctaatgcttaccgaacgaaaaattctaggctatatacaactacgcaaaggccccaacgttgtaggcccctacgggctactacaacccttcgctgacgccataaaactcttcaccaaagagcccctaaaacccgccacatctaccatcaccctctacatcaccgccccgaccttagctctcaccatcgctcttctactatgaacccccctccccatacccaaccccctggtcaacctcaacctaggcctcctatttattctagccacctctagcctagccgtttactcaatcctctgatcagggtgagcatcaaactcaaactacgccctgatcggcgcactgcgagcagtagcccaaacaatctcatatgaagtcaccctagccatcattctactatcaacattactaataagtggctcctttaacctctccacccttatcacaacacaagaacacctctgattactcctgccatcatgacccttggccataatatgatttatctccacactagcagagaccaaccgaacccccttcgaccttgccgaaggggagtccgaactagtctcaggcttcaacatcgaatacgccgcaggccccttcgccctattcttcatagccgaatacacaaacattattataataaacaccctcaccactacaatcttcctaggaacaacatatgacgcactctcccctgaactctacacaacatattttgtcaccaagaccctacttctaacctccctgttcttatgaattcgaacagcatacccccgattccgctacgaccaactcatacacctcctatgaaaaaacttcctaccactcaccctagcattacttatatgacatgtctccatacccattacaatctccagcattccccctcaaacctaagaaatatgtctgataaaagagttactttgatagagtaaataataggagcttaaacccccttatttctaggactatgagaatcgaacccatccctgagaatccaaaattctccgtgccacctatcacaccccatcctaaagtaaggtcagctaaataagctatcgggcccataccccgaaaatgttggttatacccttcccgtactaattaatcccctggcccaacccgtcatctactctaccatctttgcaggcacactcatcacagcgctaagctcgcactgattttttacctgagtaggcctagaaataaacatgctagcttttattccagttctaaccaaaaaaataaaccctcgttccacagaagctgccatcaagtatttcctcacgcaagcaaccgcatccataatccttctaatagctatcctcttcaacaatatactctccggacaatgaaccataaccaatactaccaatcaatactcatcattaataatcataatggctatagcaataaaactaggaatagccccctttcacttctgagtcccagaggttacccaaggcacccctctgacatccggcctgcttcttctcacatgacaaaaactagcccccatctcaatcatataccaaatctctccctcactagacgtaagccttctcctcactctctcaatcttatccatcatagcaggcagttgaggtggattaaaccaaacccagctacgcaaaatcttagcatactcctcaattacccacataggatgaataatagcagttctaccgtacaaccctaacataaccattcttaatttaactatttatattatcctaactactaccgcattcctactactcaacttaaactccagcaccacgaccctactactatctcgcacctgaaacaagctaacatgactaacacccttaattccatccaccctcctctccctaggaggcctgcccccgctaaccggctttttgcccaaatgggccattatcgaagaattcacaaaaaacaatagcctcatcatccccaccatcatagccaccatcaccctccttaacctctacttctacctacgcctaatctactccacctcaatcacgctactccccatatctaacaacgtaaaaataaaatgacagtttgaacatacaaaacccaccccattcctccccacactcatcgcccttaccacgctactcctacctatctccccttttatactaataatcttatagaaatttaggttaaatacagaccaagagccttcaaagccctcagtaagttgcaatacttaatttctgtaacagctaaggactgcaaaaccccactctgcatcaactgaacgcaaatcagccactttaattaagctaagcccttactagaccaatgggacttaaacccacaaacacttagttaacagctaagcaccctaatcaactggcttcaatctacttctcccgccgccgggaaaaaaggcgggagaagccccggcaggtttgaagctgcttcttcgaatttgcaattcaatatgaaaatcacctcggagctggtaaaaagaggcctaacccctgtctttagatttacagtccaatgcttcactcagccattttacctcacccccactgatgttcgccgaccgttgactattctctacaaaccacaaagacattggaacactatacctattattcggcgcatgagctggagtcctaggcacagctctaagcctccttattcgagccgagctgggccagccaggcaaccttctaggtaacgaccacatctacaacgttatcgtcacagcccatgcatttgtaataatcttcttcatagtaatacccatcataatcggaggctttggcaactgactagtccccctaataatcggtgcccccgatatggcgtttccccgcataaacaacataagcttctgactcttacctccctctctcctactcctgctcgcatctgctatagtggaggccggagcaggaacaggttgaacagtctaccctcccttagcagggaactactcccaccctggagcctccgtagacctaaccatcttctccttacacctagcaggtgtctcctctatcttaggggccatcaatttcatcacaacaattatcaatataaaaccccctgccataacccaataccaaacgcccctcttcgtctgatccgtcctaatcacagcagtcctacttctcctatctctcccagtcctagctgctggcatcactatactactaacagaccgcaacctcaacaccaccttcttcgaccccgccggaggaggagaccccattctataccaacacctattctgatttttcggtcaccctgaagtttatattcttatcctaccaggcttcggaataatctcccatattgtaacttactactccggaaaaaaagaaccatttggatacataggtatggtctgagctatgatatcaattggcttcctagggtttatcgtgtgagcacaccatatatttacagtaggaatagacgtagacacacgagcatatttcacctccgctaccataatcatcgctatccccaccggcgtcaaagtatttagctgactcgccacactccacggaagcaatatgaaatgatctgctgcagtgctctgagccctaggattcatctttcttttcaccgtaggtggcctgactggcattgtattagcaaactcatcactagacatcgtactacacgacacgtactacgttgtagctcacttccactatgtcctatcaataggagctgtatttgccatcataggaggcttcattcactgatttcccctattctcaggctacaccctagaccaaacctacgccaaaatccatttcactatcatattcatcggcgtaaatctaactttcttcccacaacactttctcggcctatccggaatgccccgacgttactcggactaccccgatgcatacaccacatgaaacatcctatcatctgtaggctcattcatttctctaacagcagtaatattaataattttcatgatttgagaagccttcgcttcgaagcgaaaagtcctaatagtagaagaaccctccataaacctggagtgactatatggatgccccccaccctaccacacattcgaagaacccgtatacataaaatctagacaaaaaaggaaggaatcgaaccccccaaagctggtttcaagccaaccccatggcctccatgactttttcaaaaaggtattagaaaaaccatttcataactttgtcaaagttaaattataggctaaatcctatatatcttaatggcacatgcagcgcaagtaggtctacaagacgctacttcccctatcatagaagagcttatcacctttcatgatcacgccctcataatcattttccttatctgcttcctagtcctgtatgcccttttcctaacactcacaacaaaactaactaatactaacatctcagacgctcaggaaatagaaaccgtctgaactatcctgcccgccatcatcctagtcctcatcgccctcccatccctacgcatcctttacataacagacgaggtcaacgatccctcccttaccatcaaatcaattggccaccaatggtactgaacctacgagtacaccgactacggcggactaatcttcaactcctacatacttcccccattattcctagaaccaggcgacctgcgactccttgacgttgacaatcgagtagtactcccgattgaagcccccattcgtataataattacatcacaagacgtcttgcactcatgagctgtccccacattaggcttaaaaacagatgcaattcccggacgtctaaaccaaaccactttcaccgctacacgaccgggggtatactacggtcaatgctctgaaatctgtggagcaaaccacagtttcatgcccatcgtcctagaattaattcccctaaaaatctttgaaatagggcccgtatttaccctatagcaccccctctaccccctctagagcccactgtaaagctaacttagcattaaccttttaagttaaagattaagagaaccaacacctctttacagtgaaatgccccaactaaatactaccgtatggcccaccataattacccccatactccttacactattcctcatcacccaactaaaaatattaaacacaaactaccacctacctccctcaccaaagcccataaaaataaaaaattataacaaaccctgagaaccaaaatgaacgaaaatctgttcgcttcattcattgcccccacaatcctaggcctacccgccgcagtactgatcattctatttccccctctattgatccccacctccaaatatctcatcaacaaccgactaatcaccacccaacaatgactaatcaaactaacctcaaaacaaataataaccatacacaacactaaaggacgaacctgatctcttatactagtatccttaatcatttttattgccacaactaacctcctcggactcctgcctcactcatttacaccaaccacccaactatctataaacctagccatggccatccccttatgagcgggcgcagtgattataggctttcgctctaagattaaaaatgccctagcccacttcttaccacaaggcacacctacaccccttatccccatactagttattatcgaaaccatcagcctactcattcaaccaatagccctggccgtacgcctaaccgctaacattactgcaggccacctactcatgcacctaattggaagcgccaccctagcaatatcaaccattaaccttccctctacacttatcatcttcacaattctaattctactgactatcctagaaatcgctgtcgccttaatccaagcctacgttttcacacttctagtaagcctctacctgcacgacaacacataatgacccaccaatcacatgcctatcatatagtaaaacccagcccatgacccctaacaggggccctctcagccctcctaatgacctccggcctagccatgtgatttcacttccactccataacgctcctcatactaggcctactaaccaacacactaaccatataccaatgatggcgcgatgtaacacgagaaagcacataccaaggccaccacacaccacctgtccaaaaaggccttcgatacgggataatcctatttattacctcagaagtttttttcttcgcaggatttttctgagccttttaccactccagcctagcccctaccccccaattaggagggcactggcccccaacaggcatcaccccgctaaatcccctagaagtcccactcctaaacacatccgtattactcgcatcaggagtatcaatcacctgagctcaccatagtctaatagaaaacaaccgaaaccaaataattcaagcactgcttattacaattttactgggtctctattttaccctcctacaagcctcagagtacttcgagtctcccttcaccatttccgacggcatctacggctcaacattttttgtagccacaggcttccacggacttcacgtcattattggctcaactttcctcactatctgcttcatccgccaactaatatttcactttacatccaaacatcactttggcttcgaagccgccgcctgatactggcattttgtagatgtggtttgactatttctgtatgtctccatctattgatgagggtcttactcttttagtataaatagtaccgttaacttccaattaactagttttgacaacattcaaaaaagagtaataaacttcgccttaattttaataatcaacaccctcctagccttactactaataattattacattttgactaccacaactcaacggctacatagaaaaatccaccccttacgagtgcggcttcgaccctatatcccccgcccgcgtccctttctccataaaattcttcttagtagctattaccttcttattatttgatctagaaattgccctccttttacccctaccatgagccctacaaacaactaacctgccactaatagttatgtcatccctcttattaatcatcatcctagccctaagtctggcctatgagtgactacaaaaaggattagactgaaccgaattggtatatagtttaaacaaaacgaatgatttcgactcattaaattatgataatcatatctaccaaatgcccctcatttacataaatattatactagcatttaccatctcacttctaggaatactagtatatcgctcacacctcatatcctccctactatgcctagaaggaataatactatcgctgttcattatagctactctcataaccctcaacacccactccctcttagccaatattgtgcctattgccatactagtctttgccgcctgcgaagcagcggtgggcctagccctactagtctcaatctccaacacatatggcctagactacgtacataacctaaacctactccaatgctaaaactaatcgtcccaacaattatattactaccactgacatgactttccaaaaaacacataatttgaatcaacacaaccacccacagcctaattattagcatcatccctctactattttttaaccaaatcaacaacaacctatttagctgttccccaaccttttcctccgaccccctaacaacccccctcctaatactaactacctgactcctacccctcacaatcatggcaagccaacgccacttatccagtgaaccactatcacgaaaaaaactctacctctctatactaatctccctacaaatctccttaattataacattcacagccacagaactaatcatattttatatcttcttcgaaaccacacttatccccaccttggctatcatcacccgatgaggcaaccagccagaacgcctgaacgcaggcacatacttcctattctacaccctagtaggctcccttcccctactcatcgcactgatttacactcacaacaccctaggctcactaaacattctactactcactctcactgcccaagaactatcaaactcctgagccaacaacttaatatgactagcttacacaatagcttttatagtaaagatacctctttacggactccacttatgactccctaaagcccatgtcgaagcccccatcgctgggtcaatagtacttgccgcagtactcttaaaactaggcggctatggtataatacgcctcacactcattctcaaccccctgacaaaacacatagcctaccccttccttgtactatccctatgaggcataattataacaagctccatctgcctacgacaaacagacctaaaatcgctcattgcatactcttcaatcagccacatagccctcgtagtaacagccattctcatccaaaccccctgaagcttcaccggcgcagtcattctcataatcgcccacggacttacatcctcattactattctgcctagcaaactcaaactacgaacgcactcacagtcgcatcataatcctctctcaaggacttcaaactctactcccactaatagctttttgatgacttctagcaagcctcgctaacctcgccttaccccccactattaacctactgggagaactctctgtgctagtaaccacgttctcctgatcaaatatcactctcctacttacaggactcaacatactagtcacagccctatactccctctacatatttaccacaacacaatggggctcactcacccaccacattaacaacataaaaccctcattcacacgagaaaacaccctcatgttcatacacctatcccccattctcctcctatccctcaaccccgacatcattaccgggttttcctcttgtaaatatagtttaaccaaaacatcagattgtgaatctgacaacagaggcttacgaccccttatttaccgagaaagctcacaagaactgctaactcatgcccccatgtctaacaacatggctttctcaacttttaaaggataacagctatccattggtcttaggccccaaaaattttggtgcaactccaaataaaagtaataaccatgcacactactataaccaccctaaccctgacttccctaattccccccatccttaccaccctcattaaccctaacaaaaaaaactcatacccccattatgtaaaatccattgtcgcatccacctttattatcagtctcttccccacaacaatattcatgtgcctagaccaagaagttattatctcgaactgacactgagccacaacccaaacaacccagctctccctaagcttcaaactagactacttctccataatattcatccctgtagcattgttcgttacatggtcaatcatagaattctcactgtgatatataaactcagacccaaacattaatcagttcttcaaatatctactcatcttcctaattaccatactaatcttagttaccgctaacaacctattccaactgttcatcggctgagagggcgtaggaattatatccttcttgctcatcagttgatgatacgcccgagcagatgccaacacagcagccattcaagcaatcctatacaaccgtatcggcgatatcggtttcatcctcgccttagcatgatttatcctacactccaactcatgagacccacaacaaatagcccttctaaacgctaatccaagcctcaccccactactaggcctcctcctagcagcagcaggcaaatcagcccaattaggtctccacccctgactcccctcagccatagaaggccccaccccagtctcagccctactccactcaagcactatagttgtagcaggaatcttcttactcatccgcttccaccccctagcagaaaatagcccactaatccaaactctaacactatgcttaggcgctatcaccactctgttcgcagcagtctgcgcccttacacaaaatgacatcaaaaaaatcgtagccttctccacttcaagtcaactaggactcataatagttacaatcggcatcaaccaaccacacctagcattcctgcacatctgtacccacgccttcttcaaagccatactatttatgtgctccggatccatcatccacaaccttaacaatgaacaagatattcgaaaaataggaggactactcaaaaccatacctctcacttcaacctccctcaccattggcagcctagcattagcaggaatacctttcctcacaggtttctactccaaagaccacatcatcgaaaccgcaaacatatcatacacaaacgcctgagccctatctattactctcatcgctacctccctgacaagcgcctatagcactcgaataattcttctcaccctaacaggtcaacctcgcttccccacccttactaacattaacgaaaataaccccaccctactaaaccccattaaacgcctggcagccggaagcctattcgcaggatttctcattactaacaacatttcccccgcatcccccttccaaacaacaatccccctctacctaaaactcacagccctcgctgtcactttcctaggacttctaacagccctagacctcaactacctaaccaacaaacttaaaataaaatccccactatgcacattttatttctccaacatactcggattctaccctagcatcacacaccgcacaatcccctatctaggccttcttacgagccaaaacctgcccctactcctcctagacctaacctgactagaaaagctattacctaaaacaatttcacagcaccaaatctccacctccatcatcacctcaacccaaaaaggcataattaaactttacttcctctctttcttcttcccactcatcctaaccctactcctaatcacataacctattcccccgagcaatctcaattacaatatatacaccaacaaacaatgttcaaccagtaactactactaatcaacgcccataatcatacaaagcccccgcaccaataggatcctcccgaatcaaccctgacccctctccttcataaattattcagcttcctacactattaaagtttaccacaaccaccaccccatcatactctttcacccacagcaccaatcctacctccatcgctaaccccactaaaacactcaccaagacctcaacccctgacccccatgcctcaggatactcctcaatagccatcgctgtagtatatccaaagacaaccatcattccccctaaataaattaaaaaaactattaaacccatataacctcccccaaaattcagaataataacacacccgaccacaccgctaacaatcaatactaaacccccataaataggagaaggcttagaagaaaaccccacaaaccccattactaaacccacactcaacagaaacaaagcatacatcattattctcgcacggactacaaccacgaccaatgatatgaaaaaccatcgttgtatttcaactacaagaacaccaatgaccccaatacgcaaaattaaccccctaataaaattaattaaccactcattcatcgacctccccaccccatccaacatctccgcatgatgaaacttcggctcactccttggcgcctgcctgatcctccaaatcaccacaggactattcctagccatacactactcaccagacgcctcaaccgccttttcatcaatcgcccacatcactcgagacgtaaattatggctgaatcatccgctaccttcacgccaatggcgcctcaatattctttatctgcctcttcctacacatcgggcgaggcctatattacggatcatttctctactcagaaacctgaaacatcggcattatcctcctgcttgcaactatagcaacagccttcataggctatgtcctcccgtgaggccaaatatcattctgaggggccacagtaattacaaacttactatccgccatcccatacattgggacagacctagttcaatgaatctgaggaggctactcagtagacagtcccaccctcacacgattctttacctttcacttcatcttgcccttcattattgcagccctagcagcactccacctcctattcttgcacgaaacgggatcaaacaaccccctaggaatcacctcccattccgataaaatcaccttccacccttactacacaatcaaagacgccctcggcttacttctcttcattctctccttaatgacattaacactattctcaccagacctcctaggcgacccagacaattataccctagccaaccccttaaacacccctccccacatcaagcccgaatgatatttcctattcgcctacacaattctccgatccgtccctaacaagctaggaggcgtccttgccctattactatccatcctcatcctagcaataatccccatcctccatatatccaaacaacaaagcataatatttcgcccactaagccaatcactttattgactcctagccgcagacctcctcattctaacctgaatcggaggacaaccagtaagctacccttttaccatcattggacaagtagcatccgtactatacttcacaacaatcctaatcctaataccaactatctccctaattgaaaacaaaatactcaaatgggcctgtccttgtagtataaactaatacaccagtcttgtaaaccgaagatgaaaacctttttccaaggacaaatcagagaaaaagtctttaactccaccattagcacccaaagctaagattctaatttaaactattctctgttctttcatggggaagcagatttgggtaccacccaagtattgactcacccatcaacaaccgctatgtatttcgtacattactgccagccaccatgaatattgcacggtaccataaatacttgaccacctgtagtacatagaaacccaatccacatcaaaacctcccccccatgcttacaagcaagtacagcaattaaccctcaactatcacacatcaactgcaactccaaagccacccctcacccactaggataccaacaaacctacccatctttaacagtacatagtacataaagccatttaccgtacatagcacattacagtcaaatcccttctcgtccccatggatgacccccctcagataggggtcccttgaccaccatcctccgtgaaatcaatatcccgcacaagagtgctactctcctcgctccgggcccataacacttgggggtagctaaagtgaactgtatccgacatctggttcctacttcagggccataaagcctaaatagcccacacgttccccttaaataagacatcacgatg

SEQ ID NO: 297 - DNA, 16570 bp, Homo sapiens mitochondrial
  3108: "n" refers to a nucleotide at position 3107 of the Cambridge Reference Sequence (CRS, Anderson et al. 1981 Nature 290:457-465), later determined to be absent from the human mtDNA sequence according to the revised CRS (rCRS, Andrews et al. 1999 Nature Genetics 23:147); "n" therefore represents a single nucleotide deletion at a position corresponding to nucleotide 3107 of SEQ ID NO:1 as provided herein.
gatcacaggtctatcaccctattaaccactcacgggagctctccatgcatttggtattttcgtctggggggtgtgcacgcgatagcattgcgagacgctggagccggagcaccctatgtcgcagtatctgtctttgattcctgccccatcccattatttatcgcacctacgttcaatattacaggcgaacatacttactaaagtgtgttaattaattaatgcttgtaggacataataataacaattgaatgtctgcacagccgctttccacacagacatcataacaaaaaatttccaccaaaccccccctcccccccgcttctggccacagcacttaaacacatctctgccaaaccccaaaaacaaagaaccctaacaccagcctaaccagatttcaaattttatcttttggcggtatgcacttttaacagtcaccccccaactaacacattattttcccctcccactcccatactactaatctcatcgatacaaccccgcccatcctacccagcacacacacaccgctgctaaccccataccccgaaccaaccaaaccccaaagacaccccccacagtttatgtagcttacctcctcaaagcaatacactgaaaatgtttagacgggctcacatcaccccataaacaaataggtttggtcctagcctttctattagctcttagtaagattacacatgcaagcatccccgttccagtgagttcaccctctaaatcaccacgatcaaaagggacaagcatcaagcacgcagcaatgcagctcaaaacgcttagcctagccacacccccacgggaaacagcagtgattaacctttagcaataaacgaaagtttaactaagctatactaaccccagggttggtcaatttcgtgccagccaccgcggtcacacgattaacccaagtcaatagaagccggcgtaaagagtgttttagatcaccccctccccaataaagctaaaactcacctgagttgtaaaaaactccagttgacacaaaatagactacgaaagtggctttaacatatctgaacacacaatagctaagacccaaactgggattagataccccactatgcttagccctaaacctcaacagttaaatcaacaaaactgctcgccagaacactacgagccacagcttaaaactcaaaggacctggcggtgcttcatacccctctagaggagcctgttctgtaatcgataaaccccgatcaacctcaccacctcttgctcagcctatataccgccatcttcagcaaaccctgatgaaggctacaaagtaagcgcaagtacccacgtaaagacgttaggtcaaggtgtagcccatgaggtggcaagaaatgggctacattttctaccccagaaaactacgataacccttatgaaacttaagggtcgaaggtggatttagcagtaaactgagagtagagtgcttagttgaacagggccctgaagcgcgtacacaccgcccgtcaccctcctcaagtatacttcaaaggacatttaactaaaacccctacgcatttatatagaggagacaagtcgtaacatggtaagtgtactggaaagtgcacttggacgaaccagagtgtagcttaacacaaagcacccaacttacacttaggagatttcaacttaacttgaccgctctgagctaaacctagccccaaacccactccaccttactaccagacaaccttagccaaaccatttacccaaataaagtataggcgatagaaattgaaacctggcgcaatagatatagtaccgcaagggaaagatgaaaaattatagccaagcataatatagcaaggactaacccctataccttctgcataatgaattaactagaaataactttgcaaggagagccaaagctaagacccccgaaaccagacgagctacctaagaacagctaaaagagcacacccgtctatgtagcaaaatagtgggaagatttataggtagaggcgacaaacctaccgagcctggtgatagctggttgtccaagatagaatcttagttcaactttaaatttgcccacagaaccctctaaatccccttgtaaatttaactgttagtccaaagaggaacagctctttggacactaggaaaaaaccttgtagagagagtaaaaaatttaacacccatagtaggcctaaaagcagccaccaattaagaaagcgttcaagctcaacacccactacctaaaaaatcccaaacatataactgaactcctcacacccaattggaccaatctatcaccctatagaagaactaatgttagtataagtaacatgaaaacattctcctccgcataagcctgcgtcagattaaaacactgaactgacaattaacagcccaatatctacaatcaaccaacaagtcattattaccctcactgtcaacccaacacaggcatgctcataaggaaaggttaaaaaaagtaaaaggaactcggcaaatcttaccccgcctgtttaccaaaaacatcacctctagcatcaccagtattagaggcaccgcctgcccagtgacacatgtttaacggccgcggtaccctaaccgtgcaaaggtagcataatcacttgttccttaaatagggacctgtatgaatggctccacgagggttcagctgtctcttacttttaaccagtgaaattgacctgcccgtgaagaggcgggcatgacacagcaagacgagaagaccctatggagctttaatttattaatgcaaacagtacctaacaaacccacaggtcctaaactaccaaacctgcattaaaaatttcggttggggcgacctcggagcagaacccaacctccgagcagtacatgctaagacttcaccagtcaaagcgaactactatactcaattgatccaataacttgaccaacggaacaagttaccctagggataacagcgcaatcctattctagagtccatatcaacaatagggtttacgacctcgatgttggatcaggacatcccgatggtgcagccgctattaaaggttcgtttgttcaacgattaaagtcctacgtgatctgagttcagaccggagtaatccaggtcggtttctatctacnttcaaattcctccctgtacgaaaggacaagagaaataaggcctacttcacaaagcgccttcccccgtaaatgatatcatctcaacttagtattatacccacacccacccaagaacagggtttgttaagatggcagagcccggtaatcgcataaaacttaaaactttacagtcagaggttcaattcctcttcttaacaacatacccatggccaacctcctactcctcattgtacccattctaatcgcaatggcattcctaatgcttaccgaacgaaaaattctaggctatatacaactacgcaaaggccccaacgttgtaggcccctacgggctactacaacccttcgctgacgccataaaactcttcaccaaggagcccctaaaacccgccacatctaccatcaccctctacatcaccgccccgaccttagctctcaccatcgctcttctactatgaacccccctccccatacccaaccccctggtcaacctcaacctaggcctcctatttattctagccacctctagcctagccgtttactcaatcctctgatcagggtgagcatcaaactcaaactacgccctgatcggcgcactgcgagcagtagcccaaacaatctcatatgaagtcaccctagccatcattctactatcaacattactaataagtggctcctttaacctctccacccttatcacaacacaagaacacctctgattactcctgccatcatgacccttggccataatatgatttatctccacactagcagagaccaaccgaacccccttcgaccttgccgaaggggagtccgaactagtctcaggcttcaacatcgaatacgccgcaggccccttcgccctattcttcatagccgaatacacaaacattattataataaacaccctcaccactacaatcttcctaggaacaacatatgacgcactctcccctgaactctacacaacatattttgtcaccaagaccctacttctaacctccctgttcttatgaattcgaacagcatacccccgattccgctacgaccaactcatacacctcctatgaaaaaacttcctaccactcaccctagcattacttatatgatatgtctccatacccattacaatctccagcattccccctcaaacctaagaaatatgtctgataaaagagttactttgatagagtaaataataggagcttaaacccccttatttctaggactatgagaatcgaacccatccctgagaatccaaaattctccgtgccacctatcacaccccatcctaaagtaaggtcagctaaataagctatcgggcccataccccgaaaatgttggttatacccttcccgtactaattaatcccctggcccaacccgtcatctactctaccatctttgcaggcacactcatcacagcgctaagctcgcactgattttttacctgagtaggcctagaaataaacatgctagcttttattccagttctaaccaaaaaaataaaccctcgttccacagaagctgccatcaagtatttcctcacgcaagcaaccgcatccataatccttctaatagctatcctcttcaacaatatactctccggacaatgaaccataaccaatactaccaatcaatactcatcattaataatcataatggctatagcaataaaactaggaatagccccctttcacttctgagtcccagaggttacccaaggcacccctctgacatccggcctgcttcttctcacatgacaaaaactagcccccatctcaatcatataccaaatctctccctcactaaacgtaagccttctcctcactctctcaatcttatccatcatagcaggcagttgaggtggattaaaccaaacccagctacgcaaaatcttagcatactcctcaattacccacataggatgaataatagcagttctaccgtacaaccctaacataaccattcttaatttaactatttatattatcctaactactaccgcattcctactactcaacttaaactccagcaccacgaccctactactatctcgcacctgaaacaagctaacatgactaacacccttaattccatccaccctcctctccctaggaggcctgcccccgctaaccggctttttgcccaaatgggccattatcgaagaattcacaaaaaacaatagcctcatcatccccaccatcatagccaccatcaccctccttaacctctacttctacctacgcctaatctactccacctcaatcacactactccccatatctaacaacgtaaaaataaaatgacagtttgaacatacaaaacccaccccattcctccccacactcatcgcccttaccacgctactcctacctatctccccttttatactaataatcttatagaaatttaggttaaatacagaccaagagccttcaaagccctcagtaagttgcaatacttaatttctgtaacagctaaggactgcaaaaccccactctgcatcaactgaacgcaaatcagccactttaattaagctaagcccttactagaccaatgggacttaaacccacaaacacttagttaacagctaagcaccctaatcaactggcttcaatctacttctcccgccgccgggaaaaaaggcgggagaagccccggcaggtttgaagctgcttcttcgaatttgcaattcaatatgaaaatcacctcggagctggtaaaaagaggcctaacccctgtctttagatttacagtccaatgcttcactcagccattttacctcacccccactgatgttcgccgaccgttgactattctctacaaaccacaaagacattggaacactatacctattattcggcgcatgagctggagtcctaggcacagctctaagcctccttattcgagccgagctgggccagccaggcaaccttctaggtaacgaccacatctacaacgttatcgtcacagcccatgcatttgtaataatcttcttcatagtaatacccatcataatcggaggctttggcaactgactagttcccctaataatcggtgcccccgatatggcgtttccccgcataaacaacataagcttctgactcttacctccctctctcctactcctgctcgcatctgctatagtggaggccggagcaggaacaggttgaacagtctaccctcccttagcagggaactactcccaccctggagcctccgtagacctaaccatcttctccttacacctagcaggtgtctcctctatcttaggggccatcaatttcatcacaacaattatcaatataaaaccccctgccataacccaataccaaacgcccctcttcgtctgatccgtcctaatcacagcagtcctacttctcctatctctcccagtcctagctgctggcatcactatactactaacagaccgcaacctcaacaccaccttcttcgaccccgccggaggaggagaccccattctataccaacacctattctgatttttcggtcaccctgaagtttatattcttatcctaccaggcttcggaataatctcccatattgtaacttactactccggaaaaaaagaaccatttggatacataggtatggtctgagctatgatatcaattggcttcctagggtttatcgtgtgagcacaccatatatttacagtaggaatagacgtagacacacgagcatatttcacctccgctaccataatcatcgctatccccaccggcgtcaaagtatttagctgactcgccacactccacggaagcaatatgaaatgatctgctgcagtgctctgagccctaggattcatctttcttttcaccgtaggtggcctgactggcattgtattagcaaactcatcactagacatcgtactacacgacacgtactacgttgtagctcacttccactatgtcctatcaataggagctgtatttgccatcataggaggctttattcactgatttcccctattctcaggctacaccctagaccaaacctacgccaaaatccatttcactatcatattcatcggcgtaaatctaactttcttcccacaacactttctcggcctatccggaatgccccgacgttactcggactaccccgatgcatacaccacatgaaacatcctatcatctgtaggctcattcatttctctaacagcagtaatattaataattttcatgatttgagaagccttcgcttcgaagcgaaaagtcctaatagtagaagaaccctccataaacctggagtgactatatggatgccccccaccctaccacacattcgaagaacccgtatacataaaatctagacaaaaaaggaaggaatcgaaccccccaaagctggtttcaagccaaccccatggcctccatgactttttcaaaaaggtattagaaaaaccatttcataactttgtcaaagttaaattataggctaaatcctatatatcttaatggcacatgcagcgcaagtaggtctacaagacgctacttcccctatcatagaagagcttatcacctttcatgatcacgccctcataatcattttccttatctgcttcctagtcctgtatgcccttttcctaacactcacaacaaaactaactaatactaacatctcagacgctcaggaaatagaaaccgtctgaactatcctgcccgccatcatcctagtcctcatcgccctcccatccctacgcatcctttacataacagacgaggtcaacgatccctcccttaccatcaaatcaattggccaccaatggtactgaacctacgagtacaccgactacggcggactaatcttcaactcctacatacttcccccattattcctagaaccaggcgacctgcgactccttgacgttgacaatcgagtagtactcccgattgaagcccccattcgtataataattacatcacaagacgtcttgcactcatgagctgtccccacattaggcttaaaaacagatgcaattcccggacgtctaaaccaaaccactttcaccgctacacgaccgggggtatactacggtcaatgctctgaaatctgtggagcaaaccacagtttcatgcccatcgtcctagaattaattcccctaaaaatctttgaaatagggcccgtatttaccctatagcaccccctctaccccctctagagcccactgtaaagctaacttagcattaaccttttaagttaaagattaagagaaccaacacctctttacagtgaaatgccccaactaaatactaccgtatggcccaccataattacccccatactccttacactattcctcatcacccaactaaaaatattaaacacaaactaccacctacctccctcaccaaagcccataaaaataaaaaattataacaaaccctgagaaccaaaatgaacgaaaatctgttcgcttcattcattgcccccacaatcctaggcctacccgccgcagtactgatcattctatttccccctctattgatccccacctccaaatatctcatcaacaaccgactaatcaccacccaacaatgactaatcaaactaacctcaaaacaaatgataaccatacacaacactaaaggacgaacctgatctcttatactagtatccttaatcatttttattgccacaactaacctcctcggactcctgcctcactcatttacaccaaccacccaactatctataaacctagccatggccatccccttatgagcgggcgcagtgattataggctttcgctctaagattaaaaatgccctagcccacttcttaccacaaggcacacctacaccccttatccccatactagttattatcgaaaccatcagcctactcattcaaccaatagccctggccgtacgcctaaccgctaacattactgcaggccacctactcatgcacctaattggaagcaccaccctagcaatatcaaccattaaccttccctctacgcttatcatcttcacaattctaattctactgactatcctagaaatcgctgtcgccttaatccaagcctacgttttcacacttctagtaagcctctacctgcacgacaacacataatgacccaccaatcacatgcctatcatatagtaaaacccagcccatgacccctaacaggggccctctcagccctcctaatgacctccggcctagccatgtgatttcacttccactccataacgctcctcatactaggcctactaaccaacacactaaccatataccaatgatggcgcgatgtaacacgagaaagcacataccaaggccaccacacaccacctgtccaaaaaggccttcgatacgggataatcctatttattacctcagaagtttttttcttcgcaggatttttctgagccttttaccactccagcctagcccctaccccccaattaggagggcactggcccccaacaggcatcaccccgctaaatcccctagaagtcccactcctaaacacatccgtattactcgcatcaggagtatcaatcacctgagctcaccatagtctaatagaaaacaaccgaaaccaaataattcaagcactgctcattacaattttactgggtctctattttaccctcctacaagcctcagagtacttcgagtctcccttcaccatttccgacggcatctacggctcaacattttttgtagccacaggcttccacggacttcacgtcattattggctcaactttcctcactatctgcttcatccgccaactaatatttcactttacatccaaacatcactttggcttcgaagccgccgcctgatactggcattttgtagatgtggtttgactatttctgtatgtctccatctattgatgagggtcttactcttttagtataaatagtaccgttaacttccaattaactagttttgacaacattcaaaaaagagtaataaacttcgccttaattttaataatcaacaccctcctagccttactactaataattattacattttgactaccacaactcaacggctacatagaaaaatccaccccttacgagtgcggcttcgaccctatatcccccgcccgcgtccctttctccataaaattcttcttagtagctattaccttcttattatttgatctagaaattgccctccttttacccctaccatgagccctacaaacaactaacctgccactaatagttatgtcatccctcttattaatcatcatcctagccctaagtctggcctatgagtgactacaaaaaggattagactgagccgaattggtatatagtttaaacaaaacgaatgatttcgactcattaaattatgataatcatatttaccaaatgcccctcatttacataaatattatactagcatttaccatctcacttctaggaatactagtatatcgctcacacctcatgtcctccctactatgcctagaaggaataatactatcgctgttcattatagctactctcataaccctcaacacccactccctcttagccaatattgtgcctattgccatactagtctttgccgcctgcgaagcagcggtgggcctagccctactagtctcaatctccaacacatatggcctagactacgtacataacctaaacctactccaatgctaaaactaatcgtcccaacaattatattactaccactgacatgactttccaaaaaacacataatttgaatcaacacaaccacccacagcctaattattagcatcatccctctactattttttaaccaaatcaacaacaacctatttagctgttccccaaccttttcctccgaccccctaacaacccccctcctaatactaactacctgactcctacccctcacaatcatggcaagccaacgccacttatccagtgaaccactatcacgaaaaaaactctacctctctatactaatctccctacaaatctccttaattataacattcacagccacagaactaatcatattttatatcttcttcgaaaccacacttatccccaccttggctatcatcacccgatgaggcaaccagccagaacgcctgaacgcaggcacatacttcctattctacaccctagtaggctcccttcccctactcatcgcactaatttacactcacaacaccctaggctcactaaacattctactactcaccctcactgcccaagaactatcaaactcctgagccaacaacttaatatgactagcttacacaatagcttttatagtaaaaatacctctttacggactccacttatgactccctaaagcccatgtcgaagcccccatcgctgggtcaatagtacttgccgcagtactcttgaaactaggcggctatggtataatacgcctcacactcattctcaaccccctgacaaaacacatagcctaccccttccttgtactatccctatgaggcataattataacaagctccatctgcctacgacaaacagacctaaaatcgctcattgcatactcttcaatcagccacatagccctcgtagtaacagccattctcatccaaaccccctgaagcttcaccggcgcagtcattctcataatcgcccacggacttacatcctcattactattctgcctagcaaactcaaactacgaacgcactcacagtcgcatcataatcctctctcaaggacttcaaactctactcccactaatagctttttgatgacttctagcaagcctcgctaacctcgccttaccccccactattaacctactgggagaactctctgtgctagtaaccacgttctcctgatcaaatatcactctcctacttacaggactcaacatactagtcacagccctatactccctctacatatttaccacaacacaatggggctcactcacccaccacattaacaacataaaaccctcattcacacgagaaaacaccctcatgttcatacacctatcccccattctcctcctatccctcaaccccgacatcattaccgggttttcctcttgtaaatatagtttaaccaaaacatcagattgtgaatctgacaacagaggcttacgaccccttatttaccgagaaagctcacaagaactgctaactcatgcccccatgtctaacaacatggctttctcaacttttaaaggataacagctatccattggtcttaggccccaagaattttggtgcaactccaaataaaagtaataaccatgcacactactataaccaccctaaccctaacttccctaattccccccatccttaccaccctcgttaaccctaacaaaaaaaactcatacccccattatgtaaaatccattgtcgcatccacctttattatcagtctcttccccacaacaatattcatgtgcctagaccaagaagttattatctcgaactgacactgagccacaacccaaacaacccagctctccctaagcttcaaactagactacttctccataatattcatccctgtagcattgttcgttacatggtccatcatagaattctcactgtgatatataaactcagacccaaacattaatcagttcttcaaatatctactcatcttcctaattaccatactaatcttagttaccgctaacaacctattccaactgttcatcggctgagagggcgtaggaattatatccttcttgctcatcagttgatgatacgcccgagcagatgccaacacagcagccattcaagcaatcctatacaaccgtatcggcgatatcggtttcatcctcgccttagcatgatttatcctacactccaactcatgagacccacaacaaatagcccttctaaacgctaatccaagcctcaccccactactaggcctcctcctagcagcagcaggcaaatcagcccaattaggtctccacccctgactcccctcagccatagaaggccccaccccagtctcagccctactccactcaagcactatagttgtagcaggaatcttcttactcatccgcttccaccccctagcagaaaatagcccactaatccaaactctaacactatgcttaggcgctatcaccactctgttcgcagcagtctgcgcccttacacaaaatgacatcaaaaaaatcgtagccttctccacttcaagtcaactaggactcataatagttacaatcggcatcaaccaaccacacctagcattcctgcacatctgtacccacgccttcttcaaagccatactatttatgtgctccgggtccatcatccacaaccttaacaatgaacaagatattcgaaaaataggaggactactcaaaaccatacctctcacttcaacctccctcaccattggcagcctagcattagcaggaatacctttcctcacaggtttctactccaaagaccacatcatcgaaaccgcaaacatatcatacacaaacgcctgagccctatctattactctcatcgctacctccctgacaagcgcctatagcactcgaataattcttctcaccctaacaggtcaacctcgcttccccacccttactaacattaacgaaaataaccccaccctactaaaccccattaaacgcctggcagccggaagcctattcgcaggatttctcattactaacaacatttcccccgcatcccccttccaaacaacaatccccctctacctaaaactcacagccctcgctgtcactttcctaggacttctaacagccctagacctcaactacctaaccaacaaacttaaaataaaatccccactatgcacattttatttctccaacatactcggattctaccctagcatcacacaccgcacaatcccctatctaggccttcttacgagccaaaacctgcccctactcctcctagacctaacctgactagaaaagctattacctaaaacaatttcacagcaccaaatctccacctccatcatcacctcaacccaaaaaggcataattaaactttacttcctctctttcttcttcccactcatcctaaccctactcctaatcacataacctattcccccgagcaatttcaattacaatatatacaccaacaaacaatgttcaaccagtaactactactaatcaacgcccataatcatacaaagcccccgcaccaataggatcctcccgaatcaaccctgacccctctccttcataaattattcagcttcctacactattaaagtttaccacaaccaccaccccatcatactctttcacccacagcaccaatcctacctccatcgctaaccccactaaaacactcaccaagacctcaacccctgacccccatgcctcaggatactcctcaatagccatcgctgtagtatatccaaagacaaccatcattccccctaaataaattaaaaaaactattaaacccatataacctcccccaaaattcagaataataacacacccgaccacaccgctaacaatcaatactaaacccccataaataggagaaggcttagaagaaaaccccacaaaccccattactaaacccacactcaacagaaacaaagcatacatcattattctcgcacggactacaaccacgaccaatgatatgaaaaaccatcgttgtatttcaactacaagaacaccaatgaccccaatacgcaaaattaaccccctaataaaattaattaaccactcactcatcgacctccccaccccatccaacatctccgcatgatgaaacttcggctcactccttggcgcctgcctgatcctccaaatcaccacaggactattcctagccatgcactactcaccagacgcctcaaccgccttttcatcaatcgcccacatcactcgagacgtaaattatggctgaatcatccgctaccttcacgccaatggcgcctcaatattctttatctgcctcttcctacacatcgggcgaggcctatattacggatcatttctctactcagaaacctgaaacatcggcattatcctcctgcttgcaactatagcaacagccttcataggctatgtcctcccgtgaggccaaatatcattctgaggggccacagtaattacaaacttactatccgccatcccatacattgggacagacctagttcaatgaatctgaggaggctactcagtagacagtcccaccctcacacgattctttacctttcacttcatcttgcccttcattattgcagccctagcagcactccacctcctattcttgcacgaaacgggatcaaacaaccccctaggaatcacctcccattccgataaaatcaccttccacccttactacacaatcaaagacgccctcggcttacttctcttccttctctccttaatgacattaacactattctcaccagacctcctaggcgacccagacaattataccctagccaaccccttaaacacccctccccacatcaagcccgaatgatatttcctattcgcctacacaattctccgatccgtccctaacaaactaggaggcgtccttgccctattactatccatcctcatcctagcaataatccccatcctccatatatccaaacaacaaagcataatatttcgcccactaagccaatcactttattgactcctagccgcagacctcctcattctaacctgaatcggaggacaaccagtaagctacccttttaccatcattggacaagtagcatccgtactatacttcacaacaatcctaatcctaataccaactatctccctaattgaaaacaaaatactcaaatgggcctgtccttgtagtataaactaatacaccagtcttgtaaaccggagatgaaaacctttttccaaggacaaatcagagaaaaagtctttaactccaccattagcacccaaagctaagattctaatttaaactattctctgttctttcatggggaagcagatttgggtaccacccaagtattgactcacccatcaacaaccgctatgtatttcgtacattactgccagccaccatgaatattgtacggtaccataaatacttgaccacctgtagtacataaaaacccaatccacatcaaaaccccctccccatgcttacaagcaagtacagcaatcaacccccaactatcacacatcaactgcaactccaaagccacccctcacccactaggataccaacaaacctacccacccttaacagtacatagcacataaagccatttaccgtacatagcacattacagtcaaatcccttctcgtccccatggatgacccccctcagataggggtcccttgaccaccatcctccgtgaaatcaatatcccgcacaagagtgctactctcctcgctccgggcccataacacttgggggtagctaaagtgaactgtatccgacatctggttcctacttcagggccataaagcctaaatagcccacacgttccccttaaataagacatcacgatg

SEQ ID NO: 298 - DNA, 16570 bp, Homo sapiens mitochondrial
  3108: "n" refers to a nucleotide at position 3107 of the Cambridge Reference Sequence (CRS, Anderson et al. 1981 Nature 290:457-465), later determined to be absent from the human mtDNA sequence according to the revised CRS (rCRS, Andrews et al. 1999 Nature Genetics 23:147); "n" therefore represents a single nucleotide deletion at a position corresponding to nucleotide 3107 of SEQ ID NO:1 as provided herein.
gatcacaggtctatcaccctattaaccactcacgggagctctccatgcatttggtattttcgtctggggggtgtgcacgcgatagcattgcgagacgctggagccggagcaccctatgtcgcagtatctgtctttgattcctgcctcatcctattatttatcgcacctacgttcaatattacaggcgaacatacctactaaagtgtgttaattaattaatgcttacaggacataataataacaattgaatgtctgcacagccgctttccacacagacatcataacaaaaaatttccaccaaaccccccctcccccgccttctggccacagcacttaaacacatctctgccaaaccccaaaaacaaagaaccctaacaccagcctaaccagatttcaaattttatcttttggcggtatgcacttttaacagtcaccccccaactaacacattattttcccctcccactcccatactactaatctcatcaatacaacccccgcccatcctacccagcacacacacaccgctgctaaccccataccccgaaccaaccaaaccccaaagacaccccccacagtttatgtagcttacctcctcaaagcaatacactgaaaatgtttagacgggctcacatcaccccataaacaaataggtttggtcctagcctttctattagctcttagtaagattacacatgcaagcatccccgttccagtgagttcaccctctaaatcaccacgatcaaaagggacaagcatcaagcacgcagcaatgcagctcaaaacgcttagcctagccacacccccacgggaaacagcagtgattaacctttagcaataaacgaaagtttaactaagctatactaaccccagggttggtcaatttcgtgccagccaccgcggtcacacgattaacccaagtcaatagaagccggcgtaaagagtgttttagatcaccccctccccaataaagctaaaactcacctgagttgtaaaaaactccagttgacacaaaatagactacgaaagtggctttaacatatctgaacacacaatagctaagacccaaactgggattagataccccactatgcttagccctaaacctcaacagttaaatcaacaaaactgctcgccagaacactacgagccacagcttaaaactcaaaggacctggcggtgcttcatatccctctagaggagcctgttctgtaatcgataaaccccgatcaacctcaccacctcttgctcagcctatataccgccatcttcagcaaaccctgatgaaggctacaaagtaagcgcaagtacccacgtaaagacgttaggtcaaggtgtagcccatgaggtggcaagaaatgggctacattttctaccccagaaaactacgatagcccttatgaaacttaagggtcgaaggtggatttagcagtaaactgagagtagagtgcttagttgaacagggccctgaagcgcgtacacaccgcccgtcaccctcctcaagtatacttcaaaggacatttaactaaaacccctacgcatttatatagaggagacaagtcgtaacatggtaagtgtactggaaagtgcacttggacgaaccagagtgtagcttaacacaaagcacccaacttacacttaggagatttcaacttaacttgaccgctctgagctaaacctagccccaaacccactccaccttactaccagacaaccttaaccaaaccatttacccaaataaagtataggcgatagaaattgaaacctggcgcaatagatatagtaccgcaagggaaagatgaaaaattataaccaagcataatatagcaaggactaacccctataccttctgcataatgaattaactagaaataactttgcaaggagagccaaagctaagacccccgaaaccagacgagctacctaagaacagctaaaagagcacacccgtctatgtagcaaaatagtgggaagatttataggtagaggcgacaaacctaccgagcctggtgatagctggttgtccaagatagaatcttagttcaactttaaatttgcccacagaaccctctaaatccccttgtaaatttaactgttagtccaaagaggaacagctctttggacactaggaaaaaaccttgtagagagagtaaaaaatttaacacccatagtaggcctaaaagcagccaccaattaagaaagcgttcaagctcaacacccactacctaaaaaatcccaaacatataactgaactcctcacacccaattggaccaatctatcaccctatagaagaactaatgttagtataagtaacatgaaaacattctcctccgcataagcctgcgtcagattaaaacactgaactgacaattaacagcccaatatctacaatcaaccaacaagtcattattaccctcactgtcaacccaacacaggcatgctcataaggaaaggttaaaaaaagtaaaaggaactcggcaaatcttaccccgcctgtttaccaaaaacatcacctctagcatcaccagtattagaggcaccgcctgcccagtgacacatgtttaacggccgcggtaccctaaccgtgcaaaggtagcataatcacttgttccttaaatagggacctgtatgaatggctccacgagggttcagctgtctcttacttttaaccagtgaaattgacctgcccgtgaagaggcgggcatgacacagcaagacgagaagaccctatggagctttaatttattaatgcaaacagtacctaacaaacccacaggtcctaaactaccaaacctgcattaaaaatttcggttggggcgacctcggagcagaacccaacctccgagcagtacatgctaagacttcaccagtcaaagcgaactactatactcaattgatccaataacttgaccaacggaacaagttaccctagggataacagcgcaatcctattctagagtccatatcaacaatagggtttacgacctcgatgttggatcaggacatcccgatggtgcagccgctattaaaggttcgtttgttcaacgattaaagtcctacgtgatctgagttcagaccggagtaatccaggtcggtttctatctacnttcaaattcctccctgtacgaaaggacaagagaaataaggcctacttcacaaagcgccttcccccgtaaatgatatcatctcaacttagtattatacccacacccacccaagaacagggtttgttaagatggcagagcccggtaatcgcataaaacttaaaactttacagtcagaggttcaattcctcttcttaacaacatacccatggccaacctcctactcctcattgtacccattctaatcgcaatggcattcctaatgcttaccgaacgaaaaattctaggctatatacaactacgcaaaggccccaacgttgtaggcccctacgggctactacaacccttcgctgacgccataaaactcttcaccaaagagcccctaaaacccgccacatctaccatcaccctctacatcaccgccccgaccttagctctcaccatcgctcttctactatgaacccccctccccatacccaaccccctggtcaacctcaacctaggcctcctatttattctagccacctctagcctagccgtttactcaatcctctgatcagggtgagcatcaaactcaaactacgccctgatcggcgcactgcgagcagtagcccaaacaatctcatatgaagtcaccctagccatcattctactatcaacattactaataagtggctcctttaacctctccacccttatcacaacacaagaacacctctgattactcctgccatcatgacccttggccataatatgatttatctccacactagcagagaccaaccgaacccccttcgaccttgccgaaggggagtccgaactagtctcaggcttcaacatcgaatacgccgcaggccccttcgccctattcttcatagccgaatacacaaacattattataataaacaccctcaccactacaatcttcctaggaacaacatatgacgcactctcccctgaactctacacaacatattttgtcaccaagaccctacttctaacctccctgttcttatgaattcgaacagcatacccccgattccgctacgaccaactcatacacctcctatgaaaaaacttcctaccactcaccctagcattacttatatgatatgtctccatacccattacaatctccagcattccccctcaaacctaagaaatatgtctgataaaagagttactttgatagagtaaataataggagcttaaacccccttatttctaggactatgagaatcgaacccatccctgagaatccaaaattctccgtgccacctatcacaccccatcctaaagtaaggtcagctaaataagctatcgggcccataccccgaaaatgttggttatacccttcccgtactaattaatcccctggcccaacccgtcatctactctaccatctttgcaggcacactcatcacagcgctaagctcgcactgattttttacctgagtaggcctagaaataaacatgctagcttttattccagttctaaccaaaaaaataaaccctcgttccacagaagctgccatcaagtatttcctcacgcaagcaaccgcatccataatccttctaatagctatcctcttcaacaatatactctccggacaatgaaccataaccaatactaccaatcaatactcatcattaataatcataatggctatagcaataaaactaggaatagccccctttcacttctgagtcccagaggttacccaaggcacccctctgacatccggcctgcttcttctcacatgacaaaaactagcccccatctcaatcatataccaaatctctccctcactaaacgtaagccttctcctcactctctcaatcttatccatcatagcaggcagttgaggtggattaaaccaaacccagctacgcaaaatcttagcatactcctcaattacccacataggatgaataatagcagttctaccgtacaaccctaacataaccattcttaatttaactatttatattatcctaactactaccgcattcctactactcaacttaaactccagcaccacgaccctactactatctcgcacctgaaacaagctaacatgactaacacccttaattccatccaccctcctctccctaggaggcctgcccccgctaaccggctttttgcccaaatgggccattatcgaagaattcacaaaaaacaatagcctcatcatccccaccatcatagccaccatcaccctccttaacctctacttctacctacgcctaatctactccacctcaatcacactactccccatatctaacaacgtaaaaataaaatgacagtttgaacatacaaaacccaccccattcctccccacactcatcgcccttaccacgctactcctacctatctccccttttatactaataatcttatagaaatttaggttaaatacagaccaagagccttcaaagccctcagtaagttgcaatacttaatttctgtaacagctaaggactgcaaaaccccactctgcatcaactgaacgcaaatcagccactttaattaagctaagcccttactagaccaatgggacttaaacccacaaacacttagttaacagctaagcaccctaatcaactggcttcaatctacttctcccgccgccgggaaaaaaggcgggagaagccccggcaggtttgaagctgcttcttcgaatttgcaattcaatatgaaaatcacctcggagctggtaaaaagaggcctaacccctgtctttagatttacagtccaatgcttcactcagccattttacctcacccccactgatgttcgccgaccgttgactattctctacaaaccacaaagacattggaacactatacctattattcggcgcatgagctggagtcctaggcacagctctaagcctccttattcgagccgagctgggccagccaggcaaccttctaggtaacgaccacatctacaacgttatcgtcacagcccatgcatttgtaataatcttcttcatagtaatacccatcataatcggaggctttggcaactgactagttcccctaataatcggtgcccccgatatggcgtttccccgcataaacaacataagcttctgactcttacccccctctctcctactcctgctcgcatctgctatagtggaggccggagcaggaacaggttgaacagtctatcctcccttagcagggaactactcccaccctggagcctccgtagacctaaccatcttctccttacacctagcaggtgtctcttctatcttaggggccatcaatttcatcacaacaattatcaatataaaaccccctgccataacccaataccaaacgcccctcttcgtctgatccgtcctaatcacagcagtcctacttctcctatctctcccagtcctagctgctggcatcactatactactaacagaccgcaacctcaacaccaccttcttcgaccccgccggaggaggagaccccattctataccaacacctattctgatttttcggtcaccctgaagtttatattcttatcctaccaggcttcggaataatctcccatattgtaacttactactccggaaaaaaagaaccatttggatacataggtatggtctgagctatgatatcaattggcttcctagggtttatcgtgtgagcacaccatatatttacagtaggaatagacgtagacacacgagcatatttcacctccgctaccataatcatcgctatccccaccggcgtcaaagtatttagctgactcgccacactccacggaagcaatatgaaatgatctgctgcagtgctctgagccctaggattcatctttcttttcaccgtaggtggcctgactggcattgtattagcaaactcatcactagacatcgtactacacgacacgtactacgttgtagctcacttccactatgtcctatcaataggagctgtatttgccatcataggaggcttcattcactgatttcccctattctcaggctacaccctagaccaaacctacgccaaaatccatttcactatcatattcatcggcgtaaatctaactttcttcccacaacactttctcggcctatccggaatgccccgacgttactcggactaccccgatgcatacaccacatgaaacatcctatcatctgtaggctcattcatttctctaacagcagtaatattaataattttcatgatttgagaagccttcgcttcgaagcgaaaagtcctaatagtagaagaaccctccataaacctggagtgactatatggatgccccccaccctaccacacattcgaagaacccgtatacataaaatctagacaaaaaaggaaggaatcgaaccccccaaagctggtttcaagccaaccccatggcctccatgactttttcaaaaaggtattagaaaaaccatttcataactttgtcaaagttaaattataggctaaatcctatatatcttaatggcacatgcagcgcaagtaggtctacaagacgctacttcccctatcatagaagagcttatcacctttcatgatcacgccctcataatcattttccttatctgcttcctagtcctgtatgcccttttcctaacactcacaacaaaactaactaatactaacatctcagacgctcaggaaatagaaaccgtctgaactatcctgcccgccatcatcctagtcctcatcgccctcccatccctacgcatcctttacataacagacgaggtcaacgatccctcccttaccatcaaatcaattggccaccaatggtactgaacctacgagtacaccgactacggcggactaatcttcaactcctacatacttcccccattattcctagaaccaggcgacctgcgactccttgacgttgacaatcgagtagtactcccgattgaagcccccattcgtataataattacatcacaagacgtcttgcactcatgagctgtccccacattaggcttaaaaacagatgcaattcccggacgtctaaaccaaaccactttcaccgctacacgaccgggggtgtactacggtcaatgctctgaaatctgtggagcaaaccacagtttcatgcccatcgtcctagaattaattcccctaaaaatctttgaaatagggcccgtatttaccctatagcaccccctctaccccctctagagcccactgtaaagctaacttagcattaaccttttaagttaaagattaagagaaccaacacctctttacagtgaaatgccccaactaaatactaccgtatggtccaccataattacccccatactccttacactattcctcatcacccaactaaaaatattaaacacaaactaccacctacctccctcaccaaagcccataaaaataaaaaattataacaaaccctgagaaccaaaatgaacgaaaatctgttcgcttcattcattgcccccacaatcctaggcctacccgccgcagtactgatcattctatttccccctctattgatccccacctccaaatatctcatcaacaaccgactaatcaccacccaacaatgactaatcaaactaacctcaaaacaaatgataaccatacacaacactaaaggacgaacctgatctcttatactagtatccttaatcatttttattgccacaactaacctcctcggactcctgcctcactcatttacaccaaccacccaactatctataaacctagccatggccatccccttatgagcgggcgcagtgattataggctttcgctctaagattaaaaatgccctagcccacttcttaccacaaggcacacctacaccccttatccccatactagttattatcgaaaccatcagcctactcattcaaccaatagccctggccgtacgcctaaccgctaacattactgcaggccacctactcatgcacctaattggaagcgccaccctagcaatatcaaccattaaccttccctctacacttatcatcttcacaattctaattctactgactatcctagaaatcgctgtcgccttaatccaagcctacgttttcacacttctagtaagcctctacctgcacgacaacacataatgacccaccaatcacatgcctatcatatagtaaaacccagcccatgacccctaacaggggccctctcagccctcctaatgacctccggcctagccatgtgatttcacttccactccataacgctcctcatactaggcctactaaccaacacactaaccatataccaatgatggcgcgatgtaacacgagaaagcacataccaaggccaccacacaccacctgtccaaaaaggccttcgatacgggataatcctatttattacctcagaagtttttttcttcgcaggatttttctgagccttttaccactccagcctagcccctaccccccaattaggagggcactggcccccaacaggcatcaccccgctaaatcccctagaagtcccactcctaaacacatccgtattactcgcatcaggagtatcaatcacctgagctcaccatagtctaatagaaaacaaccgaaaccaaataattcaagcactgcttattacaattttactgggtctctattttaccctcctacaagcctcagagtacttcgagtctcccttcaccatttccgacggcatctacggctcaacattttttgtagccacaggcttccacggacttcacgtcattattggctcaactttcctcactatctgcttcatccgccaactaatatttcactttacatccaaacatcactttggcttcgaagccgccgcctgatactggcattttgtagatgtggtttgactatttctgtatgtctccatctattgatgagggtcttactcttttagtataaatagtaccgttaacttccaattaactagttttgacaacattcaaaaaagagtaataaacttcgccttaattttaataatcaacaccctcctagccttactactaataattattacattttgactaccacaactcaacggctacatagaaaaatccaccccttacgagtgcggcttcgaccctatatcccccgcccgcgtccctttctccataaaattcttcttagtagctattaccttcttattatttgatctagaaattgccctccttttacccctaccatgagccctacaaacaactaacctgccactaatagttatgtcatccctcttattaatcatcatcctagccctaagtctggcctatgagtgactacaaaaaggattagactgaaccgaattggtatatagtttaaacaaaacgaatgatttcgactcattaaattatgataatcatatttaccaaatgcccctcatttacataaatattatactagcatttaccatctcacttctaggaatactagtatatcgctcacacctcatatcctccctactatgcctagaaggaataatactatcgctgttcattatagctactctcataaccctcaacacccactccctcttagccaatattgtgcctattgccatactagtctttgccgcctgcgaagcagcggtgggcctagccctactagtctcaatctccaacacatatggcctagactacgtacataacctaaacctactccaatgctaaaactaatcgtcccaacaattatattactaccactgacatgactttccaaaaaacacataatttgaatcaacacaaccacccacagcctaattattagcatcatccctctactattttttaaccaaatcaacaacaacctatttagctgttccccaaccttttcctccgaccccctaacaacccccctcctaatactaactacctgactcctacccctcacaatcatggcaagccaacgccacttatccagtgaaccactatcacgaaaaaaactctacctctctatactaatctccctacaaatctccttaattataacattcacagccacagaactaatcatattttatatcttcttcgaaaccacacttatccccaccttggctatcatcacccgatgaggcaaccagccagaacgcctgaacgcaggcacatacttcctattctacaccctagtaggctcccttcccctactcatcgcactaatttacactcacaacaccctaggctcactaaacattctactactcactctcactgcccaagaactatcaaactcctgagccaacaacttaatatgactagcttacacaatagcttttatagtaaagatacctctttacggactccacttatgactccctaaagcccatgtcgaagcccccatcgctgggtcaatagtacttgccgcagtactcttaaaactaggcggctatggtataatacgcctcacactcattctcaaccccctgacaaaacacatagcctaccccttccttgtactatccctatgaggcataattataacaagctccatctgcctacgacaaacagacctaaaatcgctcattgcatactcttcaatcagccacatagccctcgtagtaacagccattctcatccaaaccccctgaagcttcaccggcgcagtcattctcataatcgcccacggacttacatcctcattactattctgcctagcaaactcaaactacgaacgcactcacagtcgcatcataatcctctctcaaggacttcaaactctactcccactaatagctttttgatgacttctagcaagcctcgctaacctcgccttaccccccactattaacctactgggagaactctctgtgctagtaaccacgttctcctgatcaaatatcactctcctacttacaggactcaacatactagtcacagccctatactccctctacatatttaccacaacacaatggggctcactcacccaccacattaacaacataaaaccctcattcacacgagaaaacaccctcatgttcatacacctatcccccattctcctcctatccctcaaccccgacatcattaccgggttttcctcttgtaaatatagtttaaccaaaacatcagattgtgaatctgacaacagaggcttacgaccccttatttaccgagaaagctcacaagaactgctaactcatgcccccatgtctaacaacatggctttctcaacttttaaaggataacagctatccattggtcttaggccccaaaaattttggtgcaactccaaataaaagtaataaccatgcacactactataaccaccctaaccctgacttccctaattccccccatccttaccaccctcgttaaccctaacaaaaaaaactcatacccccattatgtaaaatccattgtcgcatccacctttattatcagtctcttccccacaacaatattcatgtgcctagaccaagaagttattatctcgaactgacactgagccacaacccaaacaacccagctctccctaagcttcaaactagactacttctccataatattcatccctgtagcattgttcgttacatggtccatcatagaattctcactgtgatatataaactcagacccaaacattaatcagttcttcaaatatctactcattttcctaattaccatactaatcttagttaccgctaacaacctattccaactgttcatcggctgagagggcgtaggaattatatccttcttgctcatcagttgatgatacgcccgagcagatgccaacacagcagccattcaagcaatcctatacaaccgtatcggcgatatcggtttcatcctcgccttagcatgatttatcctacactccaactcatgagacccacaacaaatagcccttctaaacgctaatccaagcctcaccccactactaggcctcctcctagcagcagcaggcaaatcagcccaattaggtctccacccctgactcccctcagccatagaaggccccaccccagtctcagccctactccactcaagcactatagttgtagcaggaatcttcttactcatccgcttccaccccctagcagaaaatagcccactaatccaaactctaacactatgcttaggcgctatcaccactctgttcgcagcagtctgcgcccttacacaaaatgacatcaaaaaaatcgtagccttctccacttcaagtcaactaggactcataatagttacaatcggcatcaaccaaccacacctagcattcctgcacatctgtacccacgccttcttcaaagccatactatttatgtgctccgggtccatcatccacaaccttaacaatgaacaagatattcgaaaaataggaggactactcaaaaccatacctctcacttcaacctccctcaccattggcagcctagcattagcaggaatacctttcctcacaggtttctactccaaagaccacatcatcgaaaccgcaaacatatcatacacaaacgcctgagccctatctattactctcatcgctacctccctgacaagcgcctatagcactcgaataattcttctcaccctaacaggtcaacctcgcttccccacccttactaacattaacgaaaataaccccaccctactaaaccccattaaacgcctgacagccggaagcctattcgcaggatttctcattactaacaacatttcccccgcatcccccttccaaacaacaatccccctctacctaaaactcacagccctcgctgtcactttcctaggacttctaacagccctagacctcaactacctaaccaacaaacttaaaataaaatccccactatgcacattttatttctccaacatactcggattctaccctagcatcacacaccgcacaatcccctatctaggccttcttgcgagccaaaacctgcccctactcctcctagacctaacctgactagaaaagctattacctaaaacaatttcacagcaccaaatctccacctccatcatcacctcaacccaaaaaggcataattaaactttacttcctctctttcttcttcccactcatcctaaccctactcctaatcacataacctattcccccgagcaatctcaattacaatatatacaccaacaaacaatgttcaaccagtaactactactaatcaacgcccataatcatacaaagcccccgcaccaataggatcctcccgaatcaaccctgacccctctccttcataaattattcagcttcctacactattaaaatttaccacaaccaccaccccatcatactctttcacccacagcaccaatcctacctccatcgctaaccccactaaaacactcaccaagacctcaacccctgacccccatgcctcaggatactcctcaatagccatcgctgtagtatacccaaagacaaccatcattccccctaaataaattaaaaaaactattaaacccatataacctcccccaaaattcagaataataacacacccgaccacaccgctaacaatcaatactaaacccccataaataggagaaggcttagaagaaaaccccacaaaccccattactaaacccacactcaacagaaacaaagcatacatcattattctcgcacggactacaaccacgaccaatgatatgaaaaaccatcgttgtatttcaactacaagaacaccaatgaccccaatacgcaaaattaaccccctaataaaattaattaaccactcattcatcgacctccccaccccatccaacatctccgcatgatgaaacttcggctcactccttggcgcctgcctgatcctccaaatcaccacaggactattcctagccatgcactactcaccagacgcctcaaccgccttttcatcaatcgcccacatcactcgagacgtaaattatggctgaatcatccgctaccttcacgccaatggcgcctcaatattctttatctgcctcttcctacacatcgggcgaggcctatattacggatcatttctctactcagaaacctgaaacatcggcattatcctcctgcttgcaactatagcaacagccttcataggctatgtcctcccgtgaggccaaatatcattctgaggggccacagtaattacaaacttactatccgccatcccatacattgggacagacctagttcaatgaatctgaggaggctactcagtagacagtcccaccctcacacgattctttacctttcacttcatcttgcccttcattattgcagccctagcagcactccacctcctattcttgcacgaaacgggatcaaacaaccccctaggaatcacctcccattccgataaaatcaccttccacccttactacacaatcaaagacgccctcggcttacttctcttccttctctccttaatgacattaacactattctcaccagacctcctaggcgacccagacaattataccctagccaaccccttaaacacccctccccacatcaagcccgaatgatatttcctattcgcctacacaattctccgatccgtccctaacaaactaggaggcgtccttgccctattactatccatcctcatcctagcaataatccccatcctccatatatccaaacaacaaagcataatatttcgcccactaagccaatcactttattgactcctagccgcagacctcctcattctaacctgaatcggaggacaaccagtaagctacccttttaccatcattggacaagtagcatccgtactatacttcacaacaatcctaatcctaataccaactatctccctaattgaaaacaaaatactcaaatgggcctgtccttgtagtataaactaatacaccagtcttgtaaaccagagatgaaaacctttttccaaggacaaatcagagaaaaagtctttaactccaccattagcacccaaagctaagattctaatttaaactattctctgttctttcatggggaagcagatttgggtaccacccaagtattgactcacccatcaacaaccgctatgtatttcgtacattactgccagccaccatgaatattgtacggtaccataaatacttgaccacctgtagtacataaaaacccaatccacatcaaacccccccccccatgcttacaagcaagtacagcaatcaaccttcaactatcacacatcaactgcaactccaaagccacccctcacccactaggatatcaacaaacctacccacccttaacagtacatagtacataaagccatttaccgtacatagcacattacagtcaaatcccttctcgtccccatggatgacccccctcagataggggtcccttgaccaccatcctccgtgaaatcaatatcccgcacaagagtgctactctcctcgctccgggcccataacacttgggggtagctaaagtgaactgtatccgacatctggttcctacttcagggccataaagcctaaatagcccacacgttccccttaaataagacatcacgatg

SEQ ID NO: 299 - DNA, 16571 bp, Homo sapiens mitochondrial
  3109: "n" refers to a nucleotide at position 3107 of the Cambridge Reference Sequence (CRS, Anderson et al. 1981 Nature 290:457-465), later determined to be absent from the human mtDNA sequence according to the revised CRS (rCRS, Andrews et al. 1999 Nature Genetics 23:147); "n" therefore represents a single nucleotide deletion at a position corresponding to nucleotide 3107 of SEQ ID NO:1 as provided herein.
gatcacaggtctatcaccctattaaccactcacgggagctctccatgcatttggtattttcgtctggggggtgtgcacgcgatagcattgcgagacgctggagccggagcaccctatgtcgcagtatctgtctttgattcctgcctcatcccattatttatcgcacctacgttcaatattacaggcgaacatacttaccaaagcgtattaattaattaatgcttgtaggacataataataacaattgaacgtctgcacagccgctttccacacagacatcataacaaaaaatttccaccaaaccccccctcccccccgcttctggccacagcacttaaacacatctctgccaaaccccaaaaacaaagaaccctaacaccagcctaaccagatttcaaattttatcttttggcggtatgcacttttaacagtcaccccccaactaacacattattttcccctcccactcccatactactaatctcatcaatacaacccccgcccatcctacccagcacacacacaccgctgctaaccccataccccgaaccaaccaaaccccaaagacaccccccacagtttatgtagcttacctcctcaaagcaatacactgaaaatgtttagacgggctcacatcaccccataaacaaataggtttggtcctagcctttctattagctcttagtaagattacacatgcaagcatccccgttccagtgagttcaccctctaaatcaccacgatcaaaagggacaagcatcaagcacgcagcaatgcagctcaaaacgcttagcctagccacacccccacgggaaacagcagtgattaacctttagcaataaacgaaagtttaactaagctatactaaccccagggttggtcaatttcgtgccagccaccgcggtcacacgattaacccaagtcaatagaagccggcgtaaagagtgttttagatcaccccctccccaataaagctaaaactcacctgagttgtaaaaaactccagttgacacaaaatagactacgaaagtggctttaacatatctgaacacacaatagctaagacccaaactgggattagataccccactatgcttagccctaaacctcaacagttaaatcaacaaaactgctcgccagaacactacgagccacagcttaaaactcaaaggacctggcggtgcttcatatccctctagaggagcctgttctgtaatcgataaaccccgatcaacctcaccacctcttgctcagcctatataccgccatcttcagcaaaccctgatgaaggctacaaagtaagcgcaagtacccacgtaaagacgttaggtcaaggtgtagcccatgaggtggcaagaaatgggctacattttctaccccagaaaactacgatagcccttatgaaacttaagggtcgaaggtggatttagcagtaaactgagagtagagtgcttagttgaacagggccctgaagcgcgtacacaccgcccgtcaccctcctcaagtatacttcaaaggacatttaactaaaacccctacgcatttatatagaggagacaagtcgtaacatggtaagtgtactggaaagtgcacttggacgaaccagagtgtagcttaacacaaagcacccaacttacacttaggagatttcaacttaacttgaccgctctgagctaaacctagccccaaacccactccaccttactaccagacaaccttaaccaaaccatttacccaaataaagtataggcgatagaaattgaaacctggcgcaatagatatagtaccgcaagggaaagatgaaaaattataaccaagcataatatagcaaggactaacccctataccttctgcataatgaattaactagaaataactttgcaaggagagccaaagctaagacccccgaaaccagacgagctacctaagaacagctaaaagagcacacccgtctatgtagcaaaatagtgggaagatttataggtagaggcgacaaacctaccgagcctggtgatagctggttgtccaagatagaatcttagttcaactttaaatttgcccacagaaccctctaaatccccttgtaaatttaactgttagtccaaagaggaacagctctttggacactaggaaaaaaccttgtagagagagtaaaaaatttaacacccatagtaggcctaaaagcagccaccaattaagaaagcgttcaagctcaacacccactacctaaaaaatcccaaacatataactgaactcctcacacccaattggaccaatctatcaccctatagaagaactaatgttagtataagtaacatgaaaacattctcctccgcataagcctgcgtcagattaaaacactgaactgacaattaacagcccaatatctacaatcaaccaacaagtcattattaccctcactgtcaacccaacacaggcatgctcataaggaaaggttaaaaaaagtaaaaggaactcggcaaatcttaccccgcctgtttaccaaaaacatcacctctagcatcaccagtattagaggcaccgcctgcccagtgacacatgtttaacggccgcggtaccctaaccgtgcaaaggtagcataatcacttgttccttaaatagggacctgtatgaatggctccacgagggttcagctgtctcttacttttaaccagtgaaattgacctgcccgtgaagaggcgggcatgacacagcaagacgagaagaccctatggagctttaatttattaatgcaaacagtacctaacaagcccacaggtcctaaactaccaaacctgcattaaaaatttcggttggggcgacctcggagcagaacccaacctccgagcagtacatgctaagacttcaccagtcaaagcgaactactatactcaattgatccaataacttgaccaacggaacaagttaccctagggataacagcgcaatcctattctagagtccatatcaacaatagggtttacgacctcgatgttggatcaggacatcccgatggtgcagccgctattaaaggttcgtttgttcaacgattaaagtcctacgtgatctgagttcagaccggagtaatccaggtcggtttctatctacnttcaaattcctccctgtacgaaaggacaagagaaataaggcctacttcacaaagcgccttcccccgtaaatgatatcatctcaacttagtattatacccacacccacccaagaacagggtttgttaagatggcagagcccggtaatcgcataaaacttaaaactttacagtcagaggttcaattcctcttcttaacaacatacccatggccaacctcctactcctcattgtacccattctaatcgcaatggcattcctaatgcttaccgaacgaaaaattctaggctatatacaactacgcaaaggccccaacgttgtaggcccctacgggctactacaacccttcgctgacgccataaaactcttcaccaaagagcccctaaaacccgccacatctaccatcaccctctacatcaccgccccgaccttagctctcaccatcgctcttctactatgaacccccctccccatacccaaccccctggtcaacctcaacctaggcctcctatttattctagccacctctagcctagccgtttactcaatcctctgatcagggtgagcatcaaactcaaactacgccctgatcggcgcactgcgagcagtagcccaaacaatctcatatgaagtcaccctagccatcattctactatcaacattactaataagtggctcctttaacctctccacccttatcacaacacaagaacacctctgattactcctgccatcatgacccttggccataatatgatttatctccacactagcagagaccaaccgaacccccttcgaccttgccgaaggggagtccgaactagtctcaggcttcaacatcgaatacgccgcaggccccttcgccctattcttcatagccgaatacacaaacattattataataaacaccctcaccactacaatcttcctaggaacaacatatgacgcactctcccctgaactctacacaacatattttgtcaccaagaccctacttctaacctccctgttcttatgaattcgaacagcatacccccgattccgctacgaccaactcatacacctcctatgaaaaaacttcctaccactcaccctagcattacttatatgatatgtctccatacccattacaatctccagcattccccctcaaacctaagaaatatgtctgataaaagagttactttgatagagtaaataataggagcttaaacccccttatttctaggactatgagaatcgaacccatccctgagaatccaaaattctccgtgccacctatcacaccccatcctaaagtaaggtcagctaaataagctatcgggcccataccccgaaaatgttggttatacccttcccgtactaattaatcccctggcccaacccgtcatctactctaccatctttgcaggcacactcatcactgcgctaagctcgcactgattttttacctgagtaggcctagaaataaacatgctagcttttattccagttctaaccaaaaaaataaaccctcgttccacagaagctgccatcaagtatttcctcacgcaagcaaccgcatccataatccttctaatagctatcctcttcaacaatatactctccggacaatgaaccataaccaatactaccaatcaatactcatcattaataatcataatggctatagcaataaaactaggaatagccccctttcacttctgagtcccagaggttacccaaggcacccctctgacatccggcctgcttcttctcacatgacaaaaactagcccccatctcaatcatataccaaatctctccctcactaaacgtaagccttctcctcactctctcaatcttatccatcatagcaggcagttgaggtggattaaaccaaacccagctacgcaaaatcttagcatactcctcaattacccacataggatgaataatagcagttctaccgtacaaccctaacataaccattcttaatttaactatttatattatcctaactactaccgcattcctactactcaacttaaactccagcaccacgaccctactactatctcgcacctgaaacaagctaacatgactaacacccttaattccatccaccctcctctccctaggaggcctgcccccgctaaccggctttttgcccaaatgggccattatcgaagaattcacaaaaaacaatagcctcatcatccccaccatcatagccaccatcaccctccttaacctctacttctacctacgcctaatctactccacctcaatcacactactccccatatctaacaacgtaaaaataaaatgacagtttgaacatacaaaacccaccccattcctccccacactcatcgcccttaccacgctactcctacctatctccccttttatactaataatcttatagaaatttaggttaaatacagaccaagagccttcaaagccctcagtaagttgcaatacttaatttctgtaacagctaaggactgcaaaaccccactctgcatcaactgaacgcaaatcagccactttaattaagctaagcccttactagaccaatgggacttaaacccacaaacacttagttaacagctaagcaccctaatcaactggcttcaatctacttctcccgccgccgggaaaaaaggcgggagaagccccggcaggtttgaagctgcttcttcgaatttgcaattcaatatgaaaatcacctcggagctggtaaaaagaggcctaacccctgtctttagatttacagtccaatgcttcactcagccattttacctcacccccactgatgttcgccgaccgttgactattctctacaaaccacaaagacattggaacactatacctattattcggcgcatgagctggagtcctaggcacagctctaagcctccttattcgagccgagctgggccagccaggcaaccttctaggtaacgaccacatctacaacgttatcgtcacagcccatgcatttgtaataatcttcttcatagtaatacccatcataatcggaggctttggcaactgactagttcccctaataatcggtgcccccgatatggcgtttccccgcataaacaacataagcttctgactcttacctccctctctcctactcctgctcgcatctgctatagtggaggccggagcaggaacaggttgaacagtctaccctcccttagcagggaactactcccaccctggagcctccgtagacctaaccatcttctccttacacctagcaggtgtctcctctatcttaggggccatcaatttcatcacaacaattatcaatataaaaccccctgccataacccaataccaaacgcccctcttcgtctgatccgtcctaatcacagcagtcctacttctcctatctctcccagtcctagctgctggcatcactatactactaacagaccgcaacctcaacaccaccttcttcgaccccgccggaggaggagaccccattctataccaacacctattctgatttttcggtcaccctgaagtttatattcttatcctaccaggcttcggaataatctcccatattgtaacttactactccggaaaaaaagaaccatttggatacataggtatggtctgagctatgatatcaattggcttcctagggtttatcgtgtgagcacaccatatatttacagtaggaatagacgtagacacacgagcatatttcacctccgctaccataatcatcgctatccccaccggcgtcaaagtatttagctgactcgccacactccacggaagcaatatgaaatgatctgctgcagtgctctgagccctaggattcatctttcttttcaccgtaggtggcctgactggcattgtattagcaaactcatcactagacatcgtactacacgacacgtactacgttgtagctcacttccactatgtcctatcaataggagctgtatttgccatcataggaggcttcattcactgatttcccctattctcaggctacaccctagaccaaacctacgccaaaatccatttcactatcatattcatcggcgtaaatctaactttcttcccacaacactttctcggcctatccggaatgccccgacgttactcggactaccccgatgcatacaccacatgaaacatcctatcatctgtaggctcattcatttctctaacagcagtaatattaataattttcatgatttgagaagccttcgcttcgaagcgaaaagtcctaatagtagaagaaccctccataaacctggagtgactatatggatgccccccaccctaccacacattcgaagaacccgtatacataaaatctagacaaaaaaggaaggaatcgaaccccccaaagctggtttcaagccaaccccatggcctccatgactttttcaaaaaggtattagaaaaaccatttcataactttgtcaaagttaaattataggctaaatcctatatatcttaatggcacatgcagcgcaagtaggtctacaagacgctacttcccctatcatagaagagcttatcacctttcatgatcacgccctcataatcattttccttatctgcttcctagtcctgtatgcccttttcctaacactcacaacaaaactaactaatactaacatctcagacgctcaggaaatagaaaccgtctgaactatcctgcccgccatcatcctagtcctcatcgccctcccatccctacgcatcctttacataacagacgaggtcaacgatccctcccttaccatcaaatcaattggccaccaatggtactgaacctacgagtacaccgactacggcggactaatcttcaactcctacatacttcccccattattcctagaaccaggcgacctgcgactccttgacgttgacaatcgagtagtactcccgattgaagcccccattcgtataataattacatcacaagacgtcttgcactcatgagctgtccccacattaggcttaaaaacagatgcaattcccggacgtctaaaccaaaccactttcaccgctacacgaccgggggtatactacggtcaatgctctgaaatctgtggagcaaaccacagtttcatgcccatcgtcctagaattaattcccctaaaaatctttgaaataggacccgtatttaccctatagcaccccctctaccccctctagagcccactgtaaagctaacttagcattaaccttttaagttaaagattaagagaaccaacacctctttacagtgaaatgccccaactaaatactaccgtatggcccaccataattacccccatactccttacactattcctcatcacccaactaaaaatattaaacacaaactaccacctacctccctcaccaaagcccataaaaataaaaaattataacaaaccctgagaaccaaaatgaacgaaaatctgttcgcttcattcattgcccccacaatcctaggcctacccgccgcagtactgatcattctatttccccctctattgatccccacctccaaatatctcatcaacaaccgactaatcaccacccaacaatgactaatcaaactaacctcaaaacaaatgataaccatacacaacactaaaggacgaacctgatctcttatactagtatccttaatcatttttattgccacaactaacctcctcggactcctgcctcactcatttacaccaaccacccaactatctataaacctagccatggccatccccttatgagcgggcgcagtgattataggctttcgctctaagattaaaaatgccctagcccacttcttaccacaaggcacacctacaccccttatccccatactagttattatcgaaaccatcagcctactcattcaaccaatagccctggccgtacgcctaaccgctaacattactgcaggccacctactcatgcacctaattggaagcgccaccctagcaatatcaaccattaaccttccctctacacttatcatcttcacaattctaattctactgactatcctagaaatcgctgtcgccttaatccaagcctacgttttcacacttctagtaagcctctacctgcacgacaacacataatgacccaccaatcacatgcctatcatatagtaaaacccagcccatgacccctaacaggggccctctcagccctcctaatgacctccggcctagccatgtgatttcacttccactccataacgctcctcatactaggcctactaaccaacacactaaccatataccaatgatggcgcgatgtaacacgagaaagcacataccaaggccaccacacaccacctgtccaaaaaggccttcgatacgggataatcctatttattacctcagaagtttttttcttcgcaggatttttctgagccttttaccactccagcctagcccctaccccccaattaggagggcactggcccccaacaggcatcaccccgctaaatcccctagaagtcccactcctaaacacatccgtattactcgcatcaggagtatcaatcacctgagctcaccatagtctaatagaaaacaaccgaaaccaaataattcaagcactgcttattacaattttactgggtctctattttaccctcctacaagcctcagagtacttcgagtctcccttcaccatttccgacggcatctacggctcaacattttttgtagccacaggcttccacggacttcacgtcattattggctcaactttcctcactatctgcttcatccgccaactaatatttcactttacatccaaacatcactttggcttcgaagccgccgcctgatactggcattttgtagatgtggtttgactatttctgtatgtctccatctattgatgagggtcttactcttttagtataaatagtaccgttaacttccaattaactagctttgacaacattcaaaaaagagtaataaacttcgccttaattttaataatcaacaccctcctagccttactactaataattattacattttgactaccacaactcaacggctacatagaaaaatccaccccttacgagtgcggcttcgaccctatatcccccgcccgcgtccctttctccataaaattcttcttagtagctatcaccttcttattatttgatctagaaattgccctccttttacccctaccatgagccctacaaacaactaacctgccactaatagttatgtcatccctcttattaatcatcatcctagccctaagtctggcctatgagtgactacaaaaaggattagactgagccgaattggtatatagtttaaacaaaacgaatgatttcgactcattaaattatgataatcatatttaccaaatgcccctcatttacataaatattatactagcatttaccatctcacttctaggaatactagtatatcgctcacacctcatatcctccctactatgcctagaaggaataatactatcgctgttcattatagctactctcataaccctcaacacccactccctcttagccaatattgtgcctattgccatactagtctttgccgcctgcgaagcagcggtgggcctagccctactagtctcaatctccaacacatatggcctagactacgtacataacctaaacctactccaatgctaaaactaatcgtcccaacaattatattactaccactgacatgactttccaaaaaacacataatttgaatcaacacaaccacccacagcctaattattagcatcatccctctactattttttaaccaaatcaacaacaacctatttagctgttccccaaccttttcctccgaccccctaacaacccccctcctaatactaactacctgactcctacccctcacaatcatggcaagccaacgccacttatccagtgaaccactatcacgaaaaaaactctacctctctatactaatctccctacaaatctccttaattataacattcacagccacagaactaatcatattttatatcttcttcgaaaccacacttatccccaccttggctatcatcacccgatgaggcaaccagccagaacgcctgaacgcaggcacatacttcctattctacaccctagtaggctcccttcccctactcatcgcactaatttacactcacaacaccctaggctcactaaacattctactactcactctcactgcccaagaactatcaaactcctgagccaacaacttaatatgactagcttacacaatagcttttatagtaaagatacctctttacggactccacttatgactccctaaagcccatgtcgaagcccccatcgctgggtcaatagtacttgccgcagtactcttaaaactaggcggctatggtataatacgcctcacactcattctcaaccccctgacaaaacacatagcctaccccttccttgtactatccctatgaggcataattataacaagctccatctgcctacgacaaacagacctaaaatcgctcattgcatactcttcaatcagccacatagccctcgtagtaacagccattctcatccaaaccccctgaagcttcaccggcgcagtcattctcataatcgcccacggacttacatcctcattactattctgcctagcaaactcaaactacgaacgcactcacagtcgcatcataatcctctctcaaggacttcaaactctactcccactaatagctttttgatgacttctagcaagcctcgctaacctcgccttaccccccactattaacctactgggagaactctctgtgctagtaaccacgttctcctgatcaaatatcactctcctacttacaggactcaacatactagtcacagccctatactccctctacatatttaccacaacacaatggggctcactcacccaccacattaacaacataaaaccctcattcacacgagaaaacaccctcatgttcatacacctatcccccattctcctcctatccctcaaccccgacatcattaccgggttttcctcttgtaaatatagtttaaccaaaacatcagattgtgaatctgacaacagaggcttacgaccccttatttaccgagaaagctcacaagaactgctaactcatgcccccatgtctaacaacatggctttctcaacttttaaaggataacagctatccattggtcttaggccccaaaaattttggtgcaactccaaataaaagtaataaccatgcacactactataaccaccctaaccctgacttccctaattccccccatccttaccaccctcgttaaccctaacaaaaaaaactcatacccccattatgtaaaatccattgtcgcatccacctttattatcagtctcttccccacaacaatattcatatgcctagaccaagaagttattatctcgaactgacactgagccacaacccaaacaacccagctctccctaagcttcaaactagactacttctccataatattcatccctgtagcattgttcgttacatggtccatcatagaattctcactgtgatatataaactcagacccaaacattaatcagttcttcaaatatctactcattttcctaattaccatactaatcttagttaccgctaacaacctattccaactgttcatcggctgagagggcgtaggaattatatccttcttgctcatcagttgatgatacgcccgagcagatgccaacacagcagccattcaagcaatcctatacaaccgtatcggcgatatcggtttcatcctcgccttagcatgatttatcctacactccaactcatgagacccacaacaaatagcccttctaaacgctaatccaagcctcaccccactactaggcctcctcctagcagcagcaggcaaatcagcccaattaggtctccacccctgactcccctcagccatagaaggccccaccccagtctcagccctactccactcaagcactatagttgtagcaggaatcttcttactcatccgcttccaccccctagcagaaaatagcccactaatccaaactctaacactatgcttaggcgctatcaccactctgttcgcagcagtctgcgcccttacacaaaatgacatcaaaaaaatcgtagccttctccacttcaagtcaactaggactcataatagttacaatcggcatcaaccaaccacacctagcattcctgcacatctgtacccacgccttcttcaaagccatactatttatgtgctccgggtccatcatccacaaccttaacaatgaacaagatattcgaaaaataggaggactactcaaaaccatacctctcacttcaacctccctcaccattggcagcctagcattagcaggaatacctttcctcacaggtttctactccaaagaccacatcatcgaaaccgcaaacatatcatacacaaacgcctgagccctatctattactctcatcgctacctccctgacaagcgcctatagcactcgaataattcttctcaccctaacaggtcaacctcgcttccccacccttactaacattaacgaaaataaccccaccctactaaaccccattaaacgcctggcagccggaagcctattcgcaggatttctcattactaacaacatttcccccgcatcccccttccaaacaacagtccccctctacctaaaactcacagccctcgctgtcactttcctaggacttctaacagccctagacctcaactacctaaccaacaaacttaaaataaaatccccactatgcacattttatttctccaacatactcggattctaccctagcatcacacaccgcacaatcccctatctaggccttcttacgagccaaaacctgcccctactcctcctagacctaacctgactagaaaagctattacctaaaacaatttcacagcaccaaatctccacctccatcatcacctcaacccaaaaaggcataattaaactttacttcctctctttcttcttcccactcatcctaaccctactcctaatcacataacctattcccccgagcaatctcaattacaatatatacaccaacaaacaatgttcaaccagtaactactactaatcaacgcccataatcatacaaagcccccgcaccaataggatcctcccgaatcaaccctgacccctctccttcataaattattcagcttcctacactattaaagtttaccacaaccaccaccccatcatactctttcacccacagcaccaatcctacctccatcgctaaccccactaaaacactcaccaagacctcaacccctgacccccatgcctcaggatactcctcaatagccatcgctgtagtatatccaaagacaaccatcattccccctaaataaattaaaaaaactattaaacccatataacctcccccaaaattcagaataataacacacccgaccacaccgctaacaatcaatactaaacccccataaataggagaaggcttagaagaaaaccccacaaaccccattactaaacccacactcaacagaaacaaagcatacatcattattctcgcacggactacaaccacgaccaatgatatgaaaaaccatcgttgtatttcaactacaagaacaccaatgaccccaatacgcaaaattaaccccctaataaaattaattaaccactcattcatcgacctccccaccccatccaacatctccgcatgatgaaacttcggctcactccttggcgcctgcctgatcctccaaatcaccacaggactattcctagccatgcactactcaccagacgcctcaaccgccttttcatcaatcgcccacatcactcgagacgtaaattatggctgaatcatccgctaccttcacgccaatggcgcctcaatattctttatctgcctcttcctacacatcggacgaggcctatattacggatcatttctctactcagaaacctgaaacatcggcattatcctcctgcttgcaactatagcaacagccttcataggctatgtcctcccgtgaggccaaatatcattctgaggggccacagtaattacaaacttactatccgccatcccatacattgggacagacctagttcaatgaatctgaggaggctactcagtagacagtcccaccctcacacgattctttacctttcacttcatcttgcccttcattattgcagccctagcagcactccacctcctattcttgcacgaaacgggatcaaacaaccccctaggaatcacctcccattccgataaaatcaccttccacccttactacacaatcaaagacgccctcggcttacttctcttccttctctccttaatgacattaacactattctcaccagacctcctaggcgacccagacaattataccctagccaaccccttaaacacccctccccacatcaagcccgaatgatatttcctattcgcctacacaattctccgatccgtccctaacaaactaggaggcgtccttgccctattactatccatcctcatcctagcaataatccccatcctccatatatccaaacaacaaagcataatatttcgcccactaagccaatcactttattgactcctagccgcagacctcctcattctaacctgagtcggaggacaaccagtaagctacccttttaccatcattggacaagtagcatccgtactatacttcacaacaatcctaatcctaataccaactatctccctaattgaaaacaaaatactcaaatgggcctgtccttgtagtataaactaatacaccagtcttgtaagccggagatgaaaacctttttccaaggacaaatcagagaaaaagtctttaactccaccattagcacccaaagctaagattctaatttaaactattctctgttctttcatggggaagcagatttgggtaccacccaagtattgactcacccatcaacaaccgctatgtatctcgtacattactgccagccaccatgaatattgtacagtaccataaatacttgaccacctgtagtacataaaaacccaatccacatcaaaaccccctccccatgcttacaagcaagtacagcaatcaaccttcaactatcacacatcaactgcaactccaaagccacccctcacccactaggataccaacaaacctacccacccttaacagtacatagtacataaagccatttaccgtacatagcacattacagtcaaatcccttctcgtccccatggatgacccccctcagataggaatcccttgaccaccatcctccgtgaaatcaatatcccgcacaagagtgctactctcctcgctccgggcccataacacttgggggtagctaaagtgaactgtatccgacatctggttcctacttcagggccataaagcctaaatagcccacacgttccccttaaataagacatcacgatg

SEQ ID NO: 300 - DNA, 16571 bp, Homo sapiens mitochondrial
  3109: "n" refers to a nucleotide at position 3107 of the Cambridge Reference Sequence (CRS, Anderson et al. 1981 Nature 290:457-465), later determined to be absent from the human mtDNA sequence according to the revised CRS (rCRS, Andrews et al. 1999 Nature Genetics 23:147); "n" therefore represents a single nucleotide deletion at a position corresponding to nucleotide 3107 of SEQ ID NO:1 as provided herein.
gatcacaggtctatcaccctattaaccactcacgggagctctccatgcatttggtattttcgtctggggggtatgcacgcgatagcattgcgagacgctggagccggagcaccctatgtcgcagtatctgtctttgattcctgcctcatcctattatttatcgcacctacgttcaatattacaggcgaacatacttactaaagtgtgttaattaattaatgcttgtaggacataataataacaattgaatgtctgcacagccgctttccacacagacatcataacaaaaaatttccaccaaacccccccccccccccgcttctggccacagcacttaaacacatctctgccaaaccccaaaaacaaagaaccctaacaccagcctaaccagatttcaaattttatcttttggcggtatgcacttttaacagtcaccccccaactaacacattattttcccctcccactcccatactactaatctcatcaatacaacccccgcccatcctacccagcacacacacaccgctgctaaccccataccccgaaccaaccaaaccccaaagacaccccccacagtttatgtagcttacctcctcaaagcaatacactgaaaatgtttagacgggctcacatcaccccataaacaaataggtttggtcctagcctttctattagctcttagtaagattacacatgcaagcatccccgttccagtgagttcaccctctaaatcaccacgatcaaaagggacaagcatcaagcacgcagcaatgcagctcaaaacgcttagcctagccacacccccacgggaaacagcagtgattaacctttagcaataaacgaaagtttaactaagctatactaaccccagggttggtcaatttcgtgccagccaccgcggtcacacgattaacccaagtcaatagaagccggcgtaaagagtgttttagatcaccccctccccaataaagctaaaactcacctgagttgtaaaaaactccagttgacacaaaatagactacgaaagtggctttaacatatctgaacacacaatagctaagacccaaactgggattagataccccactatgcttagccctaaacctcaacagttaaatcaacaaaactgctcgccagaacactacgagccacagcttaaaactcaaaggacctggcggtgcttcatatccctctagaggagcctgttctgtaatcgataaaccccgatcaacctcaccacctcttgctcagcctatataccgccatcttcagcaaaccctgatgaaggctacaaagtaagcgcaagtacccacgtaaagacgttaggtcaaggtgtagcccatgaggtggcaagaaatgggctacattttctaccccagaaaactacgatagcccttatgaaacttaagggtcgaaggtggatttagcagtaaactgagagtagagtgcttagttgaacagggccctgaagcgcgtacacaccgcccgtcaccctcctcaagtatacttcaaaggacatttaactaaaacccctacgcatttatatagaggagacaagtcgtaacatggtaagtgtactggaaagtgcacttggacgaaccagagtgtagcttaacacaaagcacccaacttacacttaggagatttcaacttaacttgaccgctctgagctaaacctagccccaaacccactccaccttactaccagacaaccttagccaaaccatttacccaaataaagtataggcgatagaaattgaaacctggcgcaatagatatagtaccgcaagggaaagatgaaaaattataaccaagcataatatagcaaggactaacccctataccttctgcataatgaattaactagaaataactttgcaaggagagccaaagctaagacccccgaaaccagacgagctacctaagaacagctaaaagagcacacccgtctatgtagcaaaatagtgggaagatttataggtagaggcgacaaacctaccgagcctggtgatagctggttgtccaagatagaatcttagttcaactttaaatttgcccacagaaccctctaaatccccttgtaaatttaactgttagtccaaagaggaacagctctttggacactaggaaaaaaccttgtagagagagtaaaaaatttaacacccatagtaggcctaaaagcagccaccaattaagaaagcgttcaagctcaacacccactacctaaaaaatcccaaacatataactgaactcctcacacccaattggaccaatctatcaccctatagaagaactaatgttagtataagtaacatgaaaacattctcctccgcataagcctgcgtcagattaaaacactgaactgacaattaacagcccaatatctacaatcaaccaacaagtcattattaccctcactgtcaacccaacacaggcatgctcataaggaaaggttaaaaaaagtaaaaggaactcggcaaatcttaccccgcctgtttaccaaaaacatcacctctagcatcaccagtattagaggcaccgcctgcccagtgacacatgtttaacggccgcggtaccctaaccgtgcaaaggtagcataatcacttgttccttaaatagggacctgtatgaatggctccacgagggttcagctgtctcttacttttaaccagtgaaattgacctgcccgtgaagaggcgggcataacacagcaagacgagaagaccctatggagctttaatttattaatgcaaacagtacctaacaaacccacaggtcctaaactaccaaacctgcattaaaaatttcggttggggcgacctcggagcagaacccaacctccgagcagtacatgctaagacttcaccagtcaaagcgaactactatactcaattgatccaataacttgaccaacggaacaagttaccctagggataacagcgcaatcctattctagagtccatatcaacaatagggtttacgacctcgatgttggatcaggacatcccaatggtgcagccgctattaaaggttcgtttgttcaacgattaaagtcctacgtgatctgagttcagaccggagtaatccaggtcggtttctatctacnttcaaattcctccctgtacgaaaggacaagagaaataaggcctacttcacaaagcgccttcccccgtaaatgatatcatctcaacttagtattatacccacacccacccaagaacagggtttgttaagatggcagagcccggtaatcgcataaaacttaaaactttacagtcagaggttcaattcctcttcttaacaacatacccatggccaacctcctactcctcattgtacccattctaatcgcaatggcattcctaatgcttaccgaacgaaaaattctaggctatatacaactacgcaaaggccccaacgttgtaggcccctacgggctactacaacccttcgctgacgccataaaactcttcaccaaagagcccctaaaacccgccacatctaccatcaccctctacatcaccgccccgaccttagctctcaccatcgctcttctactatgaacccccctccccatacccaaccccctggtcaacctcaacctaggcctcctatttattctagccacctctagcctagccgtttactcaatcctctgatcagggtgagcatcaaactcaaactacgccctgatcggcgcactgcgagcagtagcccaaacaatctcatatgaagtcaccctagccatcattctactatcaacattactaataagtggctcctttaacctctccacccttatcacaacacaagaacacctctgattactcctgccatcatgacccttggccataatatgatttatctccacactagcagagaccaaccgaacccccttcgaccttgccgaaggggagtccgaactagtctcaggcttcaacatcgaatacgccgcaggccccttcgccctattcttcatagccgaatacacaaacattattataataaacaccctcaccactacaatcttcctaggaacaacatatgacgcactctcccctgaactctacacaacatattttgtcaccaagaccctacttctaacctccctgttcttatgaattcgaacagcatacccccgattccgctacgaccaactcatacacctcctatgaaaaaacttcctaccactcaccctagcattacttatatgatatgtctccatacccattacaatctccagcattccccctcaaacctaagaaatatgtctgataaaagagttactttgatagagtaaataataggagcttaaacccccttatttctaggactatgagaatcgaacccatccctgagaatccaaaattctccgtgccacctatcacaccccatcctaaagtaaggtcagctaaataagctatcgggcccataccccgaaaatgttggttatacccttcccgtactaattaatcccctggcccaacccgtcatctactctaccatctttgcaggcacactcatcacagcgctaagctcgcactgattttttacctgagtaggcctagaaataaacatgctagcttttattccagttctaaccaaaaaaataaaccctcgttccacagaagctgccatcaagtatttcctcacgcaagcaaccgcatccataatccttctaatagctatcctcttcaacaatatactctccggacaatgaaccataaccaatactaccaatcaatactcatcattaataatcataatggctatagcaataaaactaggaatagccccctttcacttctgagtcccagaggttacccaaggcacccctctgacatccggcctgcttcttctcacatgacaaaaactagcccccatctcaatcatataccaaatctctccctcactaaacgtaagccttctcctcactctctcaatcttatccatcatagcaggcagttgaggtggattaaaccaaacccagctacgcaaaatcttagcatactcctcaattacccacataggatgaataatagcagttctaccgtacaaccctaacataaccattcttaatttaactatttatattatcctaactactaccgcattcctactactcaacttaaactccagcaccacgaccctactactatctcgcacctgaaacaagctaacatgactaacacccttaattccatccaccctcctctccctaggaggcctgcccccgctaaccggctttttgcccaaatgggccattatcgaagaattcacaaaaaacaatagcctcatcatccccaccatcatagccaccatcaccctccttaacctctacttctacctacgcctaatctactccacctcaatcacactactccccatatctaacaacgtaaaaataaaatgacagtttgaacatacaaaacccaccccattcctccccacactcatcgcccttaccacgctactcctacctatctccccttttatactaataatcttatagaaatttaggttaaatacagaccaagagccttcaaagccctcagtaagttgcaatacttaatttctgtaacagctaaggactgcaaaaccccactctgcatcaactgaacgcaaatcagccactttaattaagctaagcccttactagaccaatgggacttaaacccacaaacacttagttaacagctaagcaccctaatcaactggcttcaatctacttctcccgccgccgggaaaaaaggcgggagaagccccggcaggtttgaagctgcttcttcgaatttgcaattcaatatgaaaatcacctcggagctggtaaaaagaggcctaacccctgtctttagatttacagtccaatgcttcactcagccattttacctcacccccactgatgttcgccgaccgttgactattctctacaaaccacaaagacattggaacactatacctattattcggcgcatgagctggagtcctaggcacagctctaagcctccttattcgagccgagctgggccagccaggcaaccttctaggtaacgaccacatctacaacgttatcgtcacagcccatgcatttgtaataatcttcttcatagtaatacccatcataatcggaggctttggcaactgactagttcccctaataatcggtgcccccgatatggcgtttccccgcataaacaacataagcttctgactcttacctccctctctcctactcctgctcgcatctgctatagtggaggccggagcaggaacaggttgaacagtctaccctcccttagcagggaactactcccaccctggagcctccgtagacctaaccatcttctccttacacctagcaggtgtctcctctatcttaggggccatcaatttcatcacaacaattatcaatataaaaccccctgccataacccaataccaaacgcccctcttcgtctgatccgtcctaatcacagcagtcctacttctcctatctctcccagtcctagctgctggcatcactatactactaacagaccgcaacctcaacaccaccttcttcgaccccgccggaggaggagaccccattctataccaacacctattctgatttttcggtcaccctgaagtttatattcttatcctaccaggcttcggaataatctcccatattgtaacttactactccggaaaaaaagaaccatttggatacataggtatggtctgagctatgatatcaattggcttcctagggtttatcgtgtgagcacaccatatatttacagtaggaatagacgtagacacacgagcatatttcacctccgctaccataatcatcgctatccccaccggcgtcaaagtatttagctgactcgccacactccacggaagcaatatgaaatgatctgctgcagtgctctgagccctaggattcatctttcttttcaccgtaggtggcctgactggcattgtattagcaaactcatcactagacatcgtactacacgacacgtactacgttgtagcccacttccactatgtcctatcaataggagctgtatttgccatcataggaggcttcattcactgatttcccctattctcaggctacaccctagaccaaacctacgccaaaatccatttcactatcatattcatcggcgtaaatctaactttcttcccacaacactttctcggcctatccggaatgccccgacgttactcggactaccccgatgcatacaccacatgaaacatcctatcatctgtaggctcattcatttctctaacagcagtaatattaataattttcatgatttgagaagccttcgcttcgaagcgaaaagtcctaatagtagaagaaccctccataaacctggagtgactatatggatgccccccaccctaccacacattcgaagaacccgtatacataaaatctagacaaaaaaggaaggaatcgaaccccccaaagctggtttcaagccaaccccatggcctccatgactttttcaaaaaggtattagaaaaaccatttcataactttgtcaaagttaaattataggctaaatcctatatatcttaatggcacatgcagcgcaagtaggtctacaagacgctacttcccctatcatagaagagcttatcacctttcatgatcacgccctcataatcattttccttatctgcttcctagtcctgtatgcccttttcctaacactcacaacaaaactaactaatactaacatctcagacgctcaggaaatagaaaccgtctgaactatcctgcccgccatcatcctagtcctcatcgccctcccatccctacgcatcctttacataacagacgaggtcaacgatccctcccttaccatcaaatcaattggccaccaatggtactgaacctacgagtacaccgactacggcggactaatcttcaactcctacatacttcccccattattcctagaaccaggcgacctgcgactccttgacgttgacaatcgagtagtactcccgattgaagcccccattcgtataataattacatcacaagacgtcttgcactcatgagctgtccccacattaggcttaaaaacagatgcaattcccggacgtctaaaccaaaccactttcaccgctacacgaccgggggtatactacggtcaatgctctgaaatctgtggagcaaaccacagtttcatgcccatcgtcctagaattaattcccctaaaaatctttgaaatagggcccgtatttaccctatagcaccccctctaccccctctagagcccactgtaaagctaacttagcattaaccttttaagttaaagattaagagaaccaacacctctttacagtgaaatgccccaactaaatactaccgtatggcccaccataattacccccatactccttacactattcctcatcacccaactaaaaatattaaacacaaactaccacctacctccctcaccaaagcccataaaaataaaaaattataacaaaccctgagaaccaaaatgaacgaaaatctgttcgcttcattcattgcccccacaatcctaggcctacccgccgcagtactgatcattctatttccccctctattgatccccacctccaaatatctcatcaacaaccgactaatcaccacccaacaatgactaatcaaactaacctcaaaacaaatgataaccatacacaacactaaaggacgaacctgatctcttatactagtatccttaatcatttttattgccacaactaacctcctcggactcctgcctcactcatttacaccaaccacccaactatctataaacctagccatggccatccccttatgagcgggcgcagtgattataggctttcgctctaagattaaaaatgccctagcccacttcttaccacaaggcacacctacaccccttatccccatactagttattatcgaaaccatcagcctactcattcaaccaatagccctggccgtacgcctaaccgctaacattactgcaggccacctactcatgcacctaattggaagcgccaccctagcaatatcaaccattaaccttccctctacacttatcatcttcacaattctaattctactgactatcctagaaatcgctgtcgccttaatccaagcctacgttttcacacttctagtaagcctctacctgcacgacaacacataatgacccaccaatcacatgcctatcatatagtaaaacccagcccatgacccctaacaggggccctctcagccctcctaatgacctccggcctagccatgtgatttcacttccactccataacgctcctcatactaggcctactaaccaatacactaaccatataccaatgatggcgcgatgtaacacgagaaagcacataccaaggccaccacacaccacctgtccaaaaaggccttcgatacgggataatcctatttattacctcagaagtttttttcttcgcaggatttttctgagccttttaccactccagcctagcccctaccccccaattaggagggcactggcccccaacaggcatcaccccgctaaatcccctagaagtcccactcctaaacacatccgtattactcgcatcaggagtatcaatcacctgagctcaccatagtctaatagaaaacaaccgaaaccaaataattcaagcactgcttattacaattttactgggtctctattttaccctcctacaagcctcagagtacttcgagtctcccttcaccatttccgacggcatctacggctcaacattttttgtagccacaggcttccacggacttcacgtcattattggctcaactttcctcactatctgcttcatccgccaactaatatttcactttacatccaaacatcactttggcttcgaagccgccgcctgatactggcattttgtagatgtggtttgactatttctgtatgtctccatctattgatgagggtcttactcttttagtataaatagtaccgttaacttccaattaactagttttgacaacattcaaaaaagagtaataaacttcgccttaattttaataatcaacaccctcctagccttactactaataattattacattttgactaccacaactcaacggctacatagaaaaatccaccccttacgagtgcggcttcgaccccatatcccccgcccgcgtccctttctccataaaattcttcttagtagctattaccttcttattatttgatctagaaattgccctccttttacccctaccatgagccctacaaacaactaacctgccactaatagttatgtcatccctcttattaatcatcatcctagccctaagtctggcctatgagtgactacaaaaaggattagactgaaccgaattggtatatagtttaaacaaaacgaatgatttcgactcattaaattatgataatcatatttaccaaatgcccctcatttacataaatattatactagcatttaccatctcacttctaggaatactagtatatcgctcacacctcatatcctccctactatgcctagaaggaataatactatcgctgttcattatagctactctcataaccctcaacacccactccctcttagccaatattgtgcctattgccatactagtctttgccgcctgcgaagcagcggtgggcctagccctactagtctcaatctccaacacatatggcctagactacgtacataacctaaacctactccaatgctaaaactaatcgtcccaacaattatattactaccactgacatgactttccaaaaaacacataatttgaatcaacacaaccacccacagcctaattattagcatcatccctctactattttttaaccaaatcaacaacaacctatttagctgttccccaaccttttcctccgaccccctaacaacccccctcctaatactaactacctgactcctacccctcacaatcatggcaagccaacgccacttatccagtgaaccactatcacgaaaaaaactctacctctctatactaatctccctacaaatctccttaattataacattcacagccacagaactaatcatattttatatcttcttcgaaaccacacttatccccaccttggctatcatcacccgatgaggcaaccagccagaacgcctgaacgcaggcacatacttcctattctacaccctagtaggctcccttcccctactcatcgcactaatttacactcacaacaccctaggctcactaaacattctactactcactctcactgcccaagaactatcaaactcctgagccaacaacttaatatgactagcttacacaatagcttttatagtaaagatacctctttacggactccacttatgactccctaaagcccatgtcgaagcccccatcgctgggtcaatagtacttgccgcagtactcttaaaactaggcggctatggtataatacgcctcacactcattctcaaccccctgacaaaacacatagcctaccccttccttgtactatccctatgaggcataattataacaagctccatctgcctacgacaaacagacctaaaatcgctcattgcatactcttcaatcagccacatagccctcgtagtaacagccattctcatccaaaccccctgaagcttcaccggcgcagtcattctcataatcgcccacgggcttacatcctcattactattctgcctagcaaactcaaactacgaacgcactcacagtcgcatcataatcctctctcaaggacttcaaactctactcccactaatagctttttgatgacttctagcaagcctcgctaacctcgccttaccccccactattaacctactgggagaactctctgtgctagtaaccacgttctcctgatcaaatatcactctcctacttacaggactcaacatactagtcacagccctatactccctctacatatttaccacaacacaatggggctcactcacccaccacattaacaacataaaaccctcattcacacgagaaaacaccctcatgttcatacacctatcccccattctcctcctatccctcaaccccgacatcattaccgggttttcctcttgtaaatatagtttaaccaaaacatcagattgtgaatctgacaacagaggcttacgaccccttatttaccgagaaagctcacaagaactgctaactcatgcccccatgtctaacaacatggctttctcaacttttaaaggataacagctatccattggtcttaggccccaaaaattttggtgcaactccaaataaaagtaataaccatgcacactactataaccaccctaaccctgacttccctaattccccccatccttaccaccctcgttaaccctaacaaaaaaaactcatacccccattatgtaaaatccattgtcgcatccacctttattatcagtctcttccccacaacaatattcatgtgcctagaccaagaagttattatctcgaactgacactgagccacaacccaaacaacccagctctccctaagcttcaaactagactacttctccataatattcatccctgtagcattgttcgttacatggtccatcatagaattctcactgtgatatataaactcagacccaaacattaatcagttcttcaaatatctactcatcttcctaattaccatactaatcttagttaccgctaacaacctattccaactgttcatcggctgagagggcgtaggaattatatccttcttgctcatcagttgatgatacgcccgagcagatgccaacacagcagccattcaagcaatcctatacaaccgtatcggcgatatcggtttcatcctcgccttagcatgatttatcctacactccaactcatgagacccacaacaaatagcccttctaaacgctaatccaagcctcaccccactactaggcctcctcctagcagcagcaggcaaatcagcccaattaggtctccacccctgactcccctcagccatagaaggccccaccccagtctcagccctactccactcaagcactatagttgtagcaggaatcttcttactcatccgcttccaccccctagcagaaaatagcccactaatccaaactctaacactatgcttaggcgctatcaccactctgttcgcagcagtctgcgcccttacacaaaatgacatcaaaaaaatcgtagccttctccacttcaagtcaactaggactcataatagttacaatcggcatcaaccaaccacacctagcattcctgcacatctgtacccacgccttcttcaaagccatactatttatgtgctccgggtccatcatccacaaccttaacaatgaacaagatattcgaaaaataggaggactactcaaaaccatacctctcacttcaacctccctcaccattggcagcctagcattagcaggaatacctttcctcacaggtttctactccaaagaccacatcatcgaaaccgcaaacatatcatacacaaacgcctgagccctatctattactctcatcgctacctccctgacaagcgcctatagcactcgaataattcttctcaccctaacaggtcaacctcgcttccccacccttactaacattaacgaaaataaccccaccctactaaaccccattaaacgcctggcagccggaagcctattcgcaggatttctcattactaacaacatttcccccgcatcccccttccaaacaacaatccccctctacctaaaactcacagccctcgctgtcactttcctaggacttctaacagccctagacctcaactacctaaccaacaaacttaaaataaaatccccactatgcacattttatttctccaacatactcggattctaccctagcatcacacaccgcacaatcccctatctaggccttcttacgagccaaaacctgcccctactcctcctagacctaacctgactagaaaagctattacctaaaacaatttcacagcaccaaatctccacctccatcatcacctcaacccaaaaaggcataattaaactttacttcctctctttcttcttcccactcatcctaaccctactcctaatcacataacctattcccccgagcaatctcaattacaatatatacaccaacaaacaatgttcaaccagtaactactactaatcaacgcccataatcatacaaagcccccgcaccaataggatcctcccgaatcaaccctgacccctctccttcataaattattcagcttcctacactattaaagtttaccacaaccaccaccccatcatactctttcacccacagcaccaatcctacctccatcgctaaccccactaaaacactcaccaagacctcaacccctgacccccatgcctcaggatactcctcaatagccatcgctgtagtatatccaaagacaaccatcattccccctaaataaattaaaaaaactattaaacccatataacctcccccaaaattcagaataataacacacccgaccacaccgctaacaatcaatactaaacccccataaataggagaaggcttagaagaaaaccccacaaaccccattactaaacccacactcaacagaaacaaagcatacatcattattctcgcacggactacaaccacgaccaatgatatgaaaaaccatcgttgtatttcaactacaagaacaccaatgaccccaatacgcaaaactaaccccctaataaaattaattaaccactcattcatcgacctccccaccccatccaacatctccgcatgatgaaacttcggctcactccttggcgcctgcctgatcctccaaatcaccacaggactattcctagccatgcactactcaccagacgcctcaaccgccttttcatcaatcgcccacatcactcgagacgtaaattatggctgaatcatccgctaccttcacgccaatggcgcctcaatattctttatctgcctcttcctacacatcgggcgaggcctatattacggatcatttctctactcagaaacctgaaacatcggcattatcctcctgcttgcaactatagcaacagccttcataggctatgtcctcccgtgaggccaaatatcattctgaggggccacagtaattacaaacttactatccgccatcccatacattgggacagacctagttcaatgaatctgaggaggctactcagtagacagtcccaccctcacacgattctttacctttcacttcatcttgcccttcattattgcagccctagcagcactccacctcctattcttgcacgaaacgggatcaaacaaccccctaggaatcacctcccattccgataaaatcaccttccacccttactacacaatcaaagacgccctcggcttacttctcttccttctctccttaatgacattaacactattctcaccagacctcctaggcgacccagacaattataccctagccaaccccttaaacacccctccccacatcaagcccgaatgatatttcctattcgcctacacaattctccgatccgtccctaacaaactaggaggcgtccttgccctattactatccatcctcatcctagcaataatccccatcctccatatatccaaacaacaaagcataatatttcgcccactaagccaatcactttattgactcctagccgcagacctcctcattctaacctgaatcggaggacaaccagtaagctacccttttaccatcattggacaagtagcatccgtactatacttcacaacaatcctaatcctaataccaactatctccctaattgaaaacaaaatactcaaatgggcctgtccttgtagtataaactaatacaccagtcttgtaaaccggagatgaaaacctttttccaaggacaaatcagagaaaaagtctttaactccaccattagcacccaaagctaagattctaatttaaactattctctgttctttcatggggaagcagatttgggtaccacccaagtattgactcacccatcaacaaccgctatgtatttcgtacattactgccagccaccatgaatattgtacggtaccataaatacttgaccacctgtagtacataaaaacccaatccacatcaaaaccccctccccatgcttacaagcaagtacagcaatcaaccctcaactatcacacatcaactgcaactccaaagccacccctcacccactaggataccaacaaacctacccacccttaacagtacatagtacataaagccatttaccgtacatagcacattacagtcaaatcccttctcgtccccatggatgacccccctcagataggggtcccttgaccaccatcctccgtgaaatcaatatcccgcacaagagtgctactctcctcgctccgggcccataacacttgggggtagctaaagtgaactgtatccgacatctggttcctacttcagggccataaagcctaaatagcccacacgttccccttaaataagacatcacgatg

SEQ ID NO: 301 - DNA, 16571 bp, Homo sapiens mitochondrial
  3109: "n" refers to a nucleotide at position 3107 of the Cambridge Reference Sequence (CRS, Anderson et al. 1981 Nature 290:457-465), later determined to be absent from the human mtDNA sequence according to the revised CRS (rCRS, Andrews et al. 1999 Nature Genetics 23:147); "n" therefore represents a single nucleotide deletion at a position corresponding to nucleotide 3107 of SEQ ID NO:1 as provided herein.
gatcacaggtctatcaccctattaaccactcacgggagctctccatgcatttggtattttcgtctggggggtgtgcacgcgatagcattgcgagacgctggagccggagcaccctatgtcgcagtatctgtctttgattcctgcctcatcctattatttatcgcacctacgttcaatattacaggcgaacatacttactaaagtgtgttaattaattaatgcttgtaggacataataataacaattgaatgtctgcacagccgctttccacacagacatcataacaaaaaatttccaccaaaccccccctcccccccgcttctggccacagcacttaaacacatctctgccaaaccccaaaaacaaagaaccctaacaccagcctaaccagatttcaaattttatcttttggcggtatgcacttttaacagtcaccccccaactaacacattattttcccctcccactcccatactactaatctcatcaatacaacccccgcccatcctacccagcacacacacaccgctgctaaccccataccccgaaccaaccaaaccccaaagacaccccccacagtttatgtagcttacctcctcaaagcaatacactgaaaatgtttagacgggctcacatcaccccataaacaaataggtttggtcctagcctttctattagctcttagtaagattacacatgcaagcatccccattccagtgagttcaccctctaaatcaccacgatcaaaagggacaagcatcaagcacgcagcaatgcagctcaaaacgcttagcctagccacacccccacgggaaacagcagtgattaacctttagcaataaacgaaagtttaactaagctatactaaccccagggttggtcaatttcgtgccagccaccgcggtcacacgattaacccaagtcaatagaagccggcgtaaagagtgttttagatcaccccctccccaataaagctaaaactcacctgagttgtaaaaaactccagttgacacaaaatagactacgaaagtggctttaacatatctgaacacacaatagctaagacccaaactgggattagataccccactatgcttagccctaaacctcaacagttaaatcaacaaaactgctcgccagaacactacgagccacagcttaaaactcaaaggacctggcggtgcttcatatccctctagaggagcctgttctgtaatcgataaaccccgatcaacctcaccacctcttgctcagcctatataccgccatcttcagcaaaccctgatgaaggctacaaagtaagcgcaagtacccacgtaaagacgttaggtcaaggtgtagcccatgaggtggcaagaaatgggctacattttctaccccagaaaactacgatagcccttatgaaacttaagggtcgaaggtggatttagcagtaaactgagagtagagtgcttagttgaacagggccctgaagcgcgtacacaccgcccgtcaccctcctcaagtatacttcaaaggacatttaactaaaacccctacgcatttatatagaggagacaagtcgtaacatggtaagtgtactggaaagtgcacttggacgaaccagagtgtagcttaacacaaagcacccaacttacacttaggagatttcaacttaacttgaccgctctgagctaaacctagccccaaacccactccaccttactaccagacaaccttagccaaaccatttacccaaataaagtataggcgatagaaattgaaacctggcgcaatagatatagtaccgcaagggaaagatgaaaaattataaccaagcataatatagcaaggactaacccctataccttctgcataatgaattaactagaaataactttgcaaggagaaccaaagctaagacccccgaaaccagacgagctacctaagaacagctaaaagagcacacccgtctatgtagcaaaatagtgggaagatttataggtagaggcgacaaacctaccgagcctggtgatagctggttgtccaagatagaatcttagttcaactttaaatttgcccacagaaccctctaaatccccttgtaaatttaactgttagtccaaagaggaacagctctttggacactaggaaaaaaccttgtagagagagtaaaaaatttaacacccatagtaggcctaaaagcagccaccaattaagaaagcgttcaagctcaacacccactacctaaaaaatcccaaacatataactgaactcctcacacccaattggaccaatctatcaccctatagaagaactaatgttagtataagtaacatgaaaacattctcctccgcataagcctgcgtcagattaaaacactgaactgacaattaacagcccaatatctacaatcaaccaacaagtcattattaccctcactgtcaacccaacacaggcatgctcataaggaaaggttaaaaaaagtaaaaggaactcggcaaatcttaccccgcctgtttaccaaaaacatcacctctagcatcaccagtattagaggcaccgcctgcccagtgacacatgtttaacggccgcggtaccctaaccgtgcaaaggtagcataatcacttgttccttaaatagggacctgtatgaatggctccacgagggttcagctgtctcttacttttaaccagtgaaattgacctgcccgtgaagaggcgggcatgacacagcaagacgagaagaccctatggagctttaatttattaatgcaaacagtacctaacaaacccacaggtcctaaactaccaaacctgcattaaaaatttcggttggggcgacctcggagcagaacccaacctccgagcagcacatgctaagacttcaccagtcaaagcgaactactatactcaattgatccaataacttgaccaacggaacaagttaccctagggataacagcgcaatcctattctagagtccatatcaacaatagggtttacgacctcgatgttggatcaggacatcccgatggtgcagccgctattaaaggttcgtttgttcaacgattaaagtcctacgtgatctgagttcagaccggagtaatccaggtcggtttctatctacnttcaaattcctccctgtacgaaaggacaagagaaataaggcctacttcacaaagcgccttcccccgtaaatgatatcatctcaacttagtattatacccacacccacccaagaacagggtttgttaagatggcagagcccggtaatcgcataaaacttaaaactttacagtcagaggttcaattcctcttcttaacaacatacccatggccaacctcctactcctcattgtacccattctaatcgcaatggcattcctaatgcttaccgaacgaaaaattctaggctatatacaactacgcaaaggccccaacgttgtaggcccctacgggctactacaacccttcgctgacgccataaaactcttcaccaaagagcccctaaaacccgccacatctaccatcaccctctacatcaccgccccgaccttagctctcaccatcgctcttctactatgaacccccctccccatacccaaccccctggtcaacctcaacctaggcctcctatttattctagccacctctagcctagccgtttactcaatcctctgatcagggtgagcatcaaactcaaactacgccctgatcggcgcactgcgagcagtagcccaaacaatctcatatgaagtcaccctagccatcattctactatcaacattactaataagtggctcctttaacctctccacccttatcacaacacaagaacacctctgattactcctgccatcatgacccttggccataatatgatttatctccacactagcagagaccaaccgaacccccttcgaccttgccgaaggggagtccgaactagtctcaggcttcaacatcgaatacgccgcaggccccttcgccctattcttcatagccgaatacacaaacattattataataaacaccctcaccactacaatcttcctaggaacaacatatgacgcactctcccctgaactctacacaacatattttgtcaccaagaccctacttctaacctccctgttcttatgaattcgaacagcatacccccgattccgctacgaccaactcatacacctcctatgaaaaaacttcctaccactcaccctagcattacttatatgacatgtctccatacccattacaatctccagcattccccctcaaacctaagaaatatgtctgataaaagagttactttgatagagtaaataataggagcttaaacccccttatttctaggactatgagaatcgaacccatccctgagaatccaaaattctccgtgccacctatcacaccccatcctaaagtaaggtcagctaaataagctatcgggcccataccccgaaaatgttggttatacccttcccgtactaattaatcccctggcccaacccgtcatctactctaccatctttgcaggcacactcatcacagcgctaagctcgcactgattttttacctgagtaggcctagaaataaacatgctagcttttattccagttctaaccaaaaaaataaaccctcgttccacagaagctgccatcaagtatttcctcacgcaagcaaccgcatccataatccttctaatagctatcctcttcaacaatatactctccggacaatgaaccataaccaatactaccaatcaatactcatcattaataatcataatggctatagcaataaaactaggaatagccccctttcacttctgagtcccagaggttacccaaggcacccctctgacatccggcctgcttcttctcacatgacaaaaactagcccccatctcaatcatataccaaatctctccctcactagacgtaagccttctcctcactctctcaatcttatccatcatagcaggcagttgaggtggattaaaccaaacccagctacgcaaaatcttagcatactcctcaattacccacataggatgaataatagcagttctaccgtacaaccctaacataaccattcttaatttaactatttatattatcctaactactaccgcattcctactactcaacttaaactccagcaccacgaccctactactatctcgcacctgaaacaagctaacatgactaacacccttaattccatccaccctcctctccctaggaggcctgcccccgctaaccggctttttgcccaaatgggccattatcgaagaattcacaaaaaacaatagcctcatcatccccaccatcatagccaccatcaccctccttaacctctacttctacctacgcctaatctactccacctcaatcacactactccccatatctaacaacgtaaaaataaaatgacagtttgaacatacaaaacccaccccattcctccccacactcatcgcccttaccacgctactcctacctatctccccttttatactaataatcttatagaaatttaggttaaatacagaccaagagccttcaaagccctcagtaagttgcaatacttaatttctgtaacagctaaggactgcaaaaccccactctgcatcaactgaacgcaaatcagccactttaattaagctaagcccttactagaccaatgggacttaaacccacaaacacttagttaacagctaagcaccctaatcaactggcttcaatctacttctcccgccgccgggaaaaaaggcgggagaagccccggcaggtttgaagctgcttcttcgaatttgcaattcaatatgaaaatcacctcggagctggtaaaaagaggcctaacccctgtctttagatttacagtccaatgcttcactcagccattttacctcacccccactgatgttcgccgaccgttgactattctctacaaaccacaaagacattggaacactatacctattattcggcgcatgagctggagtcctaggcacagctctaagcctccttattcgagccgagctgggccagccaggcaaccttctaggtaacgaccacatctacaacgttatcgtcacagcccatgcatttgtaataatcttcttcatagtaatacccatcataatcggaggctttggcaactgactagttcccctaataatcggtgcccccgatatggcgtttccccgcataaacaacataagcttctgactcttacctccctctctcctactcctgctcgcatctgctatagtggaggccggagcaggaacaggttgaacagtctaccctcccttagcagggaactactcccaccctggagcctccgtagacctaaccatcttctccttacacctagcaggtgtctcctctatcttaggggccatcaatttcatcacaacaattatcaatataaaaccccctgccataacccaataccaaacgcccctcttcgtctgatccgtcctaatcacagcagtcctacttctcctatctctcccagtcctagctgctggcatcactatactactaacagaccgcaacctcaacaccaccttcttcgaccccgccggaggaggagaccccattctataccaacacctattctgatttttcggtcaccctgaagtttatattcttatcctaccaggcttcggaataatctcccatattgtaacttactactccggaaaaaaagaaccatttggatacataggtatggtctgagctatgatatcaattggcttcctagggtttatcgtgtgagcacaccatatatttacagtaggaatagacgtagacacacgagcatatttcacctccgctaccataatcatcgctatccccaccggcgtcaaagtatttagctgactcgccacactccacggaagcaatatgaaatgatctgctgcagtgctctgagccctaggattcatctttcttttcaccgtaggtggcctgactggcattgtattagcaaactcatcactagacatcgtactacacgacacgtactacgtcgtagctcacttccactatgtcctatcaataggagctgtatttgccatcataggaggcttcattcactgatttcccctattctcaggctacaccctagaccaaacctacgccaaaatccatttcactatcatattcatcggcgtaaatctaactttcttcccacaacactttctcggcctatccggaatgccccgacgttactcggactaccccgatgcatacaccacatgaaacatcctatcatctgtaggctcattcatttctctaacagcagtaatattaataattttcatgatttgagaagccttcgcttcgaagcgaaaagtcctaatagtagaagaaccctccataaacctggagtgactatatggatgccccccaccctaccacacattcgaagaacccgtatacataaaatctagacaaaaaaggaaggaatcgaaccccccaaagctggtttcaagccaaccccatggcctccatgactttttcaaaaaggtattagaaaaaccatttcataactttgtcaaagttaaattataggctaaatcctatatatcttaatggcacatgcagcgcaagtaggtctacaagacgctacttcccctatcatagaagagcttatcacctttcatgatcacgccctcataatcattttccttatctgcttcctagtcctgtatgcccttttcctaacactcacaacaaaactaactaatactaacatctcagacgctcaggaaatagaaaccgtctgaactatcctgcccgccatcatcctagtcctcatcgccctcccatccctacgcatcctttacataacagacgaggtcaacgatccctcccttaccatcaaatcaattggccaccaatggtactgaacctacgagtacaccgactacggcggactaatcttcaactcctacatacttcccccattattcctagaaccaggcgacctgcgactccttgacgttgacaatcgagtagtactcccgattgaagcccccattcgtataataattacatcacaagacgtcttgcactcatgagctgtccccacattaggcttaaaaacagatgcaattcccggacgtctaaaccaaaccactttcaccgctacacgaccgggggtatactacggtcaatgctctgaaatctgtggagcaaaccacagtttcatgcccatcgtcctagaattaattcccctaaaaatctttgaaatagggcccgtatttaccctatagcaccccctctaccccctctagagcccactgtaaagctaacttagcattaaccttttaagttaaagattaagagaaccaacacctctttacagtgaaatgccccaactaaatactaccgtatggcccaccataattacccccatactccttacactattcctcatcacccaactaaaaatattaaacacaaactaccacctacctccctcaccaaagcccataaaaataaaaaattataacaaaccctgagaaccaaaatgaacgaaaatctgttcgcttcattcattgcccccacaatcctaggcctacccgccgcagtactgatcattctatttccccctctattgatccccacctccaaatatctcatcaacaaccgactaatcaccacccaacaatgactaatcaaactaacctcaaaacaaataataaccatacacaacaccaaaggacgaacctgatctcttatactagtatccttaatcatttttattgccacaactaacctcctcggactcctgcctcactcatttacaccaaccacccaactatctataaacctagccatggccatccccttatgagcgggcgcagtgattataggctttcgctctaagattaaaaatgccctagcccacttcttaccacaaggcacacctacaccccttatccccatactagttattatcgaaaccatcagcctactcattcaaccaatagccctggccgtacgcctaaccgctaacattactgcaggccacctactcatgcacctaattggaagcgccaccctagcaatatcaaccattaaccttccctctacacttatcatcttcacaattctaattctactgactatcctagaaatcgctgtcgccttaatccaagcctacgttttcacacttctagtaagcctctacctgcacgacaacacataatgacccaccaatcacatgcctatcatatagtaaaacccagcccatgacccctaacaggggccctctcagccctcctaatgacctccggcctagccatgtgatttcacttccactccataacgctcctcatactaggcctactaaccaacacactaaccatataccaatgatggcgcgatgtaacacgagaaagcacataccaaggccaccacacaccacctgtccaaaaaggccttcgatacgggataatcctatttattacctcagaagtttttttcttcgcaggatttttctgagccttttaccactccagcctagcccctaccccccaattaggagggcactggcccccaacaggcatcaccccgctaaatcccctagaagtcccactcctaaacacatccgtattactcgcatcaggagtatcaatcacctgagctcaccatagtctaatagaaaacaaccgaaaccaaataattcaagcactgcttattacaattttactgggtctctattttaccctcctacaagcctcagagtacttcgagtctcccttcaccatttccgacggcatctacggctcaacattttttgtagccacaggcttccacggacttcacgtcattattggctcaactttcctcactatctgcttcatccgccaactaatatttcactttacatccaaacatcactttggcttcgaagccgccgcctgatactggcattttgtagatgtggtttgactatttctgtatgtctccatctattgatgagggtcttactcttttagtataaatagtaccgttaacttccaattaactagttttgacaacattcaaaaaagagtaataaacttcgccttaattttaataatcaacaccctcctagccttactactaataattattacattttgactaccacaactcaacggctacatagaaaaatccaccccttacgagtgcggcttcgaccctatatcccccgcccgcgtccctttctccataaaattcttcttagtagctattaccttcttattatttgatctagaaattgccctccttttacccctaccatgagccctacaaacaactaacctgccactaatagttatgtcatccctcttattaatcatcatcctagccctaagtctggcctatgagtgactacaaaaaggattagactgaaccgaattggtatatagtttaaacaaaacgaatgatttcgactcattaaattatgataatcatatctaccaaatgcccctcatttacataaatattatactagcatttaccatctcacttctaggaatactagtatatcgctcacacctcatatcctccctactatgcctagaaggaataatactatcgctgttcattatagctactctcataaccctcaacacccactccctcttagccaatattgtgcctattgccatactagtctttgccgcctgcgaagcagcggtgggcctagccctactagtctcaatctccaacacatatggcctagactacgtacataacctaaacctactccaatgctaaaactaatcgtcccaacaattatattactaccactgacatgactttccaaaaaacacataatttgaatcaacacaaccacccacagcctaattattagcatcatccctctactattttttaaccaaatcaacaacaacctatttagctgttccccaaccttttcctccgaccccctaacaacccccctcctaatactaactacctgactcctacccctcacaatcatggcaagccaacgccacttatccagtgaaccactatcacgaaaaaaactctacctctctatactaatctccctacaaatctccttaattataacattcacagccacagaactaatcatattttatatcttcttcgaaaccacacttatccccaccttggctatcatcacccgatgaggcaaccagccagaacgcctgaacgcaggcacatacttcctattctacaccctagtaggctcccttcccctactcatcgcactgatttacactcacaacaccctaggctcactaaacattctactactcactctcactgcccaagaactatcaaactcctgagccaacaacttaatatgactagcttacacaatagcttttatagtaaagatacctctttacggactccacttatgactccctaaagcccatgtcgaagcccccatcgctgggtcaatagtacttgccgcagtactcttaaaactaggcggctatggtataatacgcctcacactcattctcaaccccctgacaaaacacatagcctaccccttccttgtactatccctatgaggcataattataacaagctccatctgcctacgacaaacagacctaaaatcgctcattgcatactcttcaatcagccacatagccctcgtagtaacagccattctcatccaaaccccctgaagcttcaccggcgcagtcattctcataatcgcccacggacttacatcctcattactattctgcctagcaaactcaaactacgaacgcactcacagtcgcatcataatcctctctcaaggacttcaaactctgctcccactaatagctttttgatgacttctagcaagcctcgctaacctcgccttaccccccactattaacctactgggagaactctctgtgctagtaaccacgttctcctgatcaaatatcactctcctacttacaggactcaacatactagtcacagccctatactccctctacatatttaccacaacacaatggggctcactcacccaccacattaacaacataaaaccctcattcacacgagaaaacaccctcatgttcatacacctatcccccattctcctcctatccctcaaccccgacatcattaccgggttttcctcttgtaaatatagtttaaccaaaacatcagattgtgaatctgacaacagaggcttacgaccccttgtttaccgagaaagctcacaagaactgctaactcatgcccccatgtctaacaacatggctttctcaacttttaaaggataacagctatccattggtcttaggccccaaaaattttggtgcaactccaaataaaagtaataaccatgcacactactataaccaccctaaccctgacttccctaattccccccatccttaccaccctcgttaaccctaacaaaaaaaactcatacccccattatgtaaaatccattgtcgcatccacctttattatcagtctcttccccacaacaatattcatgtgcctagaccaagaagttattatctcgaactgacactgagccacaacccaaacaacccagctctccctaagcttcaaactagactacttctccataatattcatccctgtagcattgttcgttacatggtccatcatagaattctcactgtgatatataaactcagacccaaacattaatcagttcttcaaatatctactcatcttcctaattaccatactaatcttagttaccgctaacaacctattccaactgttcatcggctgagagggcgtaggaattatatccttcttgctcatcagttgatgatacgcccgagcagatgccaacacagcagccattcaagcaatcctatacaaccgtatcggcgatatcggtttcatcctcgccttagcatgatttatcctacactccaactcatgagacccacaacaaatagcccttctaaacgctaatccaagcctcaccccactactaggcctcctcctagcagcagcaggcaaatcagcccaattaggtctccacccctgactcccctcagccatagaaggccccaccccagtctcagccctactccactcaagcactatagttgtagcaggaatcttcttactcatccgcttccaccccctagcagaaaatagcccactaatccaaactctaacactatgcttaggcgctatcaccactctgttcgcagcagtctgcgcccttacacaaaatgacatcaaaaaaatcgtagccttctccacttcaagtcaactaggactcataatagttacaatcggcatcaaccaaccacacctagcattcctgcacatctgtacccacgccttcttcaaagccatactatttatgtgctccggatccatcatccacaaccttaacaatgaacaagatattcgaaaaataggaggactactcaaaaccatacctctcacttcaacctccctcaccattggcagcctagcattagcaggaatacctttcctcacaggtttctactccaaagaccacatcatcgaaaccgcaaacatatcatacacaaacgcctgagccctatctattactctcatcgctacctccctgacaagcgcctatagcactcgaataattcttctcaccctaacaggtcaacctcgcttccccacccttactaacattaacgaaaataaccccaccctactaaaccccattaaacgcctggcagccggaagcctattcgcaggatttctcattactaacaacatttcccccgcatcccccttccaaacaacaatccccctctacctaaaactcacagccctcgctgtcactttcctaggacttctaacagccctagacctcaactacctaaccaacaaacttaaaataaaatccccactatgcacattttatttctccaacatactcggattctaccctagcatcacacaccgcacaatcccctatctaggccttctcacgagccaaaacctgcccctactcctcctagacctaacctgactagaaaagctattacctaaaacaatttcacagcaccaaatctccacctccatcatcacctcaacccaaaaaggcataattaaactttacttcctctctttcttcttcccactcatcctaaccctactcctaatcacataacctattcccccgagcaatctcaattacaatatatacaccaacaaacaatgttcaaccagtaactactactaatcaacgcccatagtcatacaaagcccccgcaccaataggatcctcccgaatcaaccctgacccctctccttcataaattattcagcttcctacactattaaagtttaccacaaccaccaccccatcatactctttcacccacagcaccaatcctacctccatcgctaaccccactaaaacactcaccaagacctcaacccctgacccccatgcctcaggatactcctcaatagccatcgctgtagtatatccaaagacaaccatcattccccctaaataaattaaaaaaactattaaacccatataacctcccccaaaattcagaataataacacacccgaccacaccgctaacaatcaatactaaacccccataaataggagaaggcttagaagaaaaccccacaaaccccattactaaacccacactcaacagaaacaaagcatacatcattattctcgcacgggctacaaccacgaccaatgatatgaaaaaccatcgttgtatttcaactacaagaacaccaatgaccccaatacgcaaaattaaccccctaataaaattaattaaccactcattcatcgacctccccaccccatccaacatctccgcatgatgaaacttcggctcactccttggcgcctgcctgatcctccaaatcaccacaggactattcctagccatacactactcaccagacgcctcaaccgccttttcatcaatcgcccacatcactcgagacgtaaattatggctgaatcatccgctaccttcacgccaatggcgcctcaatattctttatctgcctcttcctacacatcgggcgaggcctatattacggatcatttctctactcagaaacctgaaacatcggcattatcctcctgcttgcaactatagcaacagccttcataggctatgtcctcccgtgaggccaaatatcattctgaggggccacagtaattacaaacttactatccgccatcccatacattgggacagacctagttcaatgaatctgaggaggctactcagtaaacagtcccaccctcacacgattctttacctttcacttcatcttgcccttcattattgcagccctagcagcactccacctcctattcttgcacgaaacgggatcaaacaaccccctaggaatcacctcccattccgataaaatcaccttccacccttactacacaatcaaagacgccctcggcttacttctcttcattctctccttaatgacattaacactattctcaccagacctcctaggcgacccagacaattataccctagccaaccccttaaacacccctccccacatcaagcccgaatgatatttcctattcgcctacacaattctccgatccgtccctaacaagctaggaggcgtccttgccctattactatccatcctcatcctagcaataatccccatcctccatatatccaaacaacaaagcataatatttcgcccactaagccaatcactttattgactcctagccgcagacctcctcattctaacctgaatcggaggacaaccagtaagctacccttttaccatcattggacaagtagcatccgtactatacttcacaacaatcctaatcctaataccaactatctccctaattgaaaacaaaatactcaaatgggcctgtccttgtagtataaactaatacaccagtcttgtaaaccgaagatgaaaacctttttccaaggacaaatcagagaaaaagtctttaactccaccattagcacccaaagctaagattctaatttaaactattctctgttctttcatggggaagcagatttgggtaccacccaagtattgactcacccatcaacaaccgctatgtatttcgtacattactgccagccaccatgaatattgcacggtaccataaatacttgaccacctgtagtacataaaaacccaatccacatcaaaaccccctccccatgcttacaagcaagtacagcaatcaaccctcaactatcacacatcaactgcaactccaaagccacccctcacccactaggataccaacaaacctacccatctttaacagtacatagtacataaagccatttaccgtacatagcacattacagtcaaatcccttctcgtccccatggatgacccccctcagataggggtcccttgaccaccatcctccgtgaaatcaatatcccgcacaagagtgctactctcctcgctccgggcccataacacttgggggtagctaaagtgaactgtatccgacatctggttcctacttcagggccataaagcctaaatagcccacacgttccccttaaataagacatcacgatg

SEQ ID NO: 302 - DNA, 16570 bp, Homo sapiens mitochondrial
  3108: "n" refers to a nucleotide at position 3107 of the Cambridge Reference Sequence (CRS, Anderson et al. 1981 Nature 290:457-465), later determined to be absent from the human mtDNA sequence according to the revised CRS (rCRS, Andrews et al. 1999 Nature Genetics 23:147); "n" therefore represents a single nucleotide deletion at a position corresponding to nucleotide 3107 of SEQ ID NO:1 as provided herein.
gatcacaggtctatcaccctattaaccactcacgggagctctccatgcatttggtattttcgtttggggggtgtgcacgcgatagcattgcgagacgctggagccggagcaccctatgtcgcagtatctgtctttgattcctgcctcatcctattatttatcgcacctacgttcaatattacaggcgaacatacttactaaagtgtgttaattaattaatgcttgtaggacataataataacaattgaatgtctgcacagccgctttccacacagacatcataacaaaaaatttccaccaaaccccccctcccccgccttctggccacagcacttaaacacatctctgccaaaccccaaaaacaaagaaccctaacaccagcctaaccagatttcaaattttatcttttggcggtatgcacttttaacagtcaccccccaactaacacattattttcccctcccactcccatactactaatctcatcaatacaacccccgcccatcctacccagcacacacacaccgctgctaaccccataccccgaaccaaccaaaccccaaagacaccccccacagtttatgtagcttacctcctcaaagcaatacactgaaaatgtttagacgggctcacatcaccccataaacaaataggtttggtcctagcctttctattagctcttagtaagattacacatgcaagcatccccgttccagtgagttcaccctctaaatcaccacgatcaaaagggacaagcatcaagcacgcagcaatgcagctcaaaacgcttagcctagccacacccccacgggaaacagcagtgattaacctttagcaataaacgaaagtttaactaagctatactaaccccagggttggtcaatttcgtgccagccaccgcggtcacacgattaacccaagtcaatagaagccggcgtaaagagtgttttagatcaccccctccccaataaagctaaaactcacctgagttgtaaaaaactccagttgacacaaaatagactacgaaagtggctttaacatatctgaacacacaatagctaagacccaaactgggattagataccccactatgcttagccctaaacctcaacagttaaatcaacaaaactgctcgccagaacactacgagccacagcttaaaactcaaaggacctggcggtgcttcatatccctctagaggagcctgttctgtaatcgataaaccccgatcaacctcaccacctcttgctcagcctatataccgccatcttcagcaaaccctgatgaaggctacaaagtaagcgcaagtacccacgtaaagacgttaggtcaaggtgtagcccatgaggtggcaagaaatgggctacattttctaccccagaaaactacgatagcccttatgaaacttaagggtcgaaggtggatttagcagtaaactgagagtagagtgcttagttgaacagggccctgaagcgcgtacacaccgcccgtcaccctcctcaagtatacttcaaaggacatttaactaaaacccctacgcatttatatagaggagacaagtcgtaacatggtaagtgtactggaaagtgcacttggacgaaccagagtgtagcttaacacaaagcacccaacttacacttaggagatttcaacttaacttgaccgctctgagctaaacctagccccaaacccactccaccttactaccagacaaccttagccaaaccatttacccaaataaagtataggcgatagaaattgaaacctggcgcaatagatatagtaccgcaagggaaagatgaaaaattataaccaagcataatatagcaaggactaacccctataccttctgcataatgaattaactagaaataactttgcaaggagagccaaagctaagacccccgaaaccagacgagctacctaagaacagctaaaagagcacacccgtctatgtagcaaaatagtgggaagatttataggtagaggcgacaaacctaccgagcctggtgatagctggttgtccaagatagaatcttagttcaactttaaatttgcccacagaaccctctaaatccccttgtaaatttaactgttagtccaaagaggaacagctctttggacactaggaaaaaaccttgtagagagagtaaaaaatttaacacccatagtaggcctaaaagcagccaccaattaagaaagcgttcaagctcaacacccactacctaaaaaatcccaaacatataactgaactcctcacacccaattggaccaatctatcaccctatagaagaactaatgttagtataagtaacatgaaaacattctcctccgcataagcctgcgtcagattaaaacactgaactgacaattaacagcccaatatctacaatcaaccaacaagtcattattaccctcactgtcaacccaacacaggcatgctcataaggaaaggttaaaaaaagtaaaaggaactcggcaaatcttaccccgcctgtttaccaaaaacatcacctctagcatcaccagtattagaggcaccgcctgcccagtgacacatgtttaacggccgcggtaccctaaccgtgcaaaggtagcataatcacttgttccttaaatagggacctgtatgaatggctccacgagggttcagctgtctcttacttttaaccagtgaaattgacctgcccgtgaagaggcgggcataacacagcaagacgagaagaccctatggagctttaatttattaatgcaaacagtacctaacaaacccacaggtcctaaactaccaaacctgcattaaaaatttcggttggggcgacctcggagcagaacccaacctccgagcagtacatgctaagacttcaccagtcaaagcgaactactatactcaattgatccaataacttgaccaacggaacaagttaccctagggataacagcgcaatcctattctagagtccatatcaacaatagggtttacgacctcgatgttggatcaggacatcccaatggtgcagccgctattaaaggttcgtttgttcaacgattaaagtcctacgtgatctgagttcagaccggagtaatccaggtcggtttctatctacnttcaaattcctccctgtacgaaaggacaagagaaataaggcctacttcacaaagcgccttcccccgtaaatgatatcatctcaacttagtattatacccacacccacccaagaacagggtttgttaagatggcagagcccggtaatcgcataaaacttaaaactttacagtcagaggttcaattcctcttcttaacaacatacccatggccaacctcctactcctcattgtacccattctaatcgcaatggcattcctaatgcttaccgaacgaaaaattctaggctatatacaactacgcaaaggccccaacgttgtaggcccctacgggctactacaacccttcgctgacgccataaaactcttcaccaaagagcccctaaaacccgccacatctgccatcaccctctacatcaccgccccgaccttagctctcaccatcgctcttctactatgaacccccctccccatacccaaccccctggtcaacctcaacctaggcctcctatttattctagccacctctagcctagccgtttactcaatcctctgatcagggtgagcatcaaactcaaactacgccctgatcggcgcactgcgagcagtagcccaaacaatctcatatgaagtcaccctagccatcattctactatcaacattactaataagtggctcctttaacctctccacccttatcacaacacaagaacacctctgattactcctgccatcatgacccttggccataatatgatttatctccacactagcagagaccaaccgaacccccttcgaccttgccgaaggggagtccgaactagtctcaggcttcaacatcgaatacgccgcaggccccttcgccctattcttcatagccgaatacacaaacattattataataaacaccctcaccactacaatcttcctaggaacaacatatgacgcactctcccctgaactctacacaacatattttgtcaccaagaccctacttctaacctccctgttcttatgaattcgaacagcatacccccgattccgctacgaccaactcatacacctcctatgaaaaaacttcctaccactcaccctagcattacttatatgatatgtctccatacccattacaatctccagcattccccctcaaacctaagaaatatgtctgataaaagagttactttgatagagtaaataataggagcttaaacccccttatttctaggactatgagaatcgaacccatccctgagaatccaaaattctccgtgccacctatcacaccccatcctaaagtaaggtcagctaaataagctatcgggcccataccccgaaaatgttggttatacccttcccgtactaattaatcccctggcccaacccgtcatctactctaccatctttgcaggcacactcatcacagcgctaagctcgcactgattttttacctgagtaggcctagaaataaacatgctagcttttattccagttctaaccaaaaaaataaaccctcgttccacagaagctgccatcaagtatttcctcacgcaagcaaccgcatccataatccttctaatagctatcctcttcaacaatatactctccggacaatgaaccataaccaatactaccaatcaatactcatcattaataatcataatggctatagcaataaaactaggaatagccccctttcacttctgagtcccagaggttacccaaggcacccctctgacatccggcctgcttcttctcacatgacaaaaactagcccccatctcaatcatataccaaatctctccctcactaaacgtaagccttctcctcactctctcaatcttatccatcatagcaggcagttgaggtggattaaaccaaacccagctacgcaaaatcttagcatactcctcaattacccacataggatgaataatagcagttctaccgtacaaccctaacataaccattcttaatttaactatttatattatcctaactactaccgcattcctactactcaacttaaactccagcaccacgaccctactactatctcgcacctgaaacaagctaacatgactaacacccttaattccatccaccctcctctccctaggaggcctgcccccgctaaccggctttttgcccaaatgggccattatcgaagaattcacaaaaaacaatagcctcatcatccccaccatcatagccaccatcaccctccttaacctctacttctacctacgcctaatctactccacctcaatcacactactccccatatctaacaacgtaaaaataaaatgacagtttgaacatacaaaacccaccccattcctccccacactcatcgcccttaccacgctactcctacctatctccccttttatactaataatcttatagaaatttaggttaaatacagaccaagagccttcaaagccctcagtaagttgcaatacttaatttctgtaacagctaaggactgcaaaaccccactctgcatcaactgaacgcaaatcagccactttaattaagctaagcccttactagaccaatgggacttaaacccacaaacacttagttaacagctaagcaccctaatcaactggcttcaatctacttctcccgccgccgggaaaaaaggcgggagaagccccggcaggtttgaagctgcttcttcgaatttgcaattcaacatgaaaatcacctcggagctggtaaaaagaggcctaacccctgtctttagatttacagtccaatgcttcactcagccattttacctcacccccactgatgttcgccgaccgttgactattctctacaaaccacaaagacattggaacactatacctattattcggcgcatgagctggagtcctaggcacagctctaagcctccttattcgagccgagctgggccagccaggcaaccttctaggtaacgaccacatctacaacgttatcgtcacagcccatgcatttgtaataatcttcttcatagtaatacccatcataatcggaggctttggcaactgactagttcccctaataatcggtgcccccgatatggcgtttccccgcataaacaacataagcttctgactcttacctccctctctcctactcctgctcgcatctgctatagtggaggccggagcaggaacaggttgaacagtctaccctcccttagcagggaactactcccaccctggagcctccgtagacctaaccatcttctccttacacctagcaggcgtctcctctatcttaggggccatcaatttcatcacaacaattatcaatataaaaccccctgccataacccaataccaaacgcccctcttcgtctgatccgtcctaatcacagcagtcctacttctcctatctctcccagtcctagctgctggcatcactatactactaacagaccgcaacctcaacaccaccttcttcgaccccgccggaggaggagaccccattctataccaacacctattctgatttttcggtcaccctgaagtttatattcttatcctaccaggcttcggaataatctcccatattgtaacttactactccggaaaaaaagaaccatttggatacataggtatggtctgagctatgatatcaattggcttcctagggtttatcgtgtgagcacaccatatatttacagtaggaatagacgtagacacacgagcatatttcacctccgctaccataatcatcgctatccccaccggcgtcaaagtatttagctgactcgccacactccacggaagcaatatgaaatgatctgctgcagtgctctgagccctaggattcatctttcttttcaccgtaggtggcctgactggcattgtattagcaaactcatcactagacatcgtactacacgacacgtactacgttgtagcccacttccactatgtcctatcaataggagctgtatttgccatcataggaggcttcattcactgatttcccctattctcaggctacaccctagaccaaacctacgccaaaatccatttcactatcatattcatcggcgtaaatctaactttcttcccacaacactttctcggcctatccggaatgccccgacgttactcggactaccccgatgcatacaccacatgaaacatcctatcatctgtaggctcattcatttctctaacagcagtaatattaataattttcatgatttgagaagccttcgcttcgaagcgaaaagtcctaatagtagaagaaccctccataaacctggagtgactatatggatgccccccaccctaccacacattcgaagaacccgtatacataaaatctagacaaaaaaggaaggaatcgaaccccccaaagctggtttcaagccaaccccatggcctccatgactttttcaaaaaggtattagaaaaaccatttcataactttgtcaaagttaaattataggctaaatcctatatatcttaatggcacatgcagcgcaagtaggtctacaagacgctacttcccctatcatagaagagcttatcacctttcatgatcacgccctcataatcattttccttatctgcttcctagtcctgtatgcccttttcctaacactcacaacaaaactaactaatactaacatctcagacgctcaggaaatagaaaccgtctgaactatcctgcccgccatcatcctagtcctcatcgccctcccatccctacgcatcctttacataacagacgaggtcaacgatccctcccttaccatcaaatcaattggccaccaatggtactgaacctacgagtacaccgactacggcggactaatcttcaactcctacatacttcccccattattcctagaaccaggcgacctgcgactccttgacgttgacaatcgagtagtactcccgattgaagcccccattcgtataataattacatcacaagacgtcttgcactcatgagctgtccccacattaggcttaaaaacagatgcaattcccggacgtctaaaccaaaccactttcaccgctacacgaccgggggtatactacggtcaatgctctgaaatctgtggagcaaaccacagtttcatgcccatcgtcctagaattaattcccctaaaaatctttgaaatagggcccgtatttaccctatagcaccccctctaccccctctagagcccactgtaaagctaacttagcattaaccttttaagttaaagattaagagaaccaacacctctttacagtgaaatgccccaactaaatactaccgtatggcccaccataattacccccatactccttacactattcctcatcacccaactaaaaatattaaacacaaactaccacctacctccctcaccaaagcccataaaaataaaaaattataacaaaccctgagaaccaaaatgaacgaaaatctgttcgcttcattcattgcccccacaatcctaggcctacccgccgcagtactgatcattctatttccccctctattgatccccacctccaaatatctcatcaacaaccgactaatcaccacccaacaatgactaatcaaactaacctcaaaacaaatgataaccatacacaacactaaaggacgaacctgatctcttatactagtatccttaatcatttttattgccacaactaacctcctcggactcctgcctcactcatttacaccaaccacccaactatctataaacctagccatggccatccccttatgagcgggcgcagtgattataggctttcgctctaagattaaaaatgccctagcccacttcttaccacaaggcacacctacaccccttatccccatactagttattatcgaaaccatcagcctactcattcaaccaatagccctggccgtacgcctaaccgctaacattactgcaggccacctactcatgcacctaattggaagcgccaccctagcaatatcaaccattaaccttccctctacacttatcatcttcacaattctaattctactgactatcctagaaatcgctgtcgccttaatccaagcctacgttttcacacttctagtaagcctctacctgcacgacaacacataatgacccaccaatcacatgcctatcatatagtaaaacccagcccatgacccctaacaggggccctctcagccctcctaatgacctccggcctagccatgtgatttcacttccactccataacgctcctcatactaggcctactaaccaacacactaaccatataccaatgatggcgcgatgtaacacgagaaagcacataccaaggccaccacacaccacctgtccaaaaaggccttcgatacgggataatcctatttattacctcagaagtttttttcttcgcaggatttttctgagccttttaccactccagcctagcccctaccccccaattaggagggcactggcccccaacaggcatcaccccgctaaatcccctagaagtcccactcctaaacacatccgtattactcgcatcaggagtatcaatcacctgagctcaccatagtctaatagaaaacaaccgaaaccaaataattcaagcactgcttattacaattttactgggtctctattttaccctcctacaagcctcagagtacttcgagtctcccttcaccatttccgacggcatctacggctcaacattttttgtagccacaggcttccacggacttcacgtcattattggctcaactttcctcactatctgcttcatccgccaactaatatttcactttacatccaaacatcactttggcttcgaagccgccgcctgatactggcattttgtagatgtggtttgactatttctgtatgtctccatctattgatgagggtcttactcttttagtataaatagtaccgttaacttccaattaactagttttgacaacattcaaaaaagagtaataaacttcgccttaattttaataatcaacaccctcctagccttactactaataattattacattttgactaccacaactcaacggctacatagaaaaatccaccccttacgagtgcggcttcgaccctatatcccccgcccgcgtccctttctccataaaattcttcttagtagctattaccttcttattatttgatctagaaattgccctccttttacccctaccatgagccctacaaacaactaacctgccactaatagttatgtcatccctcttattaatcatcatcctagccctaagtctggcctatgagtgactacaaaaaggattagactgaaccgaattggtatatagtttaaacaaaacgaatgatttcgactcattaaattatgataatcatatttaccaaatgcccctcatttacataaatattatactagcatttaccatctcacttctaggaatactagtatatcgctcacacctcatatcctccctactatgcctagaaggaataatactatcgctgttcattatagctactctcataaccctcaacacccactccctcttagccaatattgtgcctattgccatactagtctttgccgcctgcgaagcagcggtgggcctagccctactagtctcaatctccaacacatatggcctagactacgtacataacctaaacctactccaatgctaaaactaatcgtcccaacaattatattactaccactgacatgactttccaaaaaacacataatttgaatcaacacaaccacccacagcctaattattagcatcatccctctactattttttaaccaaatcaacaacaacctatttagctgttccccaaccttttcctccgaccccctaacaacccccctcctaatactaactacctgactcctacccctcacaatcatggcaagccaacgccacttatccagtgaaccactatcacgaaaaaaactctacctctctatactaatctccctacaaatctccttaattataacattcacagccacagaactaatcatattttatatcttcttcgaaaccacacttatccccaccttggctatcatcacccgatgaggcaaccagccagaacgcctgaacgcaggcacatacttcctattctacaccctagtaggctcccttcccctactcatcgcactaatttacactcacaacaccctaggctcactaaacattctactactcactctcactgcccaagaactatcaaactcctgagccaacaacttaatatgactagcttacacaatagcttttatagtaaagatacctctttacggactccacttatgactccctaaagcccatgtcgaagcccccatcgctgggtcaatagtacttgccgcagtactcttaaaactaggcggctatggtataatacgcctcacactcattctcaaccccctgacaaaacacatagcctaccccttccttgtactatccctatgaggcataattataacaagctccatctgcctacgacaaacagacctaaaatcgctcattgcatactcttcaatcagccacatagccctcgtagtaacagccattctcatccaaaccccctgaagcttcaccggcgcagtcattctcataatcgcccacgggcttacatcctcattactattctgcctagcaaactcaaactacgaacgcactcacagtcgcatcataatcctctctcaaggacttcaaactctactcccactaatagctttttgatgacttctagcaagcctcgctaacctcgccttaccccccactattaacctactgggagaactctctgtgctagtaaccacgttctcctgatcaaatatcactctcctacttacaggactcaacatactagtcacagccctatactccctctacatatttaccacaacacaatggggctcactcacccaccacattaacaacataaaaccctcattcacacgagaaaacaccctcatgttcatacacctatcccccattctcctcctatccctcaaccccgacatcattaccgggttttcctcttgtaaatatagtttaaccaaaacatcagattgtgaatctgacaacagaggcttacgaccccttatttaccgagaaagctcacaagaactgctaactcatgcccccatgtctaacaacatggctttctcaacttttaaaggataacagctatccattggtcttaggccccaaaaattttggtgcaactccaaataaaagtaataaccatgcacactactataaccaccctaaccctgacttccctaattccccccatccttaccaccctcgttaaccctaacaaaaaaaactcatacccccattatgtaaaatccattgtcgcatccacctttattatcagtctcttccccacaacaatattcatgtgcctagaccaagaagttattatctcgaactgacactgagccacaacccaaacaacccagctctccctaagcttcaaactagactacttctccataatattcatccctgtagcattgttcgttacatggtccatcatagaattctcactgtgatatataaactcagacccaaacattaatcagttcttcaaatatctactcatcttcctaattaccatactaatcttagttaccgctaacaacctattccaactgttcatcggctgagagggcgtaggaattatatccttcttgctcatcagttgatgatacgcccgagcagatgccaacacagcagccattcaagcaatcctatacaaccgtatcggcgatatcggtttcatcctcgccttagcatgatttatcctacactccaactcatgagacccacaacaaatagcccttctaaacgctaatccaagcctcaccccactactaggcctcctcctagcagcagcaggcaaatcagcccaattaggtctccacccctgactcccctcagccatagaaggccccaccccagtctcagccctactccactcaagcactatagttgtagcaggaatcttcttactcatccgcttccaccccctagcagaaaatagcccactaatccaaactctaacactatgcttaggcgctatcaccactctgttcgcagcagtctgcgcccttacacaaaatgacatcaaaaaaatcgtagccttctccacttcaagtcaactaggactcataatagttacaatcggcatcaaccaaccacacctagcattcctgcacatctgtacccacgccttcttcaaagccatactatttatgtgctccgggtccatcatccacaaccttaacaatgaacaagatattcgaaaaataggaggactactcaaaaccatacctctcacttcaacctccctcaccattggcagcctagcattagcaggaatacctttcctcacaggtttctactccaaagaccacatcatcgaaaccgcaaacatatcatacacaaacgcctgagccctatctattactctcatcgctacctccctgacaagcgcctatagcactcgaataattcttctcaccctaacaggtcaacctcgcttccccacccttactaacattaacgaaaataaccccaccctactaaaccccattaaacgcctggcagccggaagcctattcgcaggatttctcattactaacaacatttcccccgcatcccccttccaaacaacaatccccctctacctaaaactcacagccctcgctgtcactttcctaggacttctaacagccctagacctcaactacctaaccaacaaacttaaaataaaatccccactatgcacattttatttctccaacatactcggattctaccctagcatcacacaccgcacaatcccctatctaggccttcttacgagccaaaacctgcccctactcctcctagacctaacctgactagaaaagctattacctaaaacaatttcacagcaccaaatctccacctccatcatcacctcaacccaaaaaggcataattaaactttacttcctctctttcttcttcccactcatcctaaccctactcctaatcacataacctattcccccgagcaatctcaattacaatatatacaccaacaaacaatgttcaaccagtaactactactaatcaacgcccataatcatacaaagcccccgcaccaataggatcctcccgaatcaaccctgacccctctccttcataaattattcagcttcctacactattaaagtttaccacaaccaccaccccatcatactctttcacccacagcaccaatcctacctccatcgctaaccccactaaaacactcaccaagacctcaacccctgacccccatgcctcaggatactcctcaatagccatcgctgtagtatatccaaagacaaccatcattccccctaaataaattaaaaaaactattaaacccatataacctcccccaaaattcagaataataacacacccgaccacaccgctaacaatcaatactaaacccccataaataggagaaggcttagaagaaaaccccacaaaccccattactaaacccacactcaacagaaacaaagcatacatcattattctcgcacggactacaaccacgaccaatgatatgaaaaaccatcgttgtatttcaactacaagaacaccaatgaccccaatacgcaaaactaaccccctaataaaattaattaaccactcattcatcgacctccccaccccatccaacatctccgcatgatgaaacttcggctcactccttggcgcctgcctgatcctccaaatcaccacaggactattcctagccatgcactactcaccagacgcctcaaccgccttttcatcaatcgcccacatcactcgagacgtaaattatggctgaatcatccgctaccttcacgccaatggcgcctcaatattctttatctgcctcttcctacacatcgggcgaggcctatattacggatcatttctctactcagaaacctgaaacatcggcattatcctcctgcttgcaactatagcaacagccttcataggctatgtcctcccgtgaggccaaatatcattctgaggggccacagtaattacaaacttactatccgccatcccatacattgggacagacctagttcaatgaatctgaggaggctactcagtagacagtcccaccctcacacgattctttacctttcacttcatcttgcccttcattattgcagccctagcagcactccacctcctattcttgcacgaaacgggatcaaacaaccccctaggaatcacctcccattccgataaaatcaccttccacccttactacacaatcaaagacgccctcggcttacttctcttccttctctccttaatgacattaacactattctcaccagacctcctaggcgacccagacaattataccctagccaaccccttaaacacccctccccacatcaagcccgaatgatatttcctattcgcctacacaattctccgatccgtccctaacaaactaggaggcgtccttgccctattactatccatcctcatcctagcaataatccccatcctccatatatccaaacaacaaagcataatatttcgcccactaagccaatcactttattgactcctagccgcagacctcctcattctaacctgaatcggaggacaaccagtaagctacccttttaccatcattggacaagtagcatccgtactatacttcacaacaatcctaatcctaataccaactatctccctaattgaaaacaaaatactcaaatgggcctgtccttgtagtataaactaatacaccagtcttgtaaaccggagatgaaaacctttttccaaggacaaatcagagaaaaagtctttaactccaccattagcacccaaagctaagattctaatttaaactattctctgttctttcatggggaagcagatttgggtaccacccaagtattgactcacccatcaacaaccgctatgtatttcgtacattactgccagccaccatgaatattgtacggtaccataaatacttgaccacctgtagtacatgaaaacccaatccacatcaaaaccccctccccatgcttacaagcaagcacagcaatcaaccctcaactatcacacatcaactgcaactccaaagccacccctcacccactaggataccaacaaacctacccacccttaacagtacatagtacataaagccatttaccgtacatagcacattacagtcaaatcccttctcgtccccatggatgacccccctcagataggggtcccttgaccaccatcctccgtgaaatcaatatcccgcacaagagtgctactctcctcgctccgggcccataacacttgggggtagctaaagtgaactgtatccgacatctggttcctacttcagggccataaagcctaaatagcccacacgttccccttaaataagacatcacgatg

SEQ ID NO: 303 - DNA, 16570 bp, Homo sapiens mitochondrial
  3108: "n" refers to a nucleotide at position 3107 of the Cambridge Reference Sequence (CRS, Anderson et al. 1981 Nature 290:457-465), later determined to be absent from the human mtDNA sequence according to the revised CRS (rCRS, Andrews et al. 1999 Nature Genetics 23:147); "n" therefore represents a single nucleotide deletion at a position corresponding to nucleotide 3107 of SEQ ID NO:1 as provided herein.
gatcacaggtctatcaccctattaaccactcacgggagctctccatgcatttggtattttcgtctggggggtgtgcacgcgatagcattgcgagacgctggagccggagcaccctatgtcgcagtatctgtctttgattcctgcctcatcctattatttatcgcacctacgttcaatattacaggcgaacatacttaccaaagcgtgttaattaattaatgcttgtaggacataataataacaattgaacgtctgcacagccgctttccacacagacatcataacaaaaaatttccaccaaaccccccctcccccgccttctggccacagcacttaaacacatctctgccaaaccccaaaaacaaagaaccctaacaccagcctaaccagatttcaaattttatcttttggcggtatgcacttttaacagtcaccccccaactaacacattattttcccctcccactcccatactactaatctcatcaatacaacccccgcccatcctacccagcacacacacaccgctgctaaccccataccccgaaccaaccaaaccccaaagacaccccccacagtttatgtagcttacctcctcaaagcaatacactgaaaatgtttagacgggctcacatcaccccataaacaaataggtttggtcctagcctttctattagctcttagtaagattacacatgcaagcatccccgttccagtgagttcaccctctaaatcaccacgatcaaaagggacaagcatcaagcacgcagcaatgcagctcaaaacgcttagcctagccacacccccacgggaaacagcagtgattaacctttagcaataaacgaaagtttaactaagctatactaaccccagggttggtcaatttcgtgccagccaccgcggtcacacgattaacccaagtcaatagaagccggcgtaaagagtgttttagatcaccccctccccaataaagctaaaactcacctgagttgtaaaaaactccagttgacacaaaatagactacgaaagtggctttaacatatctgaacacacaatagctaagacccaaactgggattagataccccactatgcttagccctaaacctcaacagttaaatcaacaaaactgctcgccagaacactacgagccacagcttaaaactcaaaggacctggcggtgcttcatatccctctagaggagcctgttctgtaatcgataaaccccgatcaacctcaccacctcttgctcagcctatataccgccatcttcagcaaaccctgatgaaggctacaaagtaagcgcaagtacccacgtaaagacgttaggtcaaggtgtagcccatgaggtggcaagaaatgggctacattttctaccccagaaaactacgatagcccttatgaaacttaagggtcgaaggtggatttagcagtaaactaagagtagagtgcttagttgaacagggccctgaagcgcgtacacaccgcccgtcaccctcctcaagtatacttcaaaggacatttaactaaaacccctacgcatttatatagaggagacaagtcgtaacatggtaagtgtactggaaagtgcacttggacgaaccagagtgtagcttaacacaaagcacccaacttacacttaggagatttcaacttaacttgaccgctctgagctaaacctagccccaaacccactccaccttactaccagacaaccttaaccaaaccatttacccaaataaagtataggcgatagaaattgaaacctggcgcaatagatatagtaccgcaagggaaagatgaaaaattataaccaagcataatatagcaaggactaacccctataccttctgcataatgaattaactagaaataactttgcaaggagagccaaagctaagacccccgaaaccagacgagctacctaagaacagctaaaagagcacacccgtctatgtagcaaaatagtgggaagatttataggtagaggcgacaaacctaccgagcctggtgatagctggttgtccaagatagaatcttagttcaactttaaatttgcccacagaaccctctaaatccccttgtaaatttaactgttagtccaaagaggaacagctctttggacactaggaaaaaaccttgtagagagagtaaaaaatttaacacccatagtaggcctaaaagcagccaccaattaagaaagcgttcaagctcaacacccactacctaaaaaatcccaaacatataactgaactcctcacacccaattggaccaatctatcaccctatagaagaactaatgttagtataagtaacatgaaaacattctcctccgcataagcctgcgtcagattaaaacactgaactgacaattaacagcccaatatctacaatcaaccaacaagtcattattaccctcactgtcaacccaacacaggcatgctcataaggaaaggttaaaaaaagtaaaaggaactcggcaaatcttaccccgcctgtttaccaaaaacatcacctctagcatcaccagtattagaggcaccgcctgcccagtgacacatgtttaacggccgcggtaccctaaccgtgcaaaggtagcataatcacttgttccttaaatagggacctgtatgaatggctccacgagggttcagctgtctcttacttttaaccagtgaaattgacctgcccgtgaagaggcgggcatgacacagcaagacgagaagaccctatggagctttaatttattaatgcaaacagtacctaacaaacccacaggtcctaaactaccaaacctgcattaaaaatttcggttggggcgacctcggagcagaacccaacctccgagcagtacatgctaagacttcaccagtcaaagcgaactactatactcaattgatccaataacttgaccaacggaacaagttaccctagggataacagcgcaatcctattctagagtccatatcaacaatagggtttacgacctcgatgttggatcaggacatcccgatggtgcagccgctattaaaggttcgtttgttcaacgattaaagtcctacgtgatctgagttcagaccggagtaatccaggtcggtttctatctacnttcaaattcctccctgtacgaaaggacaagagaaataaggcctacttcacaaagcgccttcccccgtaaatgatatcatctcaacttagtattatacccacacccacccaagaacagggtttgttaagatggcagagcccggtaatcgcataaaacttaaaactttacagtcagaggttcaattcctcttcttaacaacatacccatggccaacctcctactcctcattgtacccattctaatcgcaatggcattcctaatgcttaccgaacgaaaaattctaggctatatacaactacgcaaaggccccaacgttgtaggcccctacgggctactacaacccttcgctgacgccataaaactcttcaccaaagagcccctaaaacccgccacatctaccatcaccctctacatcaccgccccgaccttagctctcaccatcgctcttctactatgaacccccctccccatacccaaccccctggtcaacctcaacctaggcctcctatttattctagccacctctagcctagccgtttactcaatcctctgatcagggtgagcatcaaactcaaactacgccctgatcggcgcactgcgagcagtagcccaaacaatctcatatgaagtcaccctagccatcattctactatcaacattactaataagtggctcctttaacctctccacccttatcacaacacaagaacacctctgattactcctgccatcatgacccttggccataatatgatttatctccacactagcagagaccaaccgaacccccttcgaccttgccgaaggggagtccgaactagtctcaggcttcaacatcgaatacgccgcaggccccttcgccctattcttcatagccgaatacacaaacattattataataaacaccctcaccactacaatcttcctaggaacaacatatgacgcactctcccctgaactctacacaacatattttgtcaccaagaccctacttctaacctccctgttcttatgaattcgaacagcatacccccgattccgctacgaccaactcatacacctcctatgaaaaaacttcctaccactcaccctagcattacttatatgatatgtctccatacccattacaatctccagcattccccctcaaacctaagaaatatgtctgataaaagagttactttgatagagtaaataataggagcttaaacccccttatttctaggactatgagaatcgaacccatccctgagaatccaaaattctccgtgccacctatcacaccccatcctaaagtaaggtcagctaaataagctatcgggcccataccccgaaaatgttggttatacccttcccgtactaattaatcccctggcccaacccgtcatctactctaccatctttgcaggcacactcatcactgcgctaagctcgcactgattttttacctgagtaggcctagaaataaacatgctagcttttattccagttctaaccaaaaaaataaaccctcgttccacagaagctgccatcaagtatttcctcacgcaagcaaccgcatccataatccttctaatagctatcctcttcaacaatatactctccggacaatgaaccataaccaatactaccaatcaatactcatcattaataatcataatggctatagcaataaaactaggaatagccccctttcacttctgagtcccagaggttacccaaggcacccctctgacatccggcctgcttcttctcacatgacaaaaactagcccccatctcaatcatataccaaatctctccctcactaaacgtaagccttctcctcactctctcaatcttatccatcatagcaggcagttgaggtggattaaaccaaacccagctacgcaaaatcttagcatactcctcaattacccacataggatgaataatagcagttctaccgtacaaccctaacataaccattcttaatttaactatttatattatcctaactactaccgcattcctactactcaacttaaactccagcaccacgaccctactactatctcgcacctgaaacaagctaacatgactaacacccttaattccatccaccctcctctccctaggaggcctgcccccgctaaccggctttttgcccaaatgggccattatcgaagaattcacaaaaaacaatagcctcatcatccccaccatcatagccaccatcaccctccttaacctctacttctacctacgcctaatctactccacctcaatcacactactccccatatctaacaacgtaaaaataaaatgacagtttgaacatacaaaacccaccccattcctccccacactcatcgcccttaccacgctactcctacctatctccccttttatactaataatcttatagaaatttaggttaaatacagaccaagagccttcaaagccctcagtaagttgcaatacttaatttctgtaacagctaaggactgcaaaaccccactctgcatcaactgaacgcaaatcagccactttaattaagctaagcccttactagaccaatgggacttaaacccacaaacacttagttaacagctaagcaccctaatcaactggcttcaatctacttctcccgccgccgggaaaaaaggcgggagaagccccggcaggtttgaagctgcttcttcgaatttgcaattcaatatgaaaatcacctcggagctggtaaaaagaggcctaacccctgtctttagatttacagtccaatgcttcactcagccattttacctcacccccactgatgttcgccgaccgttgactattctctacaaaccacaaagacattggaacactatacctattattcggcgcatgagctggagtcctaggcacagctctaagcctccttattcgagccgagctgggccagccaggcaaccttctaggtaacgaccacatctacaacgttatcgtcacagcccatgcatttgtaataatcttcttcatagtaatacccatcataatcggaggctttggcaactgactagttcccctaataatcggtgcccccgatatggcgtttccccgcataaacaacataagcttctgactcttacctccctctctcctactcctgctcgcatctgctatagtggaggccggagcaggaacaggttgaacagtctaccctcccttagcagggaactactcccaccctggagcctccgtagacctaaccatcttctccttacacctagcaggtgtctcctctatcttaggggccatcaatttcatcacaacaattatcaatataaaaccccctgccataacccaataccaaacgcccctcttcgtctgatccgtcctaatcacagcagtcctacttctcctatctctcccagtcctagctgctggcatcactatactactaacagaccgcaacctcaacaccaccttcttcgaccccgccggaggaggagaccccattctataccaacacctattctgatttttcggtcaccctgaagtttatattcttatcctaccaggcttcggaataatctcccatattgtaacttactactccggaaaaaaagaaccatttggatacataggtatggtctgagctatgatatcaattggcttcctagggtttatcgtgtgagcacaccatatatttacagtaggaatagacgtagacacacgagcatatttcacctccgctaccataatcatcgctatccccaccggcgtcaaagtatttagctgactcgccacactccacggaagcaatatgaaatgatctgctgcagtgctctgagccctaggattcatctttcttttcaccgtaggtggcctgactggcattgtattagcaaactcatcactagacatcgtactacacgacacgtactacgttgtagctcacttccactatgtcctatcaataggagctgtatttgccatcataggaggcttcattcactgatttcccctattctcaggctacaccctagaccaaacctacgccaaaatccatttcactatcatattcatcggcgtaaatctaactttcttcccacaacactttctcggcctatccggaatgccccgacgttactcggactaccccgatgcatacaccacatgaaacatcctatcatctgtaggctcattcatttctctaacagcagtaatattaataattttcatgatttgagaagccttcgcttcgaagcgaaaagtcctaatagtagaagaaccctccataaacctggagtgactatatggatgccccccaccctaccacacattcgaagaacccgtatacataaaatctagacaaaaaaggaaggaatcgaaccccccaaagctggtttcaagccaaccccatggcctccatgactttttcaaaaaggtattagaaaaaccatttcataactttgtcaaagttaaattataggctaaatcctatatatcttaatggcacatgcagcgcaagtaggtctacaagacgctacttcccctatcatagaagagcttatcacctttcatgatcacgccctcataatcattttccttatctgcttcctagtcctgtatgcccttttcctaacactcacaacaaaactaactaatactaacatctcagacgctcaggaaatagaaaccgtctgaactatcctgcccgccatcatcctagtcctcatcgccctcccatccctacgcatcctttacataacagacgaggtcaacgatccctcccttaccatcaaatcaattggccaccaatggtactgaacctacgagtacaccgactacggcggactaatcttcaactcctacatacttcccccattattcctagaaccaggcgacctgcgactccttgacgttgacaatcgagtagtactcccgattgaagcccccattcgtataataattacatcacaagacgtcttgcactcatgagctgtccccacattaggcttaaaaacagatgcaattcccggacgtctaaaccaaaccactttcaccgctacacgaccgggggtatactacggtcaatgctctgaaatctgtggagcaaaccacagtttcatgcccatcgtcctagaattaattcccctaaaaatctttgaaataggacccgtatttaccctatagcaccccctctaccccctctagagcccactgtaaagctaacttagcattaaccttttaagttaaagattaagagaaccaacacctctttacagtgaaatgccccaactaaatactaccgtatggcccaccataattacccccatactccttacactattcctcatcacccaactaaaaatattaaacacaaactaccacctacctccctcaccaaagcccataaaaataaaaaattataacaaaccctgagaaccaaaatgaacgaaaatctgttcgcttcattcattgcccccacaatcctaggcctacccgccgcagtactgatcattctatttccccctctattgatccccacctccaaatatctcatcaacaaccgactaatcaccacccaacaatgactaatcaaactaacctcaaaacaaatgataaccatacacaacactaaaggacgaacctgatctcttatactagtatccttaatcatttttattgccacaactaacctcctcggactcctgcctcactcatttacaccaaccacccaactatctataaacctagccatggccatccccttatgagcgggcgcagtgattataggctttcgctctaagattaaaaatgccctagcccacttcttaccacaaggcacacctacaccccttatccccatactagttattatcgaaaccatcagcctactcattcaaccaatagccctggccgtacgcctagccgctaacattactgcaggccacctactcatgcacctaattggaagcgccaccctagcaatatcaaccattaaccttccctctacacttatcatcttcacaattctaattctactgactatcctagaaatcgctgtcgccttaatccaagcctacgttttcacacttctagtaagcctctacctgcacgacaacacataatgacccaccaatcacatgcctatcatatagtaaaacccagcccatgacccctaacaggggccctctcagccctcctaatgacctccggcctagccatgtgatttcacttccactccataacgctcctcatactaggcctactaaccaacacactaaccatataccaatgatggcgcgatgtaacacgagaaagcacataccaaggccaccacacaccacctgtccaaaaaggccttcgatacgggataatcctatttattacctcagaagtttttttcttcgcaggatttttctgagccttttaccactccagcctagcccctaccccccaattaggagggcactggcccccaacaggcatcaccccgctaaatcccctagaagtcccactcctaaacacatccgtattactcgcatcaggagtatcaatcacctgagctcaccatagtctaatagaaaacaaccgaaaccaaataattcaagcactgcttattacaattttactgggtctctattttaccctcctacaagcctcagagtacttcgagtctcccttcaccatttccgacggcatctacggctcaacattttttgtagccacaggcttccacggacttcacgtcattattggctcaactttcctcactatctgcttcatccgccaactaatatttcactttacatccaaacatcactttggcttcgaagccgccgcctgatactggcattttgtagatgtggtttgactatttctgtatgtctccatctattgatgagggtcttactcttttagtataaatagtaccgttaacttccaattaactagctttgacaacattcaaaaaagagtaataaacttcgccttaattttaataatcaacaccctcctagccttactactaataattattacattttgactaccacaactcaacggctacatagaaaaatccaccccttacgagtgcggcttcgaccctatatcccccgcccgcgtccctttctccataaaattcttcttagtagctatcaccttcttattatttgatctagaaattgccctccttttacccctaccatgagccctacaaacaactaacctgccactaatagttatgtcatccctcttattaatcatcatcctagccctaagtctggcctatgagtgactacaaaaaggattagactgagccgaattggtatatagtttaaacaaaacgaatgatttcgactcattaaattatgataatcatatttaccaaatgcccctcatttacataaatattatactagcatttaccatctcacttctaggaatactagtatatcgctcacacctcatatcctccctactatgcctagaaggaataatactatcgctgttcattatagctactctcataaccctcaacacccactccctcttagccaatattgtgcctattgccatactagtctttgccgcctgcgaagcagcggtgggcctagccctactagtctcaatctccaacacatatggcctagactacgtacataacctaaacctactccaatgctaaaactaatcgtcccaacaattatattactaccactgacatgactttccaaaaaacacataatttgaatcaacacaaccacccacagcctaattattagcatcatccctctactattttttaaccaaatcaacaacaacctatttagctgttccccaaccttttcctccgaccccctaacaacccccctcctaatactaactacctgactcctacccctcacaatcatggcaagccaacgccacttatccagtgaaccactatcacgaaaaaaactctacctctctatactaatctccctacaaatctccttaattataacattcacagccacagaactaatcatattttatatcttcttcgaaaccacacttatccccaccttggctatcatcacccgatgaggcaaccagccagaacgcctgaacgcaggcacatacttcctattctacaccctagtaggctcccttcccctactcatcgcactaatttacactcacaacaccctaggctcactaaacattctactactcactctcactgcccaagaactatcaaactcctgagccaacaacttaatatgactagcttacacaatagcttttatagtaaagatacctctttacggactccacttatgactccctaaagcccatgtcgaagcccccatcgctgggtcaatagtacttgccgcagtactcttaaaactaggcggctatggtataatacgcctcacactcattctcaaccccctgacaaaacacatagcctaccccttccttgtactatccctatgaggcataattataacaagctccatctgcctacgacaaacagacctaaaatcgctcattgcatactcttcaatcagccacatagccctcgtagtaacagccattctcatccaaaccccctgaagcttcaccggcgcagtcattctcataatcgcccacggacttacatcctcattactattctgcctagcaaactcaaactacgaacgcactcacagtcgcatcataatcctctctcaaggacttcaaactctactcccactaatagctttttgatgacttctagcaagcctcgctaacctcgccttaccccccactattaacctactgggagaactctctgtgctagtaaccacgttctcctgatcaaatatcactctcctacttacaggactcaacatactagtcacagccctatactccctctacatatttaccacaacacaatggggctcactcacccaccacattaacaacataaaaccctcattcacacgagaaaacaccctcatgttcatacacctatcccccattctcctcctatccctcaaccccgacatcattaccgggttttcctcttgtaaatatagtttaaccaaaacatcagattgtgaatctgacaacagaggcttacgaccccttatttaccgagaaagctcacaagaactgctaactcatgcccccatgtctaacaacatggctttctcaacttttaaaggataacagctatccattggtcttaggccccaaaaattttggtgcaactccaaataaaagtaataaccatgcacactactataaccaccctaaccctgacttccctaattccccccatccttaccaccctcgttaaccctaacaaaaaaaactcatacccccattatgtaaaatccattgtcgcatccacctttattatcagtctcttccccacaacaatattcatatgcctagaccaagaagttattatctcgaactgacactgagccacaacccaaacaacccagctctccctaagcttcaaactagactacttctccataatattcatccctgtagcattgttcgttacatggtccatcatagaattctcactgtgatatataaactcagacccaaacattaatcagttcttcaaatatctactcattttcctaattaccatactaatcttagttaccgctaacaacctattccaactgttcatcggctgagagggcgtaggaattatatccttcttgctcatcagttgatgatacgcccgagcagatgccaacacagcagccattcaagcaatcctatacaaccgtatcggcgatatcggtttcatcctcgccttagcatgatttatcctacactccaactcatgagacccacaacaaatagcccttctaaacgctaatccaagcctcaccccactactaggcctcctcctagcagcagcaggcaaatcagcccaattaggtctccacccctgactcccctcagccatagaaggccccaccccagtctcagccctactccactcaagcactatagttgtagcaggaatcttcttactcatccgcttccaccccctagcagaaaatagcccactaatccaaactctaacactatgcttaggcgctatcaccactctgttcgcagcagtctgcgcccttacacaaaatgacatcaaaaaaatcgtagccttctccacttcaagtcaactaggactcataatagttacaatcggcatcaaccaaccacacctagcattcctgcacatctgtacccacgccttcttcaaagccatactatttatgtgctccgggtccatcatccacaaccttaacaatgaacaagatattcgaaaaataggaggactactcaaaaccatacctctcacttcaacctccctcaccattggcagcctagcattagcaggaatacctttcctcacaggtttctactccaaagaccacatcatcgaaaccgcaaacatatcatacacaaacgcctgagccctatctattactctcatcgctacctccctgacaagcgcctatagcactcgaataattcttctcaccctaacaggtcaacctcgcttccccacccttactaacattaacgaaaataaccccaccctactaaaccccattaaacgcctggcagccggaagcctattcgcaggatttctcattactaacaacatttcccccgcatcccccttccaaacaacagtccccctctacctaaaactcacagccctcgctgtcactttcctaggacttctaacagccctagacctcaactacctaaccaacaaacttaaaataaaatccccactatgcacattttatttctccaacatactcggattctaccctagcatcacacaccgcacaatcccctatctaggccttcttacgagccaaaacctgcccctactcctcctagacctaacctgactagaaaagctattacctaaaacaatttcacagcaccaaatctccacctccatcatcacctcaacccaaaaaggcataattaaactttacttcctctctttcttcttcccactcatcctaaccctactcctaatcacataacctattcccccgagcaatctcaattacaatatatacaccaacaaacaatgttcaaccagtaactactactaatcaacgcccatagtcatacaaagcccccgcaccaataggatcctcccgaatcaaccctgacccctctccttcataaattattcagcttcctacactattaaagtttaccacaaccaccaccccatcatactctttcacccacagcaccaatcctacctccatcgctaaccccactaaaacactcaccaagacctcaacccctgacccccatgcctcaggatactcctcaatagccatcgctgtagtatatccaaagacaaccatcattccccctaaataaattaaaaaaactattaaacccatataacctcccccaaaattcagaataataacacacccgaccacaccgctaataatcaatactaaacccccataaataggagaaggcttagaagaaaaccccacaaaccccattactaaacccacactcaacagaaacaaagcatacatcattattctcgcacggactacaaccacgaccaatgatatgaaaaaccatcgttgtatttcaactacaagaacaccaatgaccccaatacgcaaaattaaccccctaataaaattaattaaccactcattcatcgacctccccaccccatccaacatctccgcatgatgaaacttcggctcactccttggcgcctgcctgatcctccaaatcaccacaggactattcctagccatgcactactcaccagacgcctcaaccgccttttcatcaatcgcccacatcactcgagacgtaaattatggctgaatcatccgctaccttcacgccaatggcgcctcaatattctttatctgcctcttcctacacatcggacgaggcctatattacggatcatttctctactcagaaacctgaaacatcggcattatcctcctgcttgcaactatagcaacagccttcataggctatgtcctcccgtgaggccaaatatcattctgaggggccacagtaattacaaacttactatccgccatcccatacattgggacagacctagttcaatgaatctgaggaggctactcagtagacagtcccaccctcacacgattctttacctttcacttcatcttgcccttcattattgcagccctagcagcactccacctcctattcttgcacgaaacgggatcaaacaaccccctaggaatcacctcccattccgataaaatcaccttccacccttactacacaatcaaagacgccctcggcttacttctcttccttctctccttaatgacattaacactattctcaccagacctcctaggcgacccagacaattataccctagccaaccccttaaacacccctccccacatcaagcccgaatgatatttcctattcgcctacacaattctccgatccgtccctaacaaactaggaggcgtccttgccctattactatccatcctcatcctagcaataatccccatcctccatatatccaaacaacaaagcataatatttcgcccactaagccaatcactttattgactcctagccgcagacctcctcattctaacctgaatcggaggacaaccagtaagctacccttttaccatcattggacaagtagcatccgtactatacttcacaacaatcctaatcctaataccaactatctccctaattgaaaacaaaatactcaaatgggcctgtccttgtagtataaactaatacaccagtcttgtaagccggagatgaaaacctttttccaaggacaaatcagagaaaaagtctttaactccaccattagcacccaaagctaagattctaatttaaactattctctgttctttcatggggaagcagatttgggtaccacccaagtattgactcacccaccaacaaccgctatgtatttcgtacattactgccagccaccatgaatattgtacagtaccataaatacttgaccacctgtagtacataaaaacctaatccacatcaaaaccccctccccatgcttacaagcaagtacagcaatcaaccttcaactatcacacatcaactgcaactccaaagccactcctcacccactaggataccaacaaacctacccacccttaacagtacatagtacataaagccatttaccgtacatagcacattacagtcaaatcccttctcgtccccatggatgacccccctcagatagggatcccttgaccaccatcctccgtgaaatcaatatcccgcacaagagtgctactctcctcgctccgggcccataacacttgggggtagctaaagtgaactgtatccgacatctggttcctacttcagggccataaagcctaaatagcccacacgttccccttaaataagacatcacgatg

SEQ ID NO: 304 - DNA, 16571 bp, Homo sapiens mitochondrial
  3109: "n" refers to a nucleotide at position 3107 of the Cambridge Reference Sequence (CRS, Anderson et al. 1981 Nature 290:457-465), later determined to be absent from the human mtDNA sequence according to the revised CRS (rCRS, Andrews et al. 1999 Nature Genetics 23:147); "n" therefore represents a single nucleotide deletion at a position corresponding to nucleotide 3107 of SEQ ID NO:1 as provided herein.
gatcacaggtctatcaccctattaaccactcacgggagctctccatgcatttggtattttcgtctggggggtatgcacgcgatagcattgcgagacgctggagccggagcaccctatgtcgcagtatctgtctttgattcctgcctcatcctattatttatcgcacctacgttcaatattacaggcgaacatacttactaaagtgtgttaattaattaatgcttgtaggacataataataacaattgaatgtctgcacagccgctttccacacagacatcataacaaaaaatttccaccaaaccccccctcccccccgcttctggccacagcacttaaacacatctctgccaaaccccaaaaacaaagaaccctaacaccagcctaaccagatttcaaattttatcttttggcggtatgcacttttaacagtcaccccccaactaacacattattttcccctcccactcccatactactaatctcatcaatacaacccccgcccatcctacccagcacacacacaccgctgctaaccccataccccgaaccaaccaaaccccaaagacaccccccacagtttatgtagcttacctcctcaaagcaatacactgaaaatgtttagacgggctcacatcaccccataaacaaataggtttggtcctagcctttctattagctcttagtaagattacacatgcaagcatccccgttccagtgagttcaccctctaaatcaccacgatcaaaagggacaagcatcaagcacgcagcaatgcagctcaaaacgcttagcctagccacacccccacgggaaacagcagtgattaacctttagcaataaacgaaagtttaactaagctatactaaccccagggttggtcaatttcgtgccagccaccgcggtcacacgattaacccaagtcaatagaagccggcgtaaagagtgttttagatcaccccctccccaataaagctaaaactcacctgagttgtaaaaaactccagttgacacaaaatagactacgaaagtggctttaacatatctgaacacacaatagctaagacccaaactgggattagataccccactatgcttagccctaaacctcaacagttaaatcaacaaaactgctcgccagaacactacgagccacagcttaaaactcaaaggacctggcggtgcttcatatccctctagaggagcctgttctgtaatcgataaaccccgatcaacctcaccacctcttgctcagcctatataccgccatcttcagcaaaccctgatgaaggctacaaagtaagcgcaagtacccacgtaaagacgttaggtcaaggtgtagcccatgaggtggcaagaaatgggctacattttctaccccagaaaactacgatagcccttatgaaacttaagggtcgaaggtggatttagcagtaaactgagagtagagtgcttagttgaacagggccctgaagcgcgtacacaccgcccgtcaccctcctcaagtatacttcaaaggacatttaactaaaacccctacgcatttatatagaggagacaagtcgtaacatggtaagtgtactggaaagtgcacttggacgaaccagagtgtagcttaacacaaagcacccaacttacacttaggagatttcaacttaacttgaccgctctgagctaaacctagccccaaacccactccaccttactaccagacaaccttagccaaaccatttacccaaataaagtataggcgatagaaattgaaacctggcgcaatagatatagtaccgcaagggaaagatgaaaaattataaccaagcataatatagcaaggactaacccctataccttctgcataatgaattaactagaaataactttgcaaggagagccaaagctaagacccccgaaaccagacgagctacctaagaacagctaaaagagcacacccgtctatgtagcaaaatagtgggaagatttataggtagaggcgacaaacctaccgagcctggtgatagctggttgtccaagatagaatcttagttcaactttaaatttgcccacagaaccctctaaatccccttgtaaatttaactgttagtccaaagaggaacagctctttggacactaggaaaaaaccttgtagagagagtaaaaaatttaacacccatagtaggcctaaaagcagccaccaattaagaaagcgttcaagctcaacacccactacctaaaaaatcccaaacatataactgaactcctcacacccaattggaccaatctatcaccctatagaagaactaatgttagtataagtaacatgaaaacattctcctccgcataagcctgcgtcagattaaaacactgaactgacaattaacagcccaatatctacaatcaaccaacaagtcattattaccctcactgtcaacccaacacaggcatgctcataaggaaaggttaaaaaaagtaaaaggaactcggcaaatcttaccccgcctgtttaccaaaaacatcacctctagcatcaccagtattagaggcaccgcctgcccagtgacacatgtttaacggccgcggtaccctaaccgtgcaaaggtagcataatcacttgttccttaaatagggacctgtatgaatggctccacgagggttcagctgtctcttacttttaaccagtgaaattgacctgcccgtgaagaggcgggcataacacagcaagacgagaagaccctatggagctttaatttattaatgcaaacagtacctaacaaacccacaggtcctaaactaccaaacctgcattaaaaatttcggttggggcgacctcggagcagaacccaacctccgagcagtacatgctaagacttcaccagtcaaagcgaactactatactcaattgatccaataacttgaccaacggaacaagttaccctagggataacagcgcaatcctattctagagtccatatcaacaatagggtttacgacctcgatgttggatcaggacatcccaatggtgcagccgctattaaaggttcgtttgttcaacgattaaagtcctacgtgatctgagttcagaccggagtaatccaggtcggtttctatctacnttcaaattcctccctgtacgaaaggacaagagaaataaggcctacttcacaaagcgccttcccccgtaaatgatatcatctcaacttagtattatacccacacccacccaagaacagggtttgttaagatggcagagcccggtaatcgcataaaacttaaaactttacagtcagaggttcaattcctcttcttaacaacatacccatggccaacctcctactcctcattgtacccattctaatcgcaatggcattcctaatgcttaccgaacgaaaaattctaggctatatacaactacgcaaaggccccaacgttgtaggcccctacgggctactacaacccttcgctgacgccataaaactcttcaccaaagagcccctaaaacccgccacatctaccatcaccctctacatcaccgccccgaccttagctctcaccatcgctcttctactatgaacccccctccccatacccaaccccctggtcaacctcaacctaggcctcctatttattctagccacctctagcctagccgtttactcaatcctctgatcagggtgagcatcaaactcaaactacgccctgatcggcgcactgcgagcagtagcccaaacaatctcatatgaagtcaccctagccatcattctactatcaacattactaataagtggctcctttaacctctccacccttatcacaacacaagaacacctctgattactcctgccatcatgacccttggccataatatgatttatctccacactagcagagaccaaccgaacccccttcgaccttgccgaaggggagtccgaactagtctcaggcttcaacatcgaatacgccgcaggccccttcgccctattcttcatagccgaatacacaaacattattataataaacaccctcaccactacaatcttcctaggaacaacatatgacgcactctcccctgaactctacacaacatattttgtcaccaagaccctacttctaacctccctgttcttatgaattcgaacagcatacccccgattccgctacgaccaactcatacacctcctatgaaaaaacttcctaccactcaccctagcattacttatatgatatgtctccatacccattacaatctccagcattccccctcaaacctaagaaatatgtctgataaaagagttactttgatagagtaaataataggagcttaaacccccttatttctaggactatgagaatcgaacccatccctgagaatccaaaattctccgtgccacctatcacaccccatcctaaagtaaggtcagctaaataagctatcgggcccataccccgaaaatgttggttatacccttcccgtactaattaatcccctggcccaacccgtcatctactctaccatctttgcaggcacactcatcacagcgctaagctcgcactgattttttacctgagtaggcctagaaataaacatgctagcttttattccagttctaaccaaaaaaataaaccctcgttccacagaagctgccatcaagtatttcctcacgcaagcaaccgcatccataatccttctaatagctatcctcttcaacaatatactctccggacaatgaaccataaccaatactaccaatcaatactcatcattaataatcataatggctatagcaataaaactaggaatagccccctttcacttctgagtcccagaggttacccaaggcacccctctgacatccggcctgcttcttctcacatgacaaaaactagcccccatctcaatcatataccaaatctctccctcactaaacgtaagccttctcctcactctctcaatcttatccatcatagcaggcagttgaggtggattaaaccaaacccagctacgcaaaatcttagcatactcctcaattacccacataggatgaataatagcagttctaccgtacaaccctaacataaccattcttaatttaactatttatattatcctaactactaccgcattcctactactcaacttaaactccagcaccacgaccctactactatctcgcacctgaaacaagctaacatgactaacacccttaattccatccaccctcctctccctaggaggcctgcccccgctaaccggctttttgcccaaatgggccattatcgaagaattcacaaaaaacaatagcctcatcatccccaccatcatagccaccatcaccctccttaacctctacttctacctacgcctaatctactccacctcaatcacactactccccatatctaacaacgtaaaaataaaatgacagtttgaacatacaaaacccaccccattcctccccacactcatcgcccttaccacgctactcctacctatctccccttttatactaataatcttatagaaatttaggttaaatacagaccaagagccttcaaagccctcagtaagttgcaatacttaatttctgtaacagctaaggactgcaaaaccccactctgcatcaactgaacgcaaatcagccactttaattaagctaagcccttactagaccaatgggacttaaacccacaaacacttagttaacagctaagcaccctaatcaactggcttcaatctacttctcccgccgccgggaaaaaaggcgggagaagccccggcaggtttgaagctgcttcttcgaatttgcaattcaatatgaaaatcacctcggagctggtaaaaagaggcctaacccctgtctttagatttacagtccaatgcttcactcagccattttacctcacccccactgatgttcgccgaccgttgactattctctacaaaccacaaagacattggaacactatacctattattcggcgcatgagctggagtcctaggcacagctctaagcctccttattcgagccgagctgggccagccaggcaaccttctaggtaacgaccacatctacaacgttatcgtcacagcccatgcatttgtaataatcttcttcatagtaatacccatcataatcggaggctttggcaactgactagttcccctaataatcggtgcccccgatatggcgtttccccgcataaacaacataagcttctgactcttacctccctctctcctactcctgctcgcatctgctatagtggaggccggagcaggaacaggttgaacagtctaccctcccttagcagggaactactcccaccctggagcctccgtagacctaaccatcttctccttacacctagcaggtgtctcctctatcttaggggccatcaatttcatcacaacaattatcaatataaaaccccctgccataacccaataccaaacgcccctcttcgtctgatccgtcctaatcacagcagtcctacttctcctatctctcccagtcctagctgctggcatcactatactactaacagaccgcaacctcaacaccaccttcttcgaccccgccggaggaggagaccccattctataccaacacctattctgatttttcggtcaccctgaagtttatattcttatcctaccaggcttcggaataatctcccatattgtaacttactactccggaaaaaaagaaccatttggatacataggtatggtctgagctatgatatcaattggcttcctagggtttatcgtgtgagcacaccatatatttacagtaggaatagacgtagacacacgagcatatttcacctccgctaccataatcatcgctatccccaccggcgtcaaagtatttagctgactcgccacactccacggaagcaatatgaaatgatctgctgcagtgctctgagccctaggattcatctttcttttcaccgtaggtggcctgactggcattgtattagcaaactcatcactagacatcgtactacacgacacgtactacgttgtagcccacttccactatgtcctatcaataggagctgtatttgccatcataggaggcttcattcactgatttcccctattctcaggctacaccctagaccaaacctacgccaaaatccatttcactatcatattcatcggcgtaaatctaactttcttcccacaacactttctcggcctatccggaatgccccgacgttactcggactaccccgatgcatacaccacatgaaacatcctatcatctgtaggctcattcatttctctaacagcagtaatattaataattttcatgatttgagaagccttcgcttcgaagcgaaaagtcctaatagtagaagaaccctccataaacctggagtgactatatggatgccccccaccctaccacacattcgaagaacccgtatacataaaatctagacaaaaaaggaaggaatcgaaccccccaaagctggtttcaagccaaccccatggcctccatgactttttcaaaaaggtattagaaaaaccatttcataactttgtcaaagttaaattataggctaaatcctatatatcttaatggcacatgcagcgcaagtaggtctacaagacgctacttcccctatcatagaagagcttatcacctttcatgatcacgccctcataatcattttccttatctgcttcctagtcctgtatgcccttttcctaacactcacaacaaaactaactaatactaacatctcagacgctcaggaaatagaaaccgtctgaactatcctgcccgccatcatcctagtcctcatcgccctcccatccctacgcatcctttacataacagacgaggtcaacgatccctcccttaccatcaaatcaattggccaccaatggtactgaacctacgagtacaccgactacggcggactaatcttcaactcctacatacttcccccattattcctagaaccaggcgacctacgactccttgacgttgacaatcgagtagtactcccgattgaagcccccattcgtataataattacatcacaagacgtcttgcactcatgagctgtccccacattaggcttaaaaacagatgcaattcccggacgtctaaaccaaaccactttcaccgctacacgaccgggggtatactacggtcaatgctctgaaatctgtggagcaaaccacagtttcatgcccatcgtcctagaattaattcccctaaaaatctttgaaatagggcccgtatttaccctatagcaccccctctaccccctctagagcccactgtaaagctaacttagcattaaccttttaagttaaagattaagagaaccaacacctctttacagtgaaatgccccaactaaatactaccgtatggcccaccataattacccccatactccttacactattcctcatcacccaactaaaaatattaaacacaaactaccacctacctccctcaccaaagcccataaaaataaaaaattataacaaaccctgagaaccaaaatgaacgaaaatctgttcgcttcattcattgcccccacaatcctaggcctacccgccgcagtactgatcattctatttccccctctattgatccccacctccaaatatctcatcaacaaccgactaatcaccacccaacaatgactaatcaaactaacctcaaaacaaatgataaccatacacaacactaaaggacgaacctgatctcttatactagtatccttaatcatttttattgccacaactaacctcctcggactcctgcctcactcatttacaccaaccacccaactatctataaacctagccatggccatccccttatgagcgggcgcagtgattataggctttcgctctaagattaaaaatgccctagcccacttcttaccacaaggcacacctacaccccttatccccatactagttattatcgaaaccatcagcctactcattcaaccaatagccctggccgtacgcctaaccgctaacattactgcaggccacctactcatgcacctaattggaagcgccaccctagcaatatcaaccattaaccttccctctacacttatcatcttcacaattctaattctactgactatcctagaaatcgctgtcgccttaatccaagcctacgttttcacacttctagtaagcctctacctgcacgacaacacataatgacccaccaatcacatgcctatcatatagtaaaacccagcccatgacccctaacaggggccctctcagccctcctaatgacctccggcctagccatgtgatttcacttccactccataacgctcctcatactaggcctactaaccaacacactaaccatataccaatgatggcgcgatgtaacacgagaaagcacataccaaggccaccacacaccacctgtccaaaaaggccttcgatacgggataatcctatttattacctcagaagtttttttcttcgcaggatttttctgagccttttaccactccagcctagcccctaccccccaattaggagggcactggcccccaacaggcatcaccccgctaaatcccctagaagtcccactcctaaacacatccgtattactcgcatcaggagtatcaatcacctgagctcaccatagtctaatagaaaacaaccgaaaccaaataattcaagcactgcttattacaattttactgggtctctattttaccctcctacaagcctcagagtacttcgagtctcccttcaccatttccgacggcatctacggctcaacattttttgtagccacaggcttccacggacttcacgtcattattggctcaactttcctcactatctgcttcatccgccaactaatatttcactttacatccaaacatcactttggcttcgaagccgccgcctgatactggcattttgtagatgtggtttgactatttctgtatgtctccatctattgatgagggtcttactcttttagtataaatagtaccgttaacttccaattaactagttttgacaacattcaaaaaagagtaataaacttcgccttaattttaataatcaacaccctcctagccttactactaataattattacattttgactaccacaactcaacggctacatagaaaaatccaccccttacgagtgcggcttcgaccctatatcccccgcccgcgtccctttctccataaaattcttcttagtagctattaccttcttattatttgatctagaaattgccctccttttacccctaccatgagccctacaaacaactaacctgccactaatagttatgtcatccctcttattaatcatcatcctagccctaagtctggcctatgagtgactacaaaaaggattagactgaaccgaattggtatatagtttaaacaaaacgaatgatttcgactcattaaattatgataatcatatttaccaaatgcccctcatttacataaatattatactagcatttaccatctcacttctaggaatactagtatatcgctcacacctcatatcctccctactatgcctagaaggaataatactatcgctgttcattatagctactctcataaccctcaacacccactccctcttagccaatattgtgcctattgccatactagtctttgccgcctgcgaagcagcggtgggcctagccctactagtctcaatctccaacacatatggcctagactacgtacataacctaaacctactccaatgctaaaactaatcgtcccaacaattatattactaccactgacatgactttccaaaaaacacataatttgaatcaacacaaccacccacagcctaattattagcatcatccctctactattttttaaccaaatcaacaacaacctatttagctgttccccaaccttttcctccgaccccctaacaacccccctcctaatactaactacctgactcctacccctcacaatcatggcaagccaacgccacttatccagtgaaccactatcacgaaaaaaactctacctctctatactaatctccctacaaatctccttaattataacattcacagccacagaactaatcatattttatatcttcttcgaaaccacacttatccccaccttggctatcatcacccgatgaggcaaccagccagaacgcctgaacgcaggcacatacttcctattctacaccctagtaggctcccttcccctactcatcgcactaatttacactcacaacaccctaggctcactaaacattctactactcactctcactgcccaagaactatcaaactcctgagccaacaacttaatatgactagcttacacaatagcttttatagtaaagatacctctttacggactccacttatgactccctaaagcccatgtcgaagcccccatcgctgggtcaatagtacttgccgcagtactcttaaaactaggcggctatggtataatacgcctcacactcattctcaaccccctgacaaaacacatagcctaccccttccttgtactatccctatgaggcataattataacaagctccatctgcctacgacaaacagacctaaaatcgctcattgcatactcttcaatcagccacatagccctcgtagtaacagccattctcatccaaaccccctgaagcttcaccggcgcagtcattctcataatcgcccacgggcttacatcctcattactattctgcctagcaaactcaaactacgaacgcactcacagtcgcatcataatcctctctcaaggacttcaaactctactcccactaatagctttttgatgacttctagcaagcctcgctaacctcgccttaccccccactattaacctactgggagaactctctgtgctagtaaccacgttctcctgatcaaatatcactctcctacttacaggactcaacatactagtcacagccctatactccctctacatatttaccacaacacaatggggctcactcacccaccacattaacaacataaaaccctcattcacacgagaaaacaccctcatgttcatacacctatcccccattctcctcctatccctcaaccccgacatcattaccgggttttcctcttgtaaatatagtttaaccaaaacatcagattgtgaatctgacaacagaggcttacgaccccttatttaccgagaaagctcacaagaactgctaactcatgcccccatgtctaacaacatggctttctcaacttttaaaggataacagctatccattggtcttaggccccaaaaattttggtgcaactccaaataaaagtaataaccatgcacactactataaccaccctaaccctgacttccctaattccccccatccttaccaccctcgttaaccctaacaaaaaaaactcatacccccattatgtaaaatccattgtcgcatccacctttattatcagtctcttccccacaacaatattcatgtgcctagaccaagaagttattatctcgaactgacactgagccacaacccaaacaacccagctctccctaagcttcaaactagactacttctccataatattcatccctgtagcattgttcgttacatggtccatcatagaattctcactgtgatatataaactcagacccaaacattaatcagttcttcaaatatctactcatcttcctaattaccatactaatcttagttaccgctaacaacctattccaactgttcatcggctgagagggcgtaggaattatatccttcttgctcatcagttgatgatacgcccgagcagatgccaacacagcagccattcaagcaatcctatacaaccgtatcggcgatatcggtttcatcctcgccttagcatgatttatcctacactccaactcatgagacccacaacaaatagcccttctaaacgctaatccaagcctcaccccactactaggcctcctcctagcagcagcaggcaaatcagcccaattaggtctccacccctgactcccctcagccatagaaggccccaccccagtctcagccctactccactcaagcactatagttgtagcaggaatcttcttactcatccgcttccaccccctagcagaaaatagcccactaatccaaactctaacactatgcttaggcgctatcaccactctgttcgcagcagtctgcgcccttacacaaaatgacatcaaaaaaatcgtagccttctccacttcaagtcaactaggactcataatagttacaatcggcatcaaccaaccacacctagcattcctgcacatctgtacccacgccttcttcaaagccatactatttatgtgctccgggtccatcatccacaaccttaacaatgaacaagatattcgaaaaataggaggactactcaaaaccatacctctcacttcaacctccctcaccattggcagcctagcattagcaggaatacctttcctcacaggtttctactccaaagaccacatcatcgaaaccgcaaacatatcatacacaaacgcctgagccctatctattactctcatcgctacctccctgacaagcgcctatagcactcgaataattcttctcaccctaacaggtcaacctcgcttccccacccttactaacattaacgaaaataaccccaccctactaaaccccattaaacgcctggcagccggaagcctattcgcaggatttctcattactaacaacatttcccccgcatcccccttccaaacaacaatccccctctacctaaaactcacagccctcgctgtcactttcctaggacttctaacagccctagacctcaactacctaaccaacaaacttaaaataaaatccccactatgcacattttatttctccaacatactcggattctaccctagcatcacacaccgcacaatcccctatctaggccttcttacgagccaaaacctgcccctactcctcctagacctaacctgactagaaaagctattacctaaaacaatttcacagcaccaaatctccacctccatcatcacctcaacccaaaaaggcataattaaactttacttcctctctttcttcttcccactcatcctaaccctactcctaatcacataacctattcccccgagcaatctcaattacaatatatacaccaacaaacaatgttcaaccagtaactactactaatcaacgcccataatcatacaaagcccccgcaccaataggatcctcccgaatcaaccctgacccctctccttcataaattattcagcttcctacactattaaagtttaccacaaccaccaccccatcatactctttcacccacagcaccaatcctacctccatcgctaaccccactaaaacactcaccaagacctcaacccctgacccccatgcctcaggatactcctcaatagccatcgctgtagtatatccaaagacaaccatcattccccctaaataaattaaaaaaactattaaacccatataacctcccccaaaattcagaataataacacacccgaccacaccgctaacaatcaatactaaacccccataaataggagaaggcttagaagaaaaccccacaaaccccattactaaacccacactcaacagaaacaaagcatacatcattattctcgcacggactacaaccacgaccaatgatatgaaaaaccatcgttgtatttcaactacaagaacaccaatgaccccaatacgcaaaactaaccccctaataaaattaattaaccactcattcatcgacctccccaccccatccaacatctccgcatgatgaaacttcggctcactccttggcgcctgcctgatcctccaaatcaccacaggactattcctagccatgcactactcaccagacgcctcaaccgccttttcatcaatcgcccacatcactcgagacgtaaattatggctgaatcatccgctaccttcacgccaatggcgcctcaatattctttatctgcctcttcctacacatcgggcgaggcctatattacggatcatttctctactcagaaacctgaaacatcggcattatcctcctgcttgcaactatagcaacagccttcataggctatgtcctcccgtgagaccaaatatcattctgaggggccacagtaattacaaacttactatccgccatcccatacattgggacagacctagttcaatgaatctgaggaggctactcagtagacagtcccaccctcacacgattctttacctttcacttcatcttgcccttcattattgcagccctagcagcactccacctcctattcttgcacgaaacgggatcaaacaaccccctaggaatcacctcccattccgataaaatcaccttccacccttactacacaatcaaagacgccctcggcttacttctcttccttctctccttaatgacattaacactattctcaccagacctcctaggcgacccagacaattataccctagccaaccccttaaacacccctccccacatcaagcccgaatgatatttcctattcgcctacacaattctccgatccgtccctaacaaactaggaggcgtccttgccctattactatccatcctcatcctagcaataatccccatcctccatatatccaaacaacaaagcataatatttcgcccactaagccaatcactttattgactcctagccgcagacctcctcattctaacctgaatcggaggacaaccagtaagctacccttttaccatcattggacaagtagcatccgtactatacttcacaacaatcctaatcctaataccaactatctccctaattgaaaacaaaatactcaaatgggcctgtccttgtagtataaactaatacaccagtcttgtaaaccggagatgaaaacctttttccaaggacaaatcagagaaaaagtctttaactccaccattagcacccaaagctaagattctaatttaaactattctctgttctttcatggggaagcagatttgggtaccacccaagtattgactcacccatcaacaaccgctatgtatttcgtacattactgccagccaccatgaatattgtacggtaccataaatacttgaccacctgtagtacataaaaacccaatccacatcaaacccccccccccatgcttacaagcaagtacagcaatcaaccctcaactatcacacatcaactgcaactccaaagccacccctcacccactaggataccaacaaacctacccacccttaacagtacatagtacataaagccatttaccgtacatagcacattacagtcaaatcccctctcgtccccatggatgacccccctcagataggggtcccttgaccaccatcctccgtgaaatcaatatcccgcacaagagtgctactctcctcgctccgggcccataacacttgggggtagctaaagtgaactgtatccgacatctggttcctacttcagggccataaagcctaaatagcccacacgttccccttaaataagacatcacgatg

SEQ ID NO: 305 - DNA, 16571 bp, Homo sapiens mitochondrial
  3109: "n" refers to a nucleotide at position 3107 of the Cambridge Reference Sequence (CRS, Anderson et al. 1981 Nature 290:457-465), later determined to be absent from the human mtDNA sequence according to the revised CRS (rCRS, Andrews et al. 1999 Nature Genetics 23:147); "n" therefore represents a single nucleotide deletion at a position corresponding to nucleotide 3107 of SEQ ID NO:1 as provided herein.
gatcacaggtctatcaccctattaaccactcacgggagctctccatgcatttggtattttcgtctggggggtatgcacgcgatagcattgcgagacgctggagccggagcaccctatgtcgcagtatctgtctttgattcctgcctcatcccattatttatcgcacctacgttcaatattacaggcgaacatacttactaaagtgtgttaattaattaatgcttgtaggacataataataacaattgaatgtctgcacagccgctttccacacagacatcataacaaaaaatttccaccaaaccccccctctcccccgcttctggccacagcacttaaacacatctctgccaaaccccaaaaacaaagaaccctaacaccagcctaaccagatttcaaattttatcttttggcggtatgcacttttaacagtcaccccccaactaacacattattttcccctcccactcccatactactaatctcatcaatacaacccccgcccatcctacccagcacacacacaccgctgctaaccccataccccgaaccaaccaaaccccaaagacaccccccacagtttatgtagcttacctcctcaaagcaatacactgaaaatgtttagacgggctcacatcaccccataaacaaataggtttggtcctagcctttctattagctcttagtaagattacacatgcaagcatccccgttccagtgagttcaccctctaaatcaccacgatcaaaagggacaagcatcaagcacgcagcaatgcagctcaaaacgcttagcctagccacacccccacgggaaacagcagtgattaacctttagcaataaacgaaagtttaactaagctatactaaccccagggttggtcaatttcgtgccagccaccgcggtcacacgattaacccaagtcaatagaagccggcgtaaagagtgttttagatcaccccctccccaataaagctaaaactcacctgagttgtaaaaaactccagttgacacaaaatagactacgaaagtggctttaacatatctgaacacacaatagctaagacccaaactgggattagataccccactatgcttagccctaaacctcaacagttaaatcaacaaaactgctcgccagaacactacgagccacagcttaaaactcaaaggacctggcggtgcttcatatccctctagaggagcctgttctgtaatcgataaaccccgatcaacctcaccacctcttgctcagcctatataccgccatcttcagcaaaccctgatgaaggctacaaagtaagcgcaagtacccacgtaaagacgttaggtcaaggtgtagcccatgaggtggcaagaaatgggctacattttctaccccagaaaactacgatagcccttatgaaacttaagggtcgaaggtggatttagcagtaaactgagagtagagtgcttagttgaacagggccctgaagcgcgtacacaccgcccgtcaccctcctcaagtatacttcaaaggacatttaactaaaacccctacgcatttatatagaggagacaagtcgtaacatggtaagtgtactggaaagtgcacttggacgaaccagagtgtagcttaacacaaagcacccaacttacacttaggagatttcaacttaacttgaccgctctgagctaaacctagccccaaacccactccaccttactaccagacaaccttagccaaaccatttacccaaataaagtataggcgatagaaattgaaacctggcgcaatagatatagtaccgcaagggaaagatgaaaaattataaccaagcataatatagcaaggactaacccctataccttctgcataatgaattaactagaaataactttgcaaggagagccaaagctaagacccccgaaaccagacgagctacctaagaacagctaaaagagcacacccgtctatgtagcaaaatagtgggaagatttataggtagaggcgacaaacctaccgagcctggtgatagctggttgtccaagatagaatcttagttcaactttaaatttgcccacagaaccctctaaatccccttgtaaatttaactgttagtccaaagaggaacagctctttggacactaggaaaaaaccttgtagagagagtaaaaaatttaacacccatagtaggcctaaaagcagccaccaattaagaaagcgttcaagctcaacacccactacctaaaaaatcccaaacatataactgaactcctcacacccaattggaccaatctatcaccctatagaagaactaatgttagtataagtaacatgaaaacattctcctccgcataagcctgcgtcagattaaaacactgaactgacaattaacagcccaatatctacaatcaaccaacaagtcattattaccctcactgtcaacccaacacaggcatgctcataaggaaaggttaaaaaaagtaaaaggaactcggcaaatcttaccccgcctgtttaccaaaaacatcacctctagcatcaccagtattagaggcaccgcctgcccagtgacacatgtttaacggccgcggtaccctaaccgtgcaaaggtagcataatcacttgttccttaaatagggacctgtatgaatggctccacgagggttcagctgtctcttacttttaaccagtgaaattgacctgcccgtgaagaggcgggcataacacagcaagacgagaagaccctatggagctttaatttattaatgcaaacagtacctaacaaacccacaggtcctaaactaccaaacctgcattaaaaatttcggttggggcgacctcggagcagaacccaacctccgagcagtacatgctaagacttcaccagtcaaagcgaactactatactcaattgatccaataacttgaccaacggaacaagttaccctagggataacagcgcaatcctattctagagtccatatcaacaatagggtttacgacctcgatgttggatcaggacatcccaatggtgcagccgctattaaaggttcgtttgttcaacgattaaagtcctacgtgatctgagttcagaccggagtaatccaggtcggtttctatctacnttcaaattcctccctgtacgaaaggacaagagaaataaggcctacttcacaaagcgccttcccccgtaaatgatatcatctcaacttagtattatacccacacccacccaagaacagggtttgttaagatggcagagcccggtaatcgcataaaacttaaaactttacagtcagaggttcaattcctcttcttaacaacatacccatggccaacctcctactcctcattgtacccattctaatcgcaatggcattcctaatgcttaccgaacgaaaaattctaggctatatacaactacgcaaaggccccaacgttgtaggcccctacgggctactacaacccttcgctgacgccataaaactcttcaccaaagagcccctaaaacccgccacatctaccatcaccctctacatcaccgccccgaccttagctctcaccatcgctcttctactatgaacccccctccccatacccaaccccctggtcaacctcaacctaggcctcctatttattctagccacctctagcctagccgtttactcaatcctctgatcagggtgagcatcaaactcaaactacgccctgatcggcgcactgcgagcagtagcccaaacaatctcatatgaagtcaccctagccatcattctactatcaacattactaataagtggctcctttaacctctccacccttatcacaacacaagaacacctctgattactcctgccatcatgacccttggccataatatgatttatctccacactagcagagaccaaccgaacccccttcgaccttgccgaaggggagtccgaactagtctcaggcttcaacatcgaatacgccgcaggccccttcgccctattcttcatagccgaatacacaaacattattataataaacaccctcaccactacaatcttcctaggaacaacatatgacgcactctcccctgaactctacacaacatattttgtcaccaagaccctacttctaacctccctgttcttatgaattcgaacagcatacccccgattccgctacgaccaactcatacacctcctatgaaaaaacttcctaccactcaccctagcattacttatatgatatgtctccatacccattacaatctccagcattccccctcaaacctaagaaatatgtctgataaaagagttactttgatagagtaaataataggagcttaaacccccttatttctaggactatgagaatcgaacccatccctgagaatccaaaattctccgtgccacctatcacaccccatcctaaagtaaggtcagctaaataagctatcgggcccataccccgaaaatgttggttatacccttcccgtactaattaatcccctggcccaacccgtcatctactctaccatctttgcaggcacactcatcacagcgctaagctcgcactgattttttacctgagtaggcctagaaataaacatgctagcttttattccagttctaaccaaaaaaataaaccctcgttccacagaagctgccatcaagtatttcctcacgcaagcaaccgcatccataatccttctaatagctatcctcttcaacaatatactctccggacaatgaaccataaccaatactaccaatcaatactcatcattaataatcataatggctatagcaataaaactaggaatagccccctttcacttctgagtcccagaggttacccaaggcacccctctgacatccggcctgcttcttctcacatgacaaaaactagcccccatctcaatcatataccaaatctctccctcactaaacgtaagccttctcctcactctctcaatcttatccatcatagcaggcagttgaggtggattaaaccaaacccagctacgcaaaatcttagcatactcctcaattacccacataggatgaataatagcagttctaccgtacaaccctaacataaccattcttaatttaactatttatattatcctaactactaccgcattcctactactcaacttaaactccagcaccacgaccctactactatctcgcacctgaaacaagctaacatgactaacacccttaattccatccaccctcctctccctaggaggcctgcccccgctaaccggctttttgcccaaatgggccattatcgaagaattcacaaaaaacaatagcctcatcatccccaccatcatagccaccatcaccctccttaacctctacttctacctacgcctaatctactccacctcaatcacactactccccatatctaacaacgtaaaaataaaatgacagtttgaacatacaaaacccaccccattcctccccacactcatcgcccttaccacgctactcctacctatctccccttttatactaataatcttatagaaatttaggttaaatacagaccaagagccttcaaagccctcagtaagttgcaatacttaatttctgtaacagctaaggactgcaaaaccccactctgcatcaactgaacgcaaatcagccactttaattaagctaagcccttactagaccaatgggacttaaacccacaaacacttagttaacagctaagcaccctaatcaactggcttcaatctacttctcccgccgccgggaaaaaaggcgggagaagccccggcaggtttgaagctgcttcttcgaatttgcaattcaatatgaaaatcacctcggagctggtaaaaagaggcctaacccctgtctttagatttacagtccaatgcttcactcagccattttacctcacccccactgatgttcgccgaccgttgactattctctacaaaccacaaagacattggaacactatacctattattcggcgcatgagctggagtcctaggcacagctctaagcctccttattcgagccgagctgggccagccaggcaaccttctaggtaacgaccacatctacaacgttatcgtcacagcccatgcatttgtaataatcttcttcatagtaatacccatcataatcggaggctttggcaactgactagttcccctaataatcggtgcccccgatatggcgtttccccgcataaacaacataagcttctgactcttacctccctctctcctactcatgctcgcatctgctatagtggaggccggagcaggaacaggttgaacagtctaccctcccttagcagggaactactcccaccctggagcctccgtagacctaaccatcttctccttacacctagcaggtgtctcctctatcttaggggccatcaatttcatcacaacaattatcaatataaaaccccctgccataacccaataccaaacgcccctcttcgtctgatccgtcctaatcacagcagtcctacttctcctatctctcccagtcctagctgctggcatcactatactactaacagaccgcaacctcaacaccaccttcttcgaccccgccggaggaggagaccccattctataccaacacctattctgatttttcggtcaccctgaagtttatattcttatcctaccaggcttcggaataatctcccatattgtaacttactactccggaaaaaaagaaccatttggatacataggtatggtctgagctatgatatcaattggcttcctagggtttatcgtgtgagcacaccatatatttacagtaggaatagacgtagacacacgagcatatttcacctccgctaccataatcatcgctatccccaccggcgtcaaagtatttagctgactcgccacactccacggaagcaatatgaaatgatctgctgcagtgctctgagccctaggattcatctttcttttcaccgtaggtggcctgactggcattgtattagcaaactcatcactagacatcgtactacacgacacgtactacgttgtagcccacttccactatgtcctatcaataggagctgtatttgccatcataggaggcttcattcactgatttcccctattctcaggctacaccctagaccaaacctacgccaaaatccatttcactatcatattcatcggcgtaaatctaactttcttcccacaacactttctcggcctatccggaatgccccgacgttactcggactaccccgatgcatacaccacatgaaacatcctatcatctgtaggctcattcatttctctaacagcagtaatattaataattttcatgatttgagaagccttcgcttcgaagcgaaaagtcctaatagtagaagaaccctccataaacctggagtgactatatggatgccccccaccctaccacacattcgaagaacccgtatacataaaatctagacaaaaaaggaaggaatcgaaccccccaaagctggtttcaagccaaccccatggcctccatgactttttcaaaaaggtattagaaaaaccatttcataactttgtcaaagttaaattataggctaaatcctatatatcttaatggcacatgcagcgcaagtaggtctacaagacgctacttcccctatcatagaagagcttatcacctttcatgatcacgccctcataatcattttccttatctgcttcctagtcctgtatgcccttttcctaacactcacaacaaaactaactaatactaacatctcagacgctcaggaaatagaaaccgtctgaactatcctgcccgccatcatcctagtcctcatcgccctcccatccctacgcatcctttacataacagacgaggtcaacgatccctcccttaccatcaaatcaattggccaccaatggtactgaacctacgagtacaccgactacggcggactaatcttcaactcctacatacttcccccattattcctagaaccaggcgacctgcgactccttgacgttgacaatcgagtagtactcccgattgaagcccccattcgtataataattacatcacaagacgtcttgcactcatgagctgtccccacattaggcttaaaaacagatgcaattcccggacgtctaaaccaaaccactttcaccgctacacgaccgggggtatactacggtcaatgctctgaaatctgtggagcaaaccacagtttcatgcccatcgtcctagaattaattcccctaaaaatctttgaaatagggcccgtatttaccctatagcaccccctctaccccctctagagcccactgtaaagctaacttagcattaaccttttaagttaaagattaagagaaccaacacctctttacagtgaaatgccccaactaaatactaccgtatggcccaccataattacccccatactccttacactattcctcatcacccaactaaaaatattaaacacaaactaccacctacctccctcaccaaagcccataaaaataaaaaattataacaaaccctgagaaccaaaatgaacgaaaatctgttcgcttcattcattgcccccacaatcctaggcctacccgccgcagtactgatcattctatttccccctctattgatccccacctccaaatatctcatcaacaaccgactaatcaccacccaacaatgactaatcaaactaacctcaaaacaaatgataaccatacacaacactaaaggacgaacctgatctcttatactagtatccttaatcatttttattgccacaactaacctcctcggactcctgcctcactcatttacaccaaccacccaactatctataaacctagccatggccatccccttatgagcgggcgcagtgattataggctttcgctctaagattaaaaatgccctagcccacttcttaccacaaggcacacctacaccccttatccccatactagttattatcgaaaccatcagcctactcattcaaccaatagccctggccgtacgcctaaccgctaacattactgcaggccacctactcatgcacctaattggaagcgccaccctagcaatatcaaccattaaccttccctctacacttatcatcttcacaattctaattctactgactatcctagaaatcgctgtcgccttaatccaagcctacgttttcacacttctagtaagcctctacctgcacgacaacacataatgacccaccaatcacatgcctatcatatagtaaaacccagcccatgacccctaacaggggccctctcagccctcctaatgacctccggcctagccatgtgatttcacttccactccataacgctcctcatactaggcctactaaccaacacactaaccatataccaatgatggcgcgatgtaacacgagaaagcacataccaaggccaccacacaccacctgtccaaaaaggccttcgatacgggataatcctatttattacctcagaagtttttttcttcgcaggatttttctgagccttttaccactccagcctagcccctaccccccaattaggagggcactggcccccaacaggcatcaccccgctaaatcccctagaagtcccactcctaaacacatccgtattactcgcatcaggagtatcaatcacctgagctcaccatagtctaatagaaaacaaccgaaaccaaataattcaagcactgcttattacaattttactgggtctctattttaccctcctacaagcctcagagtacttcgagtctcccttcaccatttccgacggcatctacggctcaacattttttgtagccacaggcttccacggacttcacgtcattattggctcaactttcctcactatctgcttcatccgccaactaatatttcactttacatccaaacatcactttggcttcgaagccgccgcctgatactggcattttgtagatgtggtttgactatttctgtatgtctccatctattgatgagggtcttactcttttagtataaatagtaccgttaacttccaattaactagttttgacaacattcaaaaaagagtaataaacttcgccttaattttaataatcaacaccctcctagccttactactaataattattacattttgactaccacaactcaacggctacatagaaaaatccaccccttacgagtgcggcttcgaccctatatcccccgcccgcgtccctttctccataaaattcttcttagtagctattaccttcttattatttgatctagaaattgccctccttttacccctaccatgagccctacaaacaactaacctgccactaatagttatgtcatccctcttattaatcatcatcctagccctaagtctggcctatgagtgactacaaaaaggattagactgaaccgaattggtatatagtttaaacaaaacgaatgatttcgactcattaaattatgataatcatatttaccaaatgcccctcatttacataaatattatactagcatttaccatctcacttctaggaatactagtatatcgctcacacctcatatcctccctactatgcctagaaggaataatactatcgctgttcattatagctactctcataaccctcaacacccactccctcttagccaatattgtgcctattgccatactagtctttgccgcctgcgaagcagcggtgggcctagccctactagtctcaatctccaacacatatggcctagactacgtacataacctaaacctactccaatgctaaaactaatcgtcccaacaattatattactaccactgacatgactttccaaaaaacacataatttgaatcaacacaaccacccacagcctaattattagcatcatccctctactattttttaaccaaatcaacaacaacctatttagctgttccccaaccttttcctccgaccccctaacaacccccctcctaatactaactacctgactcctacccctcacaatcatggcaagccaacgccacttatccagtgaaccactatcacgaaaaaaactctacctctctatactaatctccctacaaatctccttaattataacattcacagccacagaactaatcatattttatatcttcttcgaaaccacacttatccccaccttggctatcatcacccgatgaggcaaccagccagaacgcctgaacgcaggcacatacttcctattctacaccctagtaggctcccttcccctactcatcgcactaatttacactcacaacaccctaggctcactaaacattctactactcactctcactgcccaagaactatcaaactcctgagccaacaacttaatatgactagcttacacaatagcttttatagtaaagatacctctttacggactccacttatgactccctaaagcccatgtcgaagcccccatcgctgggtcaatagtacttgccgcagtactcttaaaactaggcggctatggtataatacgcctcacactcattctcaaccccctgacaaaacacatagcctaccccttccttgtactatccctatgaggcataattataacaagctccatctgcctacgacaaacagacctaaaatcgctcattgcatactcttcaatcagccacatagccctcgtagtaacagccattctcatccaaaccccctgaagcttcaccggcgcagtcattctcataatcgcccacgggcttacatcctcattactattctgcctagcaaactcaaactacgaacgcactcacagtcgcatcataatcctctctcaaggacttcaaactctactcccactaatagctttttgatgacttctagcaagcctcgctaacctcgccttaccccccactattaacctactgggagaactctctgtgctagtaaccacgttctcctgatcaaatatcactctcctacttacaggactcaacatactagtcacagccctatactccctctacatatttaccacaacacaatggggctcactcacccaccacattaacaacataaaaccctcattcacacgagaaaacaccctcatgttcatacacctatcccccattctcctcctatccctcaaccccgacatcattaccgggttttcctcttgtaaatatagtttaaccaaaacatcagattgtgaatctgacaacagaggcttacgaccccttatttaccgagaaagctcacaagaactgctaactcatgcccccatgtctaacaacatggctttctcaacttttaaaggataacagctatccattggtcttaggccccaaaaattttggtgcaactccaaataaaagtaataaccatgcacactactataaccaccctaaccctgacttccctaattccccccatccttaccaccctcgttaaccctaacaaaaaaaactcatacccccattatgtaaaatccattgtcgcatccacctttattatcagtctcttccccacaacaatattcatgtgcctagaccaagaagttattatctcgaactgacactgagccacaacccaaacaacccagctctccctaagcttcaaactagactacttctccataatattcatccctgtagcattgttcgttacatggtccatcatagaattctcactgtgatatataaactcagacccaaacattaatcagttcttcaaatatctactcatcttcctaattaccatactaatcttagttaccgctaacaacctattccaactgttcatcggctgagagggcgtaggaattatatccttcttgctcatcagttgatgatacgcccgagcagatgccaacacagcagccattcaagcaatcctatacaaccgtatcggcgatatcggtttcatcctcgccttagcatgatttatcctacactccaactcatgagacccacaacaaatagcccttctaaacgctaatccaagcctcaccccactactaggcctcctcctagcagcagcaggcaaatcagcccaattaggtctccacccctgactcccctcagccatagaaggccccaccccagtctcagccctactccactcaagcactatagttgtagcaggaatcttcttactcatccgcttccaccccctagcagaaaatagcccactaatccaaactctaacactatgcttaggcgctatcaccactctgttcgcagcagtctgcgcccttacacaaaatgacatcaaaaaaatcgtagccttctccacttcaagtcaactaggactcataatagttacaatcggcatcaaccaaccacacctagcattcctgcacatctgtacccacgccttcttcaaagccatactatttatgtgctccgggtccatcatccacaaccttaacaatgaacaagatattcgaaaaataggaggactactcaaaaccatacctctcacttcaacctccctcaccattggcagcctagcattagcaggaatacctttcctcacaggtttctactccaaagaccacatcatcgaaaccgcaaacatatcatacacaaacgcctgagccctatctattactctcatcgctacctccctgacaagcgcctatagcactcgaataattcttctcaccctaacaggtcaacctcgcttccccacccttactaacattaacgaaaataaccccaccctactaaaccccattaaacgcctggcagccggaagcctattcgcaggatttctcattactaacaacatttcccccgcatcccccttccaaacaacaatccccctctacctaaaactcacagccctcgctgtcactttcctaggacttctaacagccctagacctcaactacctaaccaacaaacttaaaataaaatccccactatgcacattttatttctccaacatactcggattctaccctagcatcacacaccgcacaatcccctatctaggccttcttacgagccaaaacctgcccctactcctcctagacctaacctgactagaaaagctattacctaaaacaatttcacagcaccaaatctccacctccatcatcacctcaacccaaaaaggcataattaaactttacttcctctctttcttcttcccactcatcctaaccctactcctaatcacataacctattcccccgagcaatctcaattacaatatatacaccaacaaacaatgttcaaccagtaactactactaatcaacgcccataatcatacaaagcccccgcaccaataggatcctcccgaatcaaccctgacccctctccttcataaattattcagcttcctacactattaaagtttaccacaaccaccaccccatcatactctttcacccacagcaccaatcctacctccatcgctaaccccactaaaacactcaccaagacctcaacccctgacccccatgcctcaggatactcctcaatagccatcgctgtagtatacccaaagacaaccatcattccccctaaataaattaaaaaaactattaaacccatataacctcccccaaaattcagaataataacacacccgaccacaccgctaacaatcaatactaaacccccataaataggagaaggcttagaagaaaaccccacaaaccccattactaaacccacactcaacagaaacaaagcatacatcattattctcgcacggactacaaccacgaccaatgatatgaaaaaccatcgttgtatttcaactacaagaacaccaatgaccccaatacgcaaaactaaccccctaataaaattaattaaccactcattcatcgacctccccaccccatccaacatctccgcatgatgaaacttcggctcactccttggcgcctgcctgatcctccaaatcaccacaggactattcctagccatgcactactcaccagacgcctcaaccgccttttcatcaatcgcccacatcactcgagacgtaaattatggctgaatcatccgctaccttcacgccaatggcgcctcaatattctttatctgcctcttcctacacatcgggcgaggcctatattacggatcatttctctactcagaaacctgaaacatcggcattatcctcctgcttgcaactatagcaacagccttcataggctatgtcctcccgtgaggccaaatatcattctgaggggccacagtaattacaaacttactatccgccatcccatacattgggacagacctagttcaatgaatctgaggaggctactcagtagacagtcccaccctcacacgattctttacctttcacttcatcttgcccttcattattgcagccctagcagcactccacctcctattcttgcacgaaacgggatcaaacaaccccctaggaatcacctcccattccgataaaatcaccttccacccttactacacaatcaaagacgccctcggcttacttctcttccttctctccttaatgacattaacactattctcaccagacctcctaggcgacccagacaattataccctagccaaccccttaaacacccctccccacatcaagcccgaatgatatttcctattcgcctacacaattctccgatccgtccctaacaaactaggaggcgtccttgccctattactatccatcctcatcctagcaataatccccatcctccatatatccaaacaacaaagcataatatttcgcccactaagccaatcactttattgactcctagccgcagacctcctcattctaacctgaatcggaggacaaccagtaagctacccttttaccatcattggacaagtagcatccgtactatacttcacaacaatcctaatcctaataccaactatctccctaattgaaaacaaaatactcaaatgggcctgtccttgtagtataaactaatacaccagtcttgtaaaccggagatgaaaacctttttccaaggacaaatcagagaaaaagtctttaactccaccattagcacccaaagctaagattctaatttaaactattctctgttctttcatggggaagcagatttgggtgccacccaagtattgactcacccatcaacaaccgctatgtatttcgtacattactgccagccaccatgaatattgtacggtaccataaatacttgaccacctgtagtacataaaaacccaatccacatcaaaaccccctccccatgcttacaagcaagtacagcaatcaaccctcaactatcacacatcaactgcaactccaaagccacccctcacccactaggataccaacaaacctacccacccttaacagtacatagcacataaagccatttaccgtacatagcacattacagtcaaatcccttctcgtccccatggatgacccccctcagataggggtcccttgaccaccatcctccgtgaaatcaatatcccgcacaagagtgctactctcctcgctccgggcccataacacttgggggtagctaaagtgaactgtatccgacatctggttcctacttcagggccataaagcctaaatagcccacacgttccccttaaataagacatcacgatg

SEQ ID NO: 306 - DNA, 16571 bp, Homo sapiens mitochondrial
  3109: "n" refers to a nucleotide at position 3107 of the Cambridge Reference Sequence (CRS, Anderson et al. 1981 Nature 290:457-465), later determined to be absent from the human mtDNA sequence according to the revised CRS (rCRS, Andrews et al. 1999 Nature Genetics 23:147); "n" therefore represents a single nucleotide deletion at a position corresponding to nucleotide 3107 of SEQ ID NO:1 as provided herein.
gatcacaggtctatcaccctattaaccactcacgggagctctccatgcatttggtattttcgtctggggggtatgcacgcgatagcattgcgagacgctggagccggagcaccctatgtcgcagtatctgtctttgattcctgcctcatcctattatttatcgcacctacgttcaatattacaggcgaacatacttactaaagtgtgttaattaattaatgcttgtaggacataataataacaattgaatgtctgcacagccgctttccacacagacatcataacaaaaaatttccaccaaaccccccctcccccccgcttctggccacagcacttaaacacatctctgccaaaccccaaaaacaaagaaccctaacaccagcctaaccagatttcaaattttatcttttggcggtatgcacttttaacagtcaccccccaactaacacattattttcccctcccactcccatactactaatctcatcaatacaacccccgcccatcctacccagcacacacacaccgctgctaaccccataccccgaaccaaccaaaccccaaagacaccccccacagtttatgtagcttacctcctcaaagcaatacactgaaaatgtttagacgggctcacatcaccccataaacaaataggtttggtcctagcctttctattagctcttagtaagattacacatgcaagcatccccgttccagtgagttcaccctctaaatcaccacgatcaaaagggacaagcatcaagcacgcagcaatgcagctcaaaacgcttagcctagccacacccccacgggaaacagcagtgattaacctttagcaataaacgaaagtttaactaagctatactaaccccagggttggtcaatttcgtgccagccaccgcggtcacacgattaacccaagtcaatagaagccggcgtaaagagtgttttagatcaccccctccccaataaagctaaaactcacctgagttgtaaaaaactccagttgacacaaaatagactacgaaagtggctttaacatatctgaacacacaatagctaagacccaaactgggattagataccccactatgcttagccctaaacctcaacagttaaatcaacaaaactgctcgccagaacactacgagccacagcttaaaactcaaaggacctggcggtgcttcatatccctctagaggagcctgttctgtaatcgataaaccccgatcaacctcaccacctcttgctcagcctatataccgccatcttcagcaaaccctgatgaaggctacaaagtaagcgcaagtacccacgtaaagacgttaggtcaaggtgtagcccatgaggtggcaagaaatgggctacattttctaccccagaaaactacgatagcccttatgaaacttaagggtcgaaggtggatttagcagtaaactgagagtagagtgcttagttgaacagggccctgaagcgcgtacacaccgcccgtcaccctcctcaagtatacttcaaaggacatttaactaaaacccctacgcatttatatagaggagacaagtcgtaacatggtaagtgtactggaaagtgcacttggacgaaccagagtgtagcttaacacaaagcacccaacttacacttaggagatttcaacttaacttgaccgctctgagctaaacctagccccaaacccactccaccttactaccagacaaccttagccaaaccatttacccaaataaagtataggcgatagaaattgaaacctggcgcaatagatatagtaccgcaagggaaagatgaaaaattataaccaagcataatatagcaaggactaacccctataccttctgcataatgaattaactagaaataactttgcaaggagagccaaagctaagacccccgaaaccagacgagctacctaagaacagctaaaagagcacacccgtctatgtagcaaaatagtgggaagatttataggtagaggcgacaaacctaccgagcctggtgatagctggttgtccaagatagaatcttagttcaactttaaatttgcccacagaaccctctaaatccccttgtaaatttaactgttagtccaaagaggaacagctctttggacactaggaaaaaaccttgtagagagagtaaaaaatttaacacccatagtaggcctaaaagcagccaccaattaagaaagcgttcaagctcaacacccactacctaaaaaatcccaaacatataactgaactcctcacacccaattggaccaatctatcaccctatagaagaactaatgttagtataagtaacatgaaaacattctcctccgcataagcctgcgtcagattaaaacactgaactgacaattaacagcccaatatctacaatcaaccaacaagtcattattaccctcactgtcaacccaacacaggcatgctcataaggaaaggttaaaaaaagtaaaaggaactcggcaaatcttaccccgcctgtttaccaaaaacatcacctctagcatcaccagtattagaggcaccgcctgcccagtgacacatgtttaacggccgcggtaccctaaccgtgcaaaggtagcataatcacttgttccttaaatagggacctgtatgaatggctccacgagggttcagctgtctcttacttttaaccagtgaaattgacctgcccgtgaagaggcgggcataacacagcaagacgagaagaccctatggagctttaatttattaatgcaaacagtacctaacaaacccacaggtcctaaactaccaaacctgcattaaaaatttcggttggggcgacctcggagcagaacccaacctccgagcagtacatgctaagacttcaccagtcaaagcgaactactatactcaattgatccaataacttgaccaacggaacaagttaccctagggataacagcgcaatcctattctagagtccatatcaacaatagggtttacgacctcgatgttggatcaggacatcccgatggtgcagccgctattaaaggttcgtttgttcaacgattaaagtcctacgtgatctgagttcagaccggagtaatccaggtcggtttctatctacnttcaaattcctccctgtacgaaaggacaagagaaataaggcctacttcacaaagcgccttcccccgtaaatgatatcatctcaacttagtattatacccacacccacccaagaacagggtttgttaagatggcagagcccggtaatcgcataaaacttaaaactttacagtcagaggttcaattcctcttcttaacaacatacccatggccaacctcctactcctcattgtacccattctaatcgcaatggcattcctaatgcttaccgaacgaaaaattctaggctatatacaactacgcaaaggccccaacgttgtaggcccctacgggctactacaacccttcgctgacgccataaaactcttcaccaaagagcccctaaaacccgccacatctaccatcaccctctacatcaccgccccgaccttagctctcaccatcgctcttctactatgaacccccctccccatacccaaccccctggtcaacctcaacctaggcctcctatttattctagccacctctagcctagccgtttactcaatcctctgatcagggtgagcatcaaactcaaactacgccctgatcggcgcactgcgagcagtagcccaaacaatctcatatgaagtcaccctagccatcattctactatcaacattactaataagtggctcctttaacctctccacccttatcacaacacaagaacacctctgattactcctgccatcatgacccttggccataatatgatttatctccacactagcagagaccaaccgaacccccttcgaccttgccgaaggggagtccgaactagtctcaggcttcaacatcgaatacgccgcaggccccttcgccctattcttcatagccgaatacacaaacattattataataaacaccctcaccactacaatcttcctaggaacaacatatgacgcactctcccctgaactctacacaacatattttgtcaccaagaccctacttctaacctccctgttcttatgaattcgaacagcatacccccgattccgctacgaccaactcatacacctcctatgaaaaaacttcctaccactcaccctagcattacttatatgatatgtctccatacccattacaatctccagcattccccctcaaacctaagaaatatgtctgataaaagagttactttgatagagtaaataataggagcttaaacccccttatttctaggactatgagaatcgaacccatccctgagaatccaaaattctccgtgccacctatcacaccccatcctaaagtaaggtcagctaaataagctatcgggcccataccccgaaaatgttggttatacccttcccgtactaattaatcccctggcccaacccgtcatctactctaccatctttgcaggcacactcatcacagcgctaagctcgcactgattttttacctgagtaggcctagaaataaacatgctagcttttattccagttctaaccaaaaaaataaaccctcgttccacagaagctgccatcaagtatttcctcacgcaagcaaccgcatccataatccttctaatagctatcctcttcaacaatatactctccggacaatgaaccataaccaatactaccaatcagtactcatcattaataatcataatggctatagcaataaaactaggaatagccccctttcacttctgagtcccagaggttacccaaggcacccctctgacatccggcctgcttcttctcacatgacaaaaactagcccccatctcaatcatataccaaatctctccctcactaaacgtaagccttctcctcactctctcaatcttatccatcatagcaggcagttgaggtggattaaaccaaacccagctacgcaaaatcttagcatactcctcaattacccacataggatgaataatagcagttctaccgtacaaccctaacataaccattcttaatttaactatttatattatcctaactactaccgcattcctactactcaacttaaactccagcaccacgaccctactactatctcgcacctgaaacaagctaacatgactaacacccttaattccatccaccctcctctccctaggaggcctgcccccgctaaccggctttttgcccaaatgggccattatcgaagaattcacaaaaaacaatagcctcatcatccccaccatcatagccaccatcaccctccttaacctctacttctacctacgcctaatctactccacctcaatcacactactccccatatctaacaacgtaaaaataaaatgacagtttgaacatacaaaacccaccccattcctccccacactcatcgcccttaccacgctactcctacctatctccccttttatactaataatcttatagaaatttaggttaaatacagaccaagagccttcaaagccctcagtaagttgcaatacttaatttctgtaacagctaaggactgcaaaaccccactctgcatcaactgaacgcaaatcagccactttaattaagctaagcccttactagaccaatgggacttaaacccacaaacacttagttaacagctaagcaccctaatcaactggcttcaatctacttctcccgccgccgggaaaaaaggcgggagaagccccggcaggtttgaagctgcttcttcgaatttgcaattcaatatgaaaatcacctcggagctggtaaaaagaggcctaacccctgtctttagatttacagtccaatgcttcactcagccattttacctcacccccactgatgttcgccgaccgttgactattctctacaaaccacaaagacattggaacactatacctattattcggcgcatgagctggagtcctaggcacagctctaagcctccttattcgagccgagctgggccagccaggcaaccttctaggtaacgaccacatctacaacgttatcgtcacagcccatgcatttgtaataatcttcttcatagtaatacccatcataatcggaggctttggcaactgactagttcccctaataatcggtgcccccgatatggcgtttccccgcataaacaacataagcttctgactcttacctccctctctcctactcctgctcgcatctgctatagtggaggccggagcaggaacaggttgaacagtctaccctcccttagcagggaactactcccaccctggagcctccgtagacctaaccatcttctccttacacctagcaggtgtctcctctatcttaggggccatcaatttcatcacaacaattatcaatataaaaccccctgccataacccaataccaaacgcccctcttcgtctgatccgtcctaatcacagcagtcctacttctcctatctctcccagtcctagctgctggcatcactatactactaacagaccgcaacctcaacaccaccttcttcgaccccgccggaggaggagaccccattctataccaacacctattctgatttttcggtcaccctgaagtttatattcttatcctaccaggcttcggaataatctcccatattgtaacttactactccggaaaaaaagaaccatttggatacataggtatggtctgagctatgatatcaattggcttcctagggtttatcgtgtgagcacaccatatatttacagtaggaatagacgtagacacacgagcatatttcacctccgctaccataatcatcgctatccccaccggcgtcaaagtatttagctgactcgccacactccacggaagcaatatgaaatgatctgctgcagtgctctgagccctaggattcatctttcttttcaccgtaggtggcctgactggcattgtattagcaaactcatcactagacatcgtactacacgacacgtactacgttgtagcccacttccactatgtcctatcaataggagctgtatttgccatcataggaggcttcattcactgatttcccctattctcaggctacaccctagaccaaacctacgccaaaatccatttcactatcatattcatcggcgtaaatctaactttcttcccacaacactttctcggcctatccggaatgccccgacgttactcggactaccccgatgcatacaccacatgaaacatcctatcatctgtaggctcattcatttctctaacagcagtaatattaataattttcatgatttgagaagccttcgcttcaaagcgaaaagtcctaatagtagaagaaccctccataaacctggagtgactatatggatgccccccaccctaccacacattcgaagaacccgtatacataaaatctagacaaaaaaggaaggaatcgaaccccccaaagctggtttcaagccaaccccatggcctccatgactttttcaaaaaggtattagaaaaaccatttcataactttgtcaaagttaaattataggctaaatcctatatatcttaatggcacatgcagcgcaagtaggtctacaagacgctacttcccctatcatagaagagcttatcacctttcatgatcacgccctcataatcattttccttatctgcttcctagtcctgtatgcccttttcctaacactcacaacaaaactaactaatactaacatctcagacgctcaggaaatagaaaccgtctgaactatcctgcccgccatcatcctagtcctcatcgccctcccatccctacgcatcctttacataacagacgaggtcaacgatccctcccttaccatcaaatcaattggccaccaatggtactgaacctacgagtacaccgactacggcggactaatcttcaactcctacatacttcccccattattcctagaaccaggcgacctgcgactccttgacgttgacaatcgagtagtactcccgattgaagcccccattcgtataataattacatcacaagacgtcttgcactcatgagctgtccccacattaggcttaaaaacagatgcaattcccggacgtctaaaccaaaccactttcaccgctacacgaccgggggtatactacggtcaatgctctgaaatctgtggagcaaaccacagtttcatgcccatcgtcctagaattaattcccctaaaaatctttgaaatagggcccgtatttaccctatagcaccccctctaccccctctagagcccactgtaaagctaacttagcattaaccttttaagttaaagattaagagaaccaacacctctttacagtgaaatgccccaactaaatactaccgtatggcccaccataattacccccatactccttacactattcctcatcacccaactaaaaatattaaacacaaactaccacctacctccctcaccaaagcccataaaaataaaaaattataacaaaccctgagaaccaaaatgaacgaaaatctgttcgcttcattcattgcccccacaatcctaggcctacccgccgcagtactgatcattctatttccccctctattgatccccacctccaaatatctcatcaacaaccgactaatcaccacccaacaatgactaatcaaactaacctcaaaacaaatgataaccatacacaacactaaaggacgaacctgatctcttatactagtatccttaatcatttttattgccacaactaacctcctcggactcctgcctcactcatttacaccaaccacccaactatctataaacctagccatggccatccccttatgagcgggcgcagtgattataggctttcgctctaagattaaaaatgccctagcccacttcttaccacaaggcacacctacaccccttatccccatactagttattatcgaaaccatcagcctactcattcaaccaatagccctggccgtacgcctaaccgctaacattactgcaggccacctactcatgcacctaattggaagcgccaccctagcaatatcaaccattaaccttccctctacacttatcatcttcacaattctaattctactgactatcctagaaatcgctgtcgccttaatccaagcctacgttttcacacttctagtaagcctctacctgcacgacaacacataatgacccaccaatcacatgcctatcatatagtaaaacccagcccatgacccctaacaggggccctctcagccctcctaatgacctccggcctagccatgtgatttcacttccactccataacgctcctcatactaggcctactaaccaacacactaaccatataccaatgatggcgcgatgtaacacgagaaagcacataccaaggccaccacacaccacctgtccaaaaaggccttcgatacgggataatcctatttattacctcagaagtttttttcttcgcaggatttttctgagccttttaccactccagcctagcccctaccccccaattaggagggcactggcccccaacaggcatcaccccgctaaatcccctagaagtcccactcctaaacacatccgtattactcgcatcaggagtatcaatcacctgagctcaccatagtctaatagaaaacaaccgaaaccaaataattcaagcactgcttattacaattttactgggtctctattttaccctcctacaagcctcagagtacttcgagtctcccttcaccatttccgacggcatctacggctcaacattttttgtagccacaggcttccacggacttcacgtcattattggctcaactttcctcactatctgcttcatccgccaactaatatttcactttacatccaaacatcactttggcttcgaagccgccgcctgatactggcattttgtagatgtggtttgactatttctgtatgtctccatctattgatgagggtcttactcttttagtataaatagtaccgttaacttccaattaactagttttgacaacattcaaaaaagagtaataaacttcgccttaattttaataatcaacaccctcctagccttactactaataattattacattttgactaccacaactcaacggctacatagaaaaatccaccccttacgagtgcggcttcgaccctatatcccccgcccgcgtccctttctccataaaattcttcttagtagctattaccttcttattatttgatctagaaattgccctccttttacccctaccatgagccctacaaacaactaacctgccactaatagttatgtcatccctcttattaatcatcatcctagccctaagtctggcctatgagtgactacaaaaaggattagactgaaccgaattggtatatagtttaaacaaaacgaatgatttcgactcattaaattatgataatcatatttaccaaatgcccctcatttacataaatattatactagcatttaccatctcacttctaggaatactagtatatcgctcacacctcatatcctccctactatgcctagaaggaataatactatcgctgttcattatagctactctcataaccctcaacacccactccctcttagccaatattgtgcctattgccatactagtctttgccgcctgcgaagcagcggtgggcctagccctactagtctcaatctccaacacatatggcctagactacgtacataacctaaacctactccaatgctaaaactaatcgtcccaacaattatattactaccactgacatgactttccaaaaaacacataatttgaatcaacacaaccacccacagcctaattattagcatcatccctctactattttttaaccaaatcaacaacaacctatttagctgttccccaaccttttcctccgaccccctaacaacccccctcctaatactaactacctgactcctacccctcacaatcatggcaagccaacgccacttatccagtgaaccactatcacgaaaaaaactctacctctctatactaatctccctacaaatctccttaattataacattcacagccacagaactaatcatattttatatcttcttcgaaaccacacttatccccaccttggctatcatcacccgatgaggcaaccagccagaacgcctgaacgcaggcacatacttcctattctacaccctagtaggctcccttcccctactcatcgcactaatttacactcacaacaccctaggctcactaaacattctactactcactctcactgcccaagaactatcaaactcctgagccaacaacttaatatgactagcttacacaatagcttttatagtaaagatacctctttacggactccacttatgactccctaaagcccatgtcgaagcccccatcgctgggtcaatagtacttgccgcagtactcttaaaactaggcggctatggtataatacgcctcacactcattctcaaccccctgacaaaacacatagcctaccccttccttgtactatccctatgaggcataattataacaagctccatctgcctacgacaaacagacctaaaatcgctcattgcatactcttcaatcagccacatagccctcgtagtaacagccattctcatccaaaccccctgaagcttcaccggcgcagtcattctcataatcgcccacgggcttacatcctcattactattctgcctagcaaactcaaactacgaacgcactcacagtcgcatcataatcctctctcaaggacttcaaactctactcccactaatagctttttgatgacttctagcaagcctcgctaacctcgccttaccccccactattaacctactgggagaactctctgtgctagtaaccacgttctcctgatcaaatatcactctcctacttacaggactcaacatactagtcacagccctatactccctctacatatttaccacaacacaatggggctcactcacccaccacattaacaacataaaaccctcattcacacgagaaaacaccctcatgttcatacacctatcccccattctcctcctatccctcaaccccgacatcattaccgggttttcctcttgtaaatatagtttaaccaaaacatcagattgtgaatctgacaacagaggcttacgaccccttatttaccgagaaagctcacaagaactgctaactcatgcccccatgtctaacaacatggctttctcaacttttaaaggataacagctatccattggtcttaggccccaaaaattttggtgcaactccaaataaaagtaataaccatgcacactactataaccaccctaaccctgacttccctaattccccccatccttaccaccctcgttaaccctaacaaaaaaaactcatacccccattatgtaaaatccattgtcgcatccacctttattatcagtctcttccccacaacaatattcatgtgcctagaccaagaagttattatctcgaactgacactgagccacaacccaaacaacccagctctccctaagcttcaaactagactacttctccataatattcatccctgtagcattgttcgttacatggtccatcatagaattctcactgtgatatataaactcagacccaaacattaatcagttcttcaaatatctactcatcttcctaattaccatactaatcttagttaccgctaacaacctattccaactgttcatcggctgagagggcgtaggaattatatccttcttgctcatcagttgatgatacgcccgagcagatgccaacacagcagccattcaagcaatcctatacaaccgtatcggcgatatcggtttcatcctcgccttagcatgatttatcctacactccaactcatgagacccacaacaaatagcccttctaaacgctaatccaagcctcaccccactactaggcctcctcctagcagcagcaggcaaatcagcccaattaggtctccacccctgactcccctcagccatagaaggccccaccccagtctcagccctactccactcaagcactatagttgtagcaggaatcttcttactcatccgcttccaccccctagcagaaaatagcccactaatccaaactctaacactatgcttaggcgctatcaccactctgttcgcagcagtctgcgcccttacacaaaatgacatcaaaaaaatcgtagccttctccacttcaagtcaactaggactcataatagttacaatcggcatcaaccaaccacacctagcattcctgcacatctgcacccacgccttcttcaaagccatactatttatgtgctccgggtccatcatccacaaccttaacaatgaacaagatattcgaaaaataggaggactactcaaaaccatacctctcacttcaacctccctcaccattggcagcctagcattagcaggaatacctttcctcacaggtttctactccaaagaccacatcatcgaaaccgcaaacatatcatacacaaacgcctgagccctatctattactctcatcgctacctccctgacaagcgcctatagcactcgaataattcttctcaccctaacaggtcaacctcgcttccccacccttactaacattaacgaaaataaccctaccctactaaaccccattaaacgcctggcagccggaagcctattcgcaggatttctcattactaacaacatttcccccgcatcccccttccaaacaacaatccccctctacctaaaactcacagccctcgctgtcactttcctaggacttctaacagccctagacctcaactacctaaccaacaaacttaaaataaaatccccactatgcacattttatttctccaacatactcggattctaccctagcatcacacaccgcacaatcccctatctaggccttcttacgagccaaaacctgcccctactcctcctagacctaacctgactagaaaagctattacctaaaacaatttcacagcaccaaatctccacctccatcatcacctcaacccaaaaaggcataattaaactttacttcctctctttcttcttcccactcatcctaaccctactcctaatcacataacctattcccccgagcaatctcaattacaatatatacaccaacaaacaatgttcaaccagtaactactactaatcaacgcccataatcatacaaagcccccgcaccaataggatcctcccgaatcaaccctgacccctctccttcataaattattcagcttcctacactattaaagtttaccacaaccaccaccccatcatactctttcacccacagcaccaatcctacctccatcgctaaccccactaaaacactcaccaagacctcaacccctgacccccatgcctcaggatactcctcaatagccatcgctgtagtatatccaaagacaaccatcattccccctaaataaattaaaaaaactattaaacccatataacctcccccaaaattcagaataataacacacccgaccacaccgctaacaatcaatactaaacccccataaataggagaaggcttagaagaaaaccccacaaaccccattactaaacccacactcaacagaaacaaagcatacatcattattctcgcacggactacaaccacgaccaatgatatgaaaaaccatcgttgtatttcaactacaagaacaccaatgaccccaatacgcaaaactaaccccctaataaaattaattaaccactcattcatcgacctccccaccccatccaacatctccgcatgatgaaacttcggctcactccttggcgcctgcctgattctccaaatcaccacaggactattcctagccatgcactactcaccagacgcctcaaccgccttttcatcaatcgcccacatcactcgagacgtaaattatggctgaatcatccgctaccttcacgccaatggcgcctcaatattctttatctgcctcttcctacacatcgggcgaggcctatattacggatcatttctctactcagaaacctgaaacatcggcattatcctcctgcttgcaactatagcaacagccttcataggctatgtcctcccgtgaggccaaatatcattctgaggggccacagtaattacaaacttactatccgccatcccatacattgggacagacctagttcaatgaatctgaggaggctactcagtagacagtcccaccctcacacgattctttacctttcacttcatcttgcccttcattattgcagccctagcagcactccacctcctattcttgcacgaaacgggatcaaacaaccccctaggaatcacctcccattccgataaaatcaccttccacccttactacacaatcaaagacgccctcggcttacttctcttccttctctccttaatgacattaacactattctcaccagacctcctaggcgacccagacaattataccctagccaaccccttaaacacccctccccacatcaagcccgaatgatatttcctattcgcctacacaattctccgatccgtccctaacaaactaggaggcgtccttgccctattactatccatcctcatcctagcaataatccccatcctccatatatccaaacaacaaagcataatatttcgcccactaagccaatcactttattgactcctagccgcagacctcctcattctaacctgaatcggaggacaaccagtaagctacccttttaccatcattggacaagtagcatccgtactatacttcacaacaatcctaatcctaataccaactatctccctaattgaaaacaaaatactcaaatgggcctgtccttgtagtataaactaatacaccagtcttgtaaaccggagatgaaaacctttttccaaggacaaatcagagaaaaagtctttaactccaccattagcacccaaagctaagattctaatttaaactattctctgttctttcatggggaagcagatttgggtaccacccaagtattgactcacccatcaacaaccgctatgtatttcgtacattactgccagccaccatgaatattgtacggtaccataaatacttgaccacctgtagtacataaaaacccaatccacatcaaaaccccctccccatgcttacaagcaagtacagcaatcaaccctcaactatcacacatcaactgcaactccaaagccacccctcacccactaggataccaacaaacctacccacccttaacagtacatagtacataaagccatttaccgtacatagcacattacagtcaaatcccttctcgtccccatggatgacccccctcagataggggtcccttgaccaccatcctccgtgaaatcaatatcccgcacaagagtgctactctcctcgctccgggcccataacacttgggggtagctaaagtgaactgtatccgacatctggttcctacttcagggccataaagcctaaatagcccacacgttccccttaaataagacatcacgatg

SEQ ID NO: 307 - DNA, 16570 bp, Homo sapiens mitochondrial
  3108: "n" refers to a nucleotide at position 3107 of the Cambridge Reference Sequence (CRS, Anderson et al. 1981 Nature 290:457-465), later determined to be absent from the human mtDNA sequence according to the revised CRS (rCRS, Andrews et al. 1999 Nature Genetics 23:147); "n" therefore represents a single nucleotide deletion at a position corresponding to nucleotide 3107 of SEQ ID NO:1 as provided herein.
gatcacaggtctatcaccctattaaccactcacgggagctctccatgcatttggtattttcgtctggggggtgtgcacgcgatagcattgcgagacgctggagccggagcaccctatgtcgcagtatctgtctttgattcctgcctcatcctattatttatcgcacctacgttcaatattacaggcgaacatacttactaaagtgtgttaattaattaatgcttgtaggacataataataacaattgaatgtctgcacagccgctttccacacagacatcataacaaaaaatttccaccaaaccccccctcccccgccttctggccacagcacttaaacacatctctgccaaaccccaaaaacaaagaaccctaacaccagcctaaccagatttcaaattttatcttttggcggtatgcacttttaacagtcaccccccaactaacacattattttcccctcccactcccatactactaatctcatcaatacaacccccgcccatcctacccagcacacacacaccgctgctaaccccataccccgaaccaaccaaaccccaaagacaccccccacagtttatgtagcttacctcctcaaagcaatacactgaaaatgtttagacgggctcacatcaccccataaacaaataggtttggtcctagcctttctattagctcttagtaagattacacatgcaagcatccccattccagtgagttcaccctctaaatcaccacgatcaaaagggacaagcatcaagcacgcagcaatgcagctcaaaacgcttagcctagccacacccccacgggaaacagcagtgattaacctttagcaataaacgaaagtttaactaagctatactaaccccagggttggtcaatttcgtgccagccaccgcggtcacacgattaacccaagtcaatagaaaccggcgtaaagagtgttttagatcaccccctccccaataaagctaaaactcacctgagttgtaaaaaactccagttgacacaaaatagactacgaaagtggctttaacatatctgaacacacaatagctaagacccaaactgggattagataccccactatgcttagccctaaacctcaacagttaaatcaacaaaactgctcgccagaacactacgagccacagcttaaaactcaaaggacctggcggtgcttcatatccctctagaggagcctgttctgtaatcgataaaccccgatcaacctcaccacctcttgctcagcctatataccgccatcttcagcaaaccctgatgaaggctacaaagtaagcgcaagtacccacgtaaagacgttaggtcaaggtgtagcccatgaggtggcaagaaatgggctacattttctaccccagaaaactacgatagcccttatgaaacttaagggtcgaaggtggatttagcagtaaactgagagtagagtgcttagttgaacaaggccctgaagcgcgtacacaccgcccgtcaccctcctcaagtatacttcaaaggacatttaactaaaacccctacgcatttatatagaggagacaagtcgtaacatggtaagtgtactggaaagtgcacttggacgaaccagagtgtagcttaacacaaagcacccaacttacacttaggagatttcaacttaacttgaccgctctgagctaaacctagccccaaacccactccaccttactaccagacaaccttagccaaaccatttacccaaataaagtataggcgatagaaattgaaacctggcgcaatagatatagtaccgcaagggaaagatgaaaaattataaccaagcataatatagcaaggactaacccctataccttctgcataatgaattaactagaaataactttgcaaggagaaccaaagctaagacccccgaaaccagacgagctacctaagaacagctaaaagagcacacccgtctatgtagcaaaatagtgggaagatttataggtagaggcgacaaacctaccgagcctggtgatagctggttgtccaagatagaatcttagttcaactttaaatttgcccacagaaccctctaaatccccttgtaaatttaactgttagtccaaagaggaacagctctttggacactaggaaaaaaccttgtagagagagtaaaaaatttaacacccatagtaggcctaaaagcagccaccaattaagaaagcgttcaagctcaacacccactacccaaaaaatcccaaacatataactgaactcctcacacccaattggaccaatctatcaccctatagaagaactaatgttagtataagtaacatgaaaacattctcctccgcataagcctgcgtcagattaaaacactgaactgacaattaacagcccaatatctacaatcaaccaacaagtcattattaccctcactgtcaacccaacacaggcatgctcataaggaaaggttaaaaaaagtaaaaggaactcggcaaatcttaccccgcctgtttaccaaaaacatcacctctagcatcaccagtattagaggcaccgcctgcccagtgacacatgtttaacggccgcggtaccctaaccgtgcaaaggtagcataatcacttgttccttaaatagggacctgtatgaatggctccacgagggttcagctgtctcttacttttaaccagtgaaattgacctgcccgtgaagaggcgggcatgacacagcaagacgagaagaccctatggagctttaatttattaatgcaaacagtacctaacaaacccacaggtcctaaactaccaaacctgcattaaaaatttcggttggggcgacctcggagcagaacccaacctccgagcagtacatgctaagacttcaccagtcaaagcgaactactatactcaattgatccaataacttgaccaacggaacaagttaccctagggataacagcgcaatcctattctagagtccatatcaacaatagggtttacgacctcgatgttggatcaggacatcccgatggtgcagccgctattaaaggttcgtttgttcaacgattaaagtcctacgtgatctgagttcagaccggagtaatccaggtcggtttctatctacnttcaaattcctccctgtacgaaaggacaagagaaataaggcctacttcacaaagcgccttcccccgtaaatgatatcatctcaacttagtattatacccacacccacccaagaacagggtttgttaagatggcagagcccggtaatcgcataaaacttaaaactttacagtcagaggttcaattcctcttcttaacaacatacccatggccaacctcctactcctcattgtacccattctaatcgcaatggcattcctaatgcttaccgaacgaaaaattctaggctatatacaactacgcaaaggccccaacgttgtaggcccctacgggctactacaacccttcgctgacgccataaaactcttcaccaaagagcccctaaaacccgccacatctaccatcaccctctacatcaccgccccgaccttagctctcaccatcgctcttctactatgaacccccctccccatacccaaccccctggtcaacctcaacctaggcctcctatttattctagccacctctagcctagccgtttactcaatcctctgatcagggtgagcatcaaactcaaactacgccctgatcggcgcactgcgagcagtagcccaaacaatctcatatgaagtcaccctagccatcattctactatcaacattactaataagtggctcctttaacctctccacccttatcacaacacaagaacacctctgattactcctgccatcatgacccttggccataatatgatttatctccacactagcagagaccaaccgaacccccttcgaccttgccgaaggggagtccgaactagtctcaggcttcaacatcgaatacgccgcaggccccttcgccctattcttcatagccgaatacacaaacattattataataaacaccctcaccactacaatcttcctaggaacaacatatgacgcactctcccctgaactctacacaacatattttgtcaccaagaccctacttctaacctccctgttcttatgaattcgaacagcatacccccgattccgctacgaccaactcatacacctcctatgaaaaaacttcctaccactcaccctagcattacttatatgacatgtctccatacccattacaatctccagcattccccctcaaacctaagaaatatgtctgataaaagagttactttgatagagtaaataataggagcttaaacccccttatttctaggactatgagaatcgaacccatccctgagaatccaaaattctccgtgccacctatcacaccccatcctaaagtaaggtcagctaaataagctatcgggcccataccccgaaaatgttggttatacccttcccgtactaattaatcccctggcccaacccgtcatctactctaccatctttgcaggcacactcatcacagcgctaagctcgcactgattttttacctgagtaggcctagaaataaacatgctagcttttattccagttctaaccaaaaaaataaaccctcgttccacagaagctgccatcaagtatttcctcacgcaagcaaccgcatccataatccttctaatagctatcctcttcaacaatatactctccggacaatgaaccataaccaatactaccaatcaatactcatcattaataatcataatggctatagcaataaaactaggaatagccccctttcacttctgagtcccagaggttacccaaggcacccctctgacatccggcctgcttcttctcacatgacaaaaactagcccccatctcaatcatataccaaatctctccctcactagacgtaagccttctcctcactctctcaatcttatccatcatagcaggcagttgaggtggattaaaccaaacccagctacgcaaaatcttagcatactcctcaattacccacataggatgaataatagcagttctaccgtacaaccctaacataaccattcttaatttaactatttatattatcctaactactaccgcattcctactactcaacttaaactccagcaccacaaccctactactatctcgcacctgaaacaagctaacatgactaacacccttaattccatccaccctcctctccctaggaggcctgcccccgctaaccggctttttgcccaaatgggccattatcgaagaattcacaaaaaacaatagcctcatcatccccaccatcatagccaccatcaccctccttaacctctacttctacctacgcctaatctactccacctcaatcacactactccccatatctaacaacgtaaaaataaaatgacagtttgaacatacaaaacccaccccattcctccccacactcatcgcccttaccacgctactcctacctatctccccttttatactaataatcttatagaaatttaggttaaatacagaccaagagccttcaaagccctcagtaagttgcaatacttaatttctgtaacagctaaggactgcaaaaccccactctgcatcaactgaacgcaaatcagccactttaattaagctaagcccttactagaccaatgggacttaaacccacaaacacttagttaacagctaagcaccctaatcaactggcttcaatctacttctcccgccgccgggaaaaaaggcgggagaagccccggcaggtttgaagctgcttcttcgaatttgcaattcaatatgaaaatcacctcggagctggtaaaaagaggcctaacccctgtctttagatttacagtccaatgcttcactcagccattttacctcacccccactgatgttcgccgaccgttgactattctctacaaaccacaaagacattggaacactatacctattattcggcgcatgagctggagtcctaggcacagctctaagcctccttattcgagccgagctgggccagccaggcaaccttctaggtaacgaccacatctacaacgttatcgtcacagcccatgcatttgtaataatcttcttcatagtaatacccatcataatcggaggctttggcaactgactagttcccctaataatcggtgcccccgatatggcgtttccccgcataaacaacataagcttctgactcttacctccctctctcctactcctgctcgcatctgctatagtggaggccggagcaggaacaggttgaacagtctaccctcccttagcagggaactactcccaccctggagcctccgtagacctaaccatcttctccttacacctagcaggtgtctcctctatcttaggggccatcaatttcatcacaacaattatcaatataaaaccccctgccataacccaataccaaacgcccctcttcgtctgatccgtcctaatcacagcagtcctacttctcctatctctcccagtcctagctgctggcatcactatactactaacagaccgcaacctcaacaccaccttcttcgaccccgccggaggaggagaccccattctataccaacacctattctgatttttcggtcaccctgaagtttatattcttatcctaccaggcttcggaataatctcccatattgtaacttactactccggaaaaaaagaaccatttggatacataggtatggtctgagctatgatatcaattggcttcctagggtttatcgtgtgagcacaccatatatttacagtaggaatagacgtagacacacgagcatatttcacctccgctaccataatcatcgctatccccaccggcgtcaaagtatttagctgactcgccacactccacggaagcaatatgaaatgatctgctgcagtgctctgagccctaggattcatctttcttttcaccgtaggtggcctgactggcattgtattagcaaactcatcactagacatcgtactacacgacacgtactacgttgtagctcacttccactatgtcctatcaataggagctgtatttgccatcataggaggcttcattcactgatttcccctattctcaggctacaccctagaccaaacctacgccaaaatccatttcactatcatattcatcggcgtaaatctaactttcttcccacaacactttctcggcctatccggaatgccccgacgttactcggactaccccgatgcatacaccacatgaaacatcctatcatctgtaggctcattcatttctctaacagcagtaatattaataattttcatgatttgagaagccttcgcttcgaagcgaaaagtcctaatagtagaagaaccctccataaacctggagtgactatatggatgccccccaccctaccacacattcgaagaacccgtatacataaaatctagacaaaaaaggaaggaatcgaaccccccaaagctggtttcaagccaaccccatggcctccatgactttttcaaaaaggtattagaaaaaccatttcataactttgtcaaagttaaattataggctaaatcctatatatcttaatggcacatgcagcgcaagtaggtctacaagacgctacttcccctatcatagaagagcttatcacctttcatgatcacgccctcataatcattttccttatctgcttcctagtcctgtatgcccttttcctaacactcacaacaaaactaactaatactaacatctcagacgctcaggaaatagaaaccgtctgaactatcctgcccgccatcatcctagtcctcatcgccctcccatccctacgcatcctttacataacagacgaggtcaacgatccctcccttaccatcaaatcaattggccaccaatggtactgaacctacgagtacaccgactacggcggactaatcttcaactcctacatacttcccccattattcctagaaccaggcgacctgcgactccttgacgttgacaatcgagtagtactcccgattgaagcccccattcgtataataattacatcacaagacgtcttgcactcatgagctgtccccacattaggcttaaaaacagatgcaattcccggacgtctaaaccaaaccactttcaccgctacacgaccgggggtatactacggtcaatgctctgaaatctgtggagcaaaccacagtttcatgcccatcgtcctagaattaattcccctaaaaatctttgaaatagggcccgtatttaccctatagcaccccctctaccccctctagagcccactgtaaagctaacttagcattaaccttttaagttaaagattaagagaaccaacacctctttacagtgaaatgccccaactaaatactaccgtatggcccaccataattacccccatactccttacactattcctcatcacccaactaaaaatattaaacacaaactaccacctacctccctcaccaaagcccataaaaataaaaaattataacaaaccctgagaaccaaaatgaacgaaaatctgttcgcttcattcattgcccccacaatcctaggcctacccgccgcagtactgatcattctatttccccctctattgatccccacctccaaatatctcatcaacaaccgactaatcaccacccaacaatgactaatcaaactaacctcaaaacaaataataaccatacacaacactaaaggacgaacctgatctcttatactagtatccttaatcatttttattgccacaactaacctcctcggactcctgcctcactcatttacaccaaccacccaactatctataaacctagccatggccatccccttatgagcgggcgcagtgattataggctttcgctctaagattaaaaatgccctagcccacttcttaccacaaggcacacctacaccccttatccccatactagttattatcgaaaccatcagcctactcattcaaccaatagccctggccgtacgcctaaccgctaacattactgcaggccacctactcatgcacctaattggaagcgccaccctagcaatatcaaccattaaccttccctctacacttatcatcttcacaattctaattctactgactatcctagaaatcgctgtcgccttaatccaagcctacgttttcacacttctagtaagcctctacctgcacgacaacacataatgacccaccaatcacatgcctatcatatagtaaaacccagcccatgacccctaacaggggccctctcagccctcctaatgacctccggcctagccatgtgatttcacttccactccataacgctcctcatactaggcctactaaccaacacactaaccatataccaatgatggcgcgatgtaacacgagaaagcacataccaaggccaccacacaccacctgtccaaaaaggccttcgatacgggataatcctatttattacctcagaagtttttttcttcgcaggatttttctgagccttttaccactccagcctagcccctaccccccaattaggagggcactggcccccaacaggcatcaccccgctaaatcccctagaagtcccactcctaaacacatccgtattactcgcatcaggagtatcaatcacctgagctcaccatagtctaatagaaaacaaccgaaaccaaataattcaagcactgcttattacaattttactgggtctctattttaccctcctacaagcctcagagtacttcgagtctcccttcaccatttccgacggcatctacggctcaacattttttgtagccacaggcttccacggacttcacgtcattattggctcaactttcctcactatctgcttcatccgccaactaatatttcactttacatccaaacatcactttggcttcgaagccgccgcctgatactggcattttgtagatgtggtttgactatttctgtatgtctccatctattgatgagggtcttactcttttagtataaatagtaccgttaacttccaattaactagttttgacaacattcaaaaaagagtaataaacttcgccttaattttaataatcaacaccctcctagccttactactaataattattacattttgactaccacaactcaacggctacatagaaaaatccaccccttacgagtgcggcttcgaccctatatcccccgcccgcgtccctttctccataaaattcttcttagtagctattaccttcttattatttgatctagaaattgccctccttttacccctaccatgagccctacaaacaactaacctgccactaatagttatgtcatccctcttattaatcatcatcctagccctaagtctggcctatgagtgactacaaaaaggattagactgaaccgaattggtatatagtttaaacaaaacgaatgatttcgactcattaaattatgataatcatatctaccaaatgcccctcatttacataaatattatactagcatttaccatctcacttctaggaatactagtatatcgctcacacctcatatcctccctactatgcctagaaggaataatactatcgctgttcattatagctactctcataaccctcaacacccactccctcttagccaatattgtgcctattgccatactagtctttgccgcctgcgaagcagcggtgggcctagccctactagtctcaatctccaacacatatggcctagactacgtacataacctaaacctactccaatgctaaaactaatcgtcccaacaattatattactaccactgacatgactttccaaaaaacacataatttgaatcaacacaaccacccacagcctaattattagcatcatccctctactattttttaaccaaatcaacaacaacctatttagctgttccccaaccttttcctccgaccccctaacaacccccctcctaatactaactacctgactcctacccctcacaatcatggcaagccaacgccacttatccagtgaaccactatcacgaaaaaaactctacctctctatactaatctccctacaaatctccttaattataacattcacagccacagaactaatcatattttatatcttcttcgaaaccacacttatccccaccttggctatcatcacccgatgaggcaaccagccagaacgcctgaacgcaggcacatacttcctattctacaccctagtaggctcccttcccctactcatcgcactgatttacactcacaacaccctaggctcactaaacattctactactcactctcactgcccaagaactatcaaactcctgagccaacaacttaatatgactagcttacacaatagcttttatagtaaagatacctctttacggactccacttatgactccctaaagcccatgtcgaagcccccatcgctgggtcaatagtacttgccgcagtactcttaaaactaggcggctatggtataatacgcctcacactcattctcaaccccctgacaaaacacatagcctaccccttccttgtactatccctatgaggcataattataacaagctccatctgcctacgacaaacagacctaaaatcgctcattgcatactcttcaatcagccacatagccctcgtagtaacagccattctcatccaaaccccctgaagcttcaccggcgcagtcattctcataatcgcccacggacttacatcctcattactattctgcctagcaaactcaaactacgaacgcactcacagtcgcatcataatcctctctcaaggacttcaaactctgctcccactaatagctttttgatgacttctagcaagcctcgctaacctcgccttaccccccactattaacctactgggagaactctctgtgctagtaaccacgttctcctgatcaaatatcactctcctacttacaggactcaacatactagtcacagccctatactccctctacatatttaccacaacacaatggggctcactcacccaccacattaacaacataaaaccctcattcacacgagaaaacaccctcatgttcatacacctatcccccattctcctcctatccctcaaccccgacatcattaccgggttttcctcttgtaaatatagtttaaccaaaacatcagattgtgaatctgacaacagaggcttacgaccccttatttaccgagaaagctcacaagaactgctaactcatgcccccatgtctaacaacatggctttctcaacttttaaaggataacagctatccattggtcttaggccccaaaaattttggtgcaactccaaataaaagtaataaccatgcacactactataaccaccctaaccctgacttccctaattccccccatccttaccaccctcgttaaccctaacaaaaaaaactcatacccccattatgtaaaatccattgtcgcatccacctttattatcagtctcttccccacaacaatattcatgtgcctagaccaagaagttattatctcgaactgacactgagccacaacccaaacaacccagctctccctaagcttcaaactagactacttctccataatattcatccctgtagcattgttcgttacatggtccatcatagaattctcactgtgatatataaactcagacccaaacattaatcagttcttcaaatatctactcatcttcctaattaccatactaatcttagttaccgctaacaacctattccaactgttcatcggctgagagggcgtaggaattatatccttcttgctcatcagttgatgatacgcccgagcagatgccaacacagcagccattcaagcaatcctatacaaccgtatcggcgatatcggtttcatcctcgccttagcatgatttatcctacactccaactcatgagacccacaacaaatagcccttctaaacgctaatccaagcctcaccccactactaggcctcctcctagcagcagcaggcaaatcagcccaattaggtctccacccctgactcccctcagccatagaaggccccaccccagtctcagccctactccactcaagcactatagttgtagcaggaatcttcttactcatccgcttccaccccctagcagaaaatagcccactaatccaaactctaacactatgcttaggcgctatcaccactctgttcgcagcagtctgcgcccttacacaaaatgacatcaaaaaaatcgtagccttctccacttcaagtcaactaggactcataatagttacaatcggcatcaaccaaccacacctagcattcctgcacatctgtacccacgccttcttcaaagccatactatttatgtgctccggatccatcatccacaaccttaacaatgaacaagatattcgaaaaataggaggactactcaaaaccatacctctcacttcaacctccctcaccattggcagcctagcattagcaggaatacctttcctcacaggtttctactccaaagaccacatcatcgaaaccgcaaacatatcatacacaaacgcctgagccctatctattactctcatcgctacctccctgacaagcgcctatagcactcgaataattcttctcaccctaacaggtcaacctcgcttccccacccttactaacattaacgaaaataaccccaccctactaaaccccattaaacgcctggcagccggaagcctattcgcaggatttctcattactaacaacatttcccccgcatcccccttccaaacaacaatccccctctacctaaaactcacagccctcgctgtcactttcctaggacttctaacagccctagacctcaactacctaaccaacaaacttaaaataaaatccccactatgcacattttatttctccaacatactcggattctaccctagcatcacacaccgcacaatcccctatctaggccttcttacgagccaaaacctgcccctactcctcctagacctaacctgactagaaaagctattacctaaaacaatttcacagcaccaaatctccacctccatcatcacctcaacccaaaaaggcataattaaactttacttcctctctttcttcttcccactcatcctaaccctactcctaatcacataacctattcccccgagcaatctcaattacaatatatacaccaacaaacaatgttcaaccagtaactactactaatcaacgcccatagtcatacaaagcccccgcaccaataggatcctcccgaatcaaccctgacccctctccttcataaattattcagcttcctacactattaaagtttaccacaaccaccaccccatcatactctttcacccacagcaccaatcctacctccatcgctaaccccactaaaacactcaccaagacctcaacccctgacccccatgcctcaggatactcctcaatagccatcgctgtagtatatccaaagacaaccatcattccccctaaataaattaaaaaaactattaaacccatataacctcccccaaaattcagaataataacacacccgaccacaccgctaacaatcaatactaaacccccataaataggagaaggcttagaagaaaaccccacaaaccccattactaaacccacactcaacagaaacaaagcatacatcattattctcgcacggactacaaccacgaccaatgatatgaaaaaccatcgttgtatttcaactacaagaacaccaatgaccccaatacgcaaaattaaccccctaataaaattaattaaccactcattcatcgacctccccaccccatccaacatctccgcatgatgaaacttcggctcactccttggcgcctgcctgatcctccaaatcaccacaggactattcctagccatacactactcaccagacgcctcaaccgccttttcatcaatcgcccacatcactcgagacgtaaattatggctgaatcatccgctaccttcacgccaatggcgcctcaatattctttatctgcctcttcctacacatcgggcgaggcctatattacggatcatttctctactcagaaacctgaaacatcggcattatcctcctgcttgcaactatagcaacagccttcataggctatgtcctcccgtgaggccaaatatcattctgaggggccacagtaattacaaacttactatccgccatcccatacattgggacagacctagttcaatgaatctgaggaggctactcagtagacagtcccaccctcacacgattctttacctttcacttcatcttgcccttcattattgcagccctagcagcactccacctcctattcttgcacgaaacgggatcaaacaaccccctaggaatcacctcccattccgataaaatcaccttccacccttactacacaatcaaagacgccctcggcttacttctcttcattctctccttaatgacattaacactattctcaccagacctcctaggcgacccagacaattataccctagccaaccccttaaacacccctccccacatcaagcccgaatgatatttcctattcgcctacacaattctccgatccgtccctaacaagctaggaggcgtccttgccctattactatccatcctcatcctagcaataatccccatcctccatatatccaaacaacaaagcataatatttcgcccactaagccaatcactttattgactcctagccgcagacctcctcattctaacctgaatcggaggacaaccagtaagctacccttttaccatcattggacaagtagcatccgtactatacttcacaacaatcctaatcctaataccaactatctccctaattgaaaacaaaatactcaaatgggcctgtccttgtagtataaactaatacaccagtcttgtaaaccgaagatgaaaacctttttccaaggacaaatcagagaaaaagtctttaactccaccattagcacccaaagctaagattctaatttaaactattctctgttctttcatggggaagcagatttgggtaccacccaagtattgactcacccatcaacaaccgctatgtatttcgtacattactgccagccaccatgaatattgcacggtaccataaatacttgaccacctgtagtacataaaaacccaatccacatcaaaaccccctccccatgcttacaagcaagtacagcaatcaaccctcaactatcacacatcaactgcaactccaaagccacccctcacccactaggataccaacaaacctacccatctttaacagcacatagtacataaagccatttaccgtacatagcacattacagtcaaatcccttctcgtccccatggatgacccccctcagataggggtcccttgaccaccatcctccgtgaaatcaatatcccgcacaagagtgctactctcctcgctccgggcccataacacttgggggtagctaaagtgaactgtatccgacatctggttcctacttcagggccatagagcctaaatagcccacacgttccccttaaataagacatcacgatg

SEQ ID NO: 308 - DNA, 16570 bp, Homo sapiens mitochondrial
  3108: "n" refers to a nucleotide at position 3107 of the Cambridge Reference Sequence (CRS, Anderson et al. 1981 Nature 290:457-465), later determined to be absent from the human mtDNA sequence according to the revised CRS (rCRS, Andrews et al. 1999 Nature Genetics 23:147); "n" therefore represents a single nucleotide deletion at a position corresponding to nucleotide 3107 of SEQ ID NO:1 as provided herein.
gatcacaggtctatcaccctattaaccactcacgggagctctccatgcatttggtattttcgtctggggggtatgcacgcgatagcattgcgagacgctggagccggagcaccctatgtcgcagtatctgtctttgattcctgcctcatcctattatttatcgcacctacgttcaatattacaggcgaacatacttactaaagtgtgttaattaattaatgcttgtaggacataataataacaattgaatgtctgcacagccgctttccacacagacatcataacaaaaaatttccaccaaaccccccctcccccgccttctggccacagcacttaaacacatctctgccaaaccccaaaaacaaagaaccctaacaccagcctaaccagatttcaaattttatcttttggcggtatgcacttttaacagtcaccccccaactaacacattattttcccctcccactcccatactactaatctcatcaatacaacccccgcccatcctacccagcacacacacaccgctgctaaccccataccccgaaccaaccaaaccccaaagacaccccccacagtttatgtagcttacctcctcaaagcaatacactgaaaatgtttagacgggctcacatcaccccataaacaaataggtttggtcctagcctttctattagctcttagtaagattacacatgcaagcatccccgttccagtgagttcaccctctaaatcaccacgatcaaaagggacaagcatcaagcacgcagcaatgcagctcaaaacgcttagcctagccacacccccacgggaaacagcagtgattaacctttagcaataaacgaaagtttaactaagctatactaaccccagggttggtcaatttcgtgccagccaccgcggtcacacgattaacccaagtcaatagaagccggcgtaaagagtgttttagatcaccccctccccaataaagctaaaactcacctgagttgtaaaaaactccagttgacacaaaatagactacgaaagtggctttaacatatctgaacacacaatagctaagacccaaactgggattagataccccactatgcttagccctaaacctcaacagttaaatcaacaaaactgctcgccagaacactacgagccacagcttaaaactcaaaggacctggcggtgcttcatatccctctagaggagcctgttctgtaatcgataaaccccgatcaacctcaccacctcttgctcagcctatataccgccatcttcagcaaaccctgatgaaggctacaaagtaagcgcaagtacccacgtaaagacgttaggtcaaggtgtagcccatgaggtggcaagaaatgggctacattttctaccccagaaaactacgatagcccttatgaaacttaagggtcgaaggtggatttagcagtaaactgagagtagagtgcttagttgaacagggccctgaagcgcgtacacaccgcccgtcaccctcctcaagtatacttcaaaggacatttaactaaaacccctacgcatttatatagaggagacaagtcgtaacatggtaagtgtactggaaagtgcacttggacgaaccagagtgtagcttaacacaaagcacccaacttacacttaggagatttcaacttaacttgaccgctctgagctaaacctagccccaaacccactccaccttactaccagacaaccttagccaaaccatttacccaaataaagtataggcgatagaaattgaaacctggcgcaatagatatagtaccgcaagggaaagatgaaaaattataaccaagcataatatagcaaggactaacccctataccttctgcataatgaattaactagaaataactttgcaaggagagccaaagctaagacccccgaaaccagacgagctacctaagaacagctaaaagagcacacccgtctatgtagcaaaatagtgggaagatttataggtagaggcgacaaacctaccgagcctggtgatagctggttgtccaagatagaatcttagttcaactttaaatttgcccacagaaccctctaaatccccttgtaaatttaactgttagtccaaagaggaacagctctttggacactaggaaaaaaccttgtagagagagtaaaaaatttaacacccatagtaggcctaaaagcagccaccaattaagaaagcgttcaagctcaacacccactacctaaaaaatcccaaacatataactgaactcctcacacccaattggaccaatctatcaccctatagaagaactaatgttagtataagtaacatgaaaacattctcctccgcataagcctgcgtcagattaaaacactgaactgacaattaacagcccaatatctacaatcaaccaacaagtcattattaccctcactgtcaacccaacacaggcatgctcataaggaaaggttaaaaaaagtaaaaggaactcggcaaatcttaccccgcctgtttaccaaaaacatcacctctagcatcaccagtattagaggcaccgcctgcccagtgacacatgtttaacggccgcggtaccctaaccgtgcaaaggtagcataatcacttgttccttaaatagggacctgtatgaatggctccacgagggttcagctgtctcttacttttaaccagtgaaattgacctgcccgtgaagaggcgggcataacacagcaagacgagaagaccctatggagctttaatttattaatgcaaacagtacctaacaaacccacaggtcctaaactaccaaacctgcattaaaaatttcggttggggcgacctcggagcagaacccaacctccgagcagtacatgctaagacttcaccagtcaaagcgaactactatactcaattgatccaataacttgaccaacggaacaagttaccctagggataacagcgcaatcctattctagagtccatatcaacaatagggtttacgacctcgatgttggatcaggacatcccgatggtgcagccgctattaaaggttcgtttgttcaacgattaaagtcctacgtgatctgagttcagaccggagtaatccaggtcggtttctatctacnttcaaattcctccctgtacgaaaggacaagagaaataaggcctacttcacaaagcgccttcccccgtaaatgatatcatctcaacttagtattatacccacacccacccaagaacagggtttgttaagatggcagagcccggtaatcgcataaaacttaaaactttacagtcagaggttcaattcctcttcttaacaacatacccatggccaacctcctactcctcattgtacccattctaatcgcaatggcattcctaatgcttaccgaacgaaaaattctaggctatatacaactacgcaaaggccccaacgttgtaggcccctacgggctactacaacccttcgctgacgccataaaactcttcaccaaagagcccctaaaacccgccacatctaccatcaccctctacatcaccgccccgaccttagctctcaccatcgctcttctactatgaacccccctccccatacccaaccccctggtcaacctcaacctaggcctcctatttattctagccacctctagcctagccgtttactcaatcctctgatcagggtgagcatcaaactcaaactacgccctgatcggcgcactgcgagcagtagcccaaacaatctcatatgaagtcaccctagccatcattctactatcaacattactaataagtggctcctttaacctctccacccttatcacaacacaagaacacctctgattactcctgccatcatgacccttggccataatatgatttatctccacactagcagagaccaaccgaacccccttcgaccttgccgaaggggagtccgaactagtctcaggcttcaacatcgaatacgccgcaggccccttcgccctattcttcatagccgaatacacaaacattattataataaacaccctcaccactacaatcttcctaggaacaacatatgacgcactctcccctgaactctacacaacatattttgtcaccaagaccctacttctaacctccctgttcttatgaattcgaacagcatacccccgattccgctacgaccaactcatacacctcctatgaaaaaacttcctaccactcaccctagcattacttatatgatatgtctccatacccattacaatctccagcattccccctcaaacctaagaaatatgtctgataaaagagttactttgatagagtaaataataggagcttaaacccccttatttctaggactatgagaatcgaacccatccctgagaatccaaaattctccgtgccacctatcacaccccatcctaaagtaaggtcagctaaataagctatcgggcccataccccgaaaatgttggttatacccttcccgtactaattaatcccctggcccaacccgtcatctactctaccatctttgcaggcacactcatcacagcgctaagctcgcactgattttttacctgagtaggcctagaaataaacatgctagcttttattccagttctaaccaaaaaaataaaccctcgttccacagaagctgccatcaagtatttcctcacgcaagcaaccgcatccataatccttctaatagctatcctcttcaacaatatactctccggacaatgaaccataaccaatactaccaatcaatactcatcattaataatcataatggctatagcaataaaactaggaatagccccctttcacttctgagtcccagaggttacccaaggcacccctctgacatccggcctgcttcttctcacatgacaaaaactagcccccatctcaatcatataccaaatctctccctcactaaacgtaagccttctcctcactctctcaatcttatccatcatagcaggcagttgaggtggattaaaccaaacccagctacgcaaaatcttagcatactcctcaattacccacataggatgaataatagcagttctaccgtacaaccctaacataaccattcttaatttaactatttatattatcctaactactaccgcattcctactactcaacttaaactccagcaccacgaccctactactatctcgcacctgaaacaagctaacatgactaacacccttaattccatccaccctcctctccctaggaggcctgcccccgctaaccggctttttgcccaaatgggccattatcgaagaattcacaaaaaacaatagcctcatcatccccaccatcatagccaccatcaccctccttaacctctacttctacctacgcctaatctactccacctcaatcacactactccccatatctaacaacgtaaaaataaaatgacagtttgaacatacaaaacccaccccattcctccccacactcatcgcccttaccacgctactcctacctatctccccttttatactaataatcttatagaaatttaggttaaatacagaccaagagccttcaaagccctcagtaagttgcaatacttaatttctgtaacagctaaggactgcaaaaccccactctgcatcaactgaacgcaaatcagccactttaattaagctaagcccttactagaccaatgggacttaaacccacaaacacttagttaacagctaagcaccctaatcaactggcttcaatctacttctcccgccgccgggaaaaaaggcgggagaagccccggcaggtttgaagctgcttcttcgaatttgcaattcaatatgaaaatcacctcggagctggtaaaaagaggcctaacccctgtctttagatttacagtccaatgcttcactcagccattttacctcacccccactgatgttcgccgaccgttgactattctctacaaaccacaaagacattggaacactatacctattattcggcgcatgagctggagtcctaggcacagctctaagcctccttattcgagccgagctgggccagccaggcaaccttctaggtaacgaccacatctacaacgttatcgtcacagcccatgcatttgtaataatcttcttcatagtaatacccatcataatcggaggctttggcaactgactagttcccctaataatcggtgcccccgatatggcgtttccccgcataaacaacataagcttctgactcttacctccctctctcctactcctgctcgcatctgctatagtggaggccggagcaggaacaggttgaacagtctaccctcccttagcagggaactactcccaccctggagcctccgtagacctaaccatcttctccttacacctagcaggtgtctcctctatcttaggggccatcaatttcatcacaacaattatcaatataaaaccccctgccataacccaataccaaacgcccctcttcgtctgatccgtcctaatcacagcagtcctacttctcctatctctcccagtcctagctgctggcatcactatactactaacagaccgcaacctcaacaccaccttcttcgaccccgccggaggaggagaccccattctataccaacacctattctgatttttcggtcaccctgaagtttatattcttatcctaccaggcttcggaataatctcccatattgtaacttactactccggaaaaaaagaaccatttggatacataggtatggtctgagctatgatatcaattggcttcctagggtttatcgtgtgagcacaccatatatttacagtaggaatagacgtagacacacgagcatatttcacctccgctaccataatcatcgctatccccaccggcgtcaaagtatttagctgactcgccacactccacggaagcaatatgaaatgatctgctgcagtgctctgagccctaggattcatctttcttttcaccgtaggtggcctgactggcattgtattagcaaactcatcactagacatcgtactacacgacacgtactacgttgtagcccacttccactatgtcctatcaataggagctgtatttgccatcataggaggcttcattcactgatttcccctattctcaggctacaccctagaccaaacctacgccaaaatccatttcactatcatattcatcggcgtaaatctaactttcttcccacaacactttctcggcctatccggaatgccccgacgttactcggactaccccgatgcatacaccacatgaaacatcctatcatctgtaggctcattcatttctctaacagcagtaatattaataattttcatgatttgagaagccttcgcttcgaagcgaaaagtcctaatagtagaagaaccctccataaacctggagtgactatatggatgccccccaccctaccacacattcgaagaacccgtatacataaaatctagacaaaaaaggaaggaatcgaaccccccaaagctggtttcaagccaaccccatggcctccatgactttttcaaaaaggtattagaaaaaccatttcataactttgtcaaagttaaattataggctaaatcctatatatcttaatggcacatgcagcgcaagtaggtctacaagacgctacttcccctatcatagaagagcttatcacctttcatgatcacgccctcataatcattttccttatctgcttcctagtcctgtatgcccttttcctaacactcacaacaaaactaactaatactaacatctcagacgctcaggaaatagaaaccgtctgaactatcctgcccgccatcatcctagtcctcatcgccctcccatccctacgcatcctttacataacagacgaggtcaacgatccctcccttaccatcaaatcaattggccaccaatggtactgaacctacgagtacaccgactacggcggactaatcttcaactcctacatacttcccccattattcctagaaccaggcgacctgcgactccttgacgttgacaatcgagtagtactcccgattgaagcccccattcgtataataattacatcacaagacgtcttgcactcatgagctgtccccacattaggcttaaaaacagatgcaattcccggacgtctaaaccaaaccactttcaccgctacacgaccgggggtatactacggtcaatgctctgaaatctgtggagcaaaccacagtttcatgcccatcgtcctagaattaattcccctaaaaatctttgaaatagggcccgtatttaccctatagcaccccctctaccccctctagagcccactgtaaagctaacttagcattaaccttttaagttaaagattaagagaaccaacacctctttacagtgaaatgccccaactaaatactaccgtatggcccaccataattacccccatactccttacactattcctcatcacccaactaaaaatattaaacacaaactaccacctacctccctcaccaaagcccataaaaataaaaaattataacaaaccctgagaaccaaaatgaacgaaaatctgttcgcttcattcattgcccccacaatcctaggcctacccgccgcagtactgatcattctatttccccctctattgatccccacctccaaatatctcatcaacaaccgactaatcaccacccaacaatgactaatcaaactaacctcaaaacaaatgataaccatacacaacactaaaggacgaacctgatctcttatactagtatccttaatcatttttattgccacaactaacctcctcggactcctgcctcactcatttacaccaaccacccaactatctataaacctagccatggccatccccttatgagcgggcgcagtgattataggctttcgctctaagattaaaaatgccctagcccacttcttaccacaaggcacacctacaccccttatccccatactagttattatcgaaaccatcagcctactcattcaaccaatagccctggccgtacgcctaaccgctaacattactgcaggccacctactcatgcacctaattggaagcgccaccctagcaatatcaaccattaaccttccctctacacttatcatcttcacaattctaattctactgactatcctagaaatcgctgtcgccttaatccaagcctacgttttcacacttctagtaagcctctacctgcacgacaacacataatgacccaccaatcacatgcctatcatatagtaaaacccagcccatgacccctaacaggggccctctcagccctcctaatgacctccggcctagccatgtgatttcacttccactccataacgctcctcatactaggcctactaaccaacacactaaccatataccaatgatggcgcgatgtaacacgagaaagcacataccaaggccaccacacaccacctgtccaaaaaggccttcgatacgggataatcctatttattacctcagaagtttttttcttcgcaggatttttctgagccttttaccactccagcctagcccctaccccccaattaggagggcactggcccccaacaggcatcaccccgctaaatcccctagaagtcccactcctaaacacatccgtattactcgcatcaggagtatcaatcacctgagctcaccatagtctaatagaaaacaaccgaaaccaaataattcaagcactgcttattacaattttactgggtctctattttaccctcctacaagcctcagagtacttcgagtctcccttcaccatttccgacggcatctacggctcaacattttttgtagccacaggcttccacggacttcacgtcattattggctcaactttcctcactatctgcttcatccgccaactaatatttcactttacatccaaacatcactttggcttcgaagccgccgcctgatactggcattttgtagatgtggtttgactatttctgtatgtctccatctattgatgagggtcttactcttttagtataaatagtaccgttaacttccaattaactagttttgacaacattcaaaaaagagtaataaacttcgccttaattttaataatcaacaccctcctagccttactactaataattattacattttgactaccacaactcaacggctacatagaaaaatccaccccttacgagtgcggcttcgaccctatatcccccgcccgcgtccctttttccataaaattcttcttagtagctattaccttcttattatttgatctagaaattgccctccttttacccctaccatgagccctacaaacaactaacctgccactaatagttatgtcatccctcttattaatcatcatcctagccctaagtctggcctatgagtgactacaaaaaggattagactgaaccgaattggtatatagtttaaacaaaacgaatgatttcgactcattaaattatgataatcatatttaccaaatgcccctcatttacataaatattatactagcatttaccatctcacttctaggaatactagtatatcgctcacacctcatatcctccctactatgcctagaaggaataatactatcgctgttcattatagctactctcataaccctcaacacccactccctcttagccaatattgtgcctattgccatactagtctttgccgcctgcgaagcagcggtgggcctagccctactagtctcaatctccaacacatatggcctagactacgtacataacctaaacctactccaatgctaaaactaatcgtcccaacaattatattactaccactgacatgactttccaaaaaacacataatttgaatcaacacaaccacccacagcctaattattagcatcatccctctactattttttaaccaaatcaacaacaacctatttagctgttccccaaccttttcctccgaccccctaacaacccccctcctaatactaactacctgactcctacccctcacaatcatggcaagccaacgccacttatccagtgaaccactatcacgaaaaaaactctacctctctatactaatctccctacaaatctccttaattataacattcacagccacagaactaatcatattttatatcttcttcgaaaccacacttatccccaccttggctatcatcacccgatgaggcaaccagccagaacgcctgaacgcaggcacatacttcctattctacaccctagtaggctcccttcccctactcatcgcactaatttacactcacaacaccctaggctcactaaacattctactactcactctcactgcccaagaactatcaaactcctgagccaacaacttaatatgactagcttacacaatagcttttatagtaaagatacctctttacggactccacttatgactccctaaagcccatgtcgaagcccccatcgctgggtcaatagtacttgccgcagtactcttaaaactaggcggctatggtataatacgcctcacactcattctcaaccccctgacaaaacacatagcctaccccttccttgtactatccctatgaggcataattataacaagctccatctgcctacgacaaacagacctaaaatcgctcattgcatactcttcaatcagccacatagccctcgtagtaacagccattctcatccaaaccccctgaagcttcaccggcgcagtcattctcataatcgcccacgggcttacatcctcattactattctgcctagcaaactcaaactacgaacgcactcacagtcgcatcataatcctctctcaaggacttcaaactctactcccactaatagctttttgatgacttctagcaagcctcgctaacctcgccttaccccccactattaacctactgggagaactctctgtgctagtaaccacgttctcctgatcaaatatcactctcctacttacaggactcaacatactagtcacagccctatactccctctacatatttaccacaacacaatggggctcactcacccaccacattaacaacataaaaccctcattcacacgagaaaacaccctcatgttcatacacctatcccccattctcctcctatccctcaaccccgacatcattaccgggttttcctcttgtaaatatagtttaaccaaaacatcagattgtgaatctgacaacagaggcttacgaccccttatttaccgagaaagctcacaagaactgctaactcatgcccccatgtctaacaacatggctttctcaacttttaaaggataacagctatccattggtcttaggccccaaaaattttggtgcaactccaaataaaagtaataaccatgcacactactataaccaccctaaccctgacttccctaattccccccatccttaccaccctcgttaaccctaacaaaaaaaactcatacccccattatgtaaaatccattgtcgcatccacctttattatcagtctcttccccacaacaatattcatgtgcctagaccaagaagttattatctcgaactgacactgagccacaacccaaacaacccagctctccctaagcttcaaactagactacttctccataatattcatccctgtagcattgttcgttacatggtccatcatagaattctcactgtgatatataaactcagacccaaacattaatcagttcttcaaatatctactcatcttcctaattaccatactaatcttagttaccgctaacaacctattccaactgttcatcggctgagagggcgtaggaattatatccttcttgctcatcagttgatgatacgcccgagcagatgccaacacagcagccattcaagcaatcctatacaaccgtatcggcgatatcggtttcatcctcgccttagcatgatttatcctacactccaactcatgagacccacaacaaatagcccttctaaacgctaatccaagcctcaccccactactaggcctcctcctagcagcagcaggcaaatcagcccaattaggtctccacccctgactcccctcagccatagaaggccccaccccagtctcagccctactccactcaagcactatagttgtagcaggaatcttcttactcatccgcttccaccccctagcagaaaatagcccactaatccaaactctaacactatgcttaggcgctatcaccactctgttcgcagcagtctgcgcccttacacaaaatgacatcaaaaaaatcgtagccttctccacttcaagtcaactaggactcataatagttacaatcggcatcaaccaaccacacctagcattcctgcacatctgtacccacgccttcttcaaagccatactatttatgtgctccgggtccatcatccacaaccttaacaatgaacaagatattcgaaaaataggaggactactcaaaaccatacctctcacttcaacctccctcaccattggcagcctagcattagcaggaatacctttcctcacaggtttctactccaaagaccacatcatcgaaaccgcaaacatatcatacacaaacgcctgagccctatctattactctcatcgctacctccctgacaagcgcctatagcactcgaataattcttctcaccctaacaggtcaacctcgcttccccacccttactaacattaacgaaaataaccccaccctactaaaccccattaaacgcctggcagccggaagcctattcgcaggatttctcattactaacaacatttcccccgcatcccccttccaaacaacaatccccctctacctaaaactcacagccctcgctgtcactttcctaggacttctaacagccctagacctcaactacctaaccaacaaacttaaaataaaatccccactatgcacattttatttctccaacatactcggattctaccctagcatcacacaccgcacaatcccctatctaggccttcttacgagccaaaacctgcccctactcctcctagacctaacctgactagaaaagctattacctaaaacaatttcacagcaccaaatctccacctccatcatcacctcaacccaaaaaggcataattaaactttacttcctctctttcttcttcccactcatcctaaccctactcctaatcacataacctattcccccgagcaatctcaattacaatatatacaccaacaaacaatgttcaaccagtaactactactaatcaacgcccataatcatacaaagcccccgcaccaataggatcctcccgaatcaaccctgacccctctccttcataaattattcagcttcctacactattaaagtttaccacaaccaccaccccatcatactctttcacccacagcaccaatcctacctccatcgctaaccccactaaaacactcaccaagacctcaacccctgacccccatgcctcaggatactcctcaatagccatcgctgtagtatatccaaagacaaccatcattccccctaaataaattaaaaaaactattaaacccatataacctcccccaaaattcagaataataacacacccgaccacaccgctaacaatcaatactaaacccccataaataggagaaggcttagaagaaaaccccacaaaccccattactaaacccacactcaacagaaacaaagcatacatcattattctcgcacggactacaaccacgaccaatgatatgaaaaaccatcgttgtatttcaactacaagaacaccaatgaccccaatacgcaaaactaaccccctaataaaattaattaaccactcattcatcgacctccccaccccatccaacatctccgcatgatgaaacttcggctcactccttggcgcctgcctgatcctccaaatcaccacaggactattcctagccatgcactactcaccagacgcctcaaccgccttttcatcaatcgcccacatcactcgagacgtaaattatggctgaatcatccgctaccttcacgccaatggcgcctcaatattctttatctgcctcttcctacacatcgggcgaggcctatattacggatcatttctctactcagaaacctgaaacatcggcattatcctcctgcttgcaactatagcaacagccttcataggctatgtcctcccgtgaggccaaatatcattctgaggggccacagtaattacaaacttactatccgccatcccatacattgggacagacctagttcaatgaatctgaggaggctactcagtagacagtcccaccctcacacgattctttacctttcacttcatcttgcccttcattattgcagccctagcagcactccacctcctattcttgcacgaaacgggatcaaacaaccccctaggaatcacctcccattccgataaaatcaccttccacccttactacacaatcaaagacgccctcggcttacttctcttccttctctccttaatgacattaacactattctcaccagacctcctaggcgacccagacaattataccctagccaaccccttaaacacccctccccacatcaagcccgaatgatatttcctattcgcctacacaattctccgatccgtccctaacaaactaggaggcgtccttgccctattactatccatcctcatcctagcaataatccccatcctccatatatccaaacaacaaagcataatatttcgcccactaagccaatcactttattgactcctagccgcagacctcctcattctaacctgaatcggaggacaaccagtaagctacccttttaccatcattggacaagtagcatccgtactatacttcacaacaatcctaatcctaataccaactatctccctaattgaaaacaaaatactcaaatgggcctgtccttgtagtataaactaatacaccagtcttgtaaaccggagatgaaaacctttttccaaggacaaatcagagaaaaagtctttaactccaccattagcacccaaagctaagattctaatttaaactattctctgttctttcatggggaagcagatttgggtaccacccaagtattgactcacccatcaacaaccgctatgtatttcgtacattactgccagccaccatgaatattgtacggtaccataaatacttgaccacctgtagtacataaaaacccaatccacatcaaaaccccctccccatgcttacaagcaagtacagcaatcaaccctcaactatcacacatcaactgcaactccaaagccacccctcacccactaggataccaacaaacctacccacccttaacagtacatagtacataaggccatttaccgtacatagcacattacagtcaaatcccttctcgtccccatggatgacccccctcagataggggtcccttgaccaccatcctccgtgaaatcaatatcccgcacaagagtgctactctcctcgctccgggcccataacacttgggggtagctaaagtgaactgtatccgacatctggttcctacttcagggccataaagcctaaatagcccacacgttccccttaaataagacatcacgatg

SEQ ID NO: 309 - DNA, 16570 bp, Homo sapiens mitochondrial
  3108: "n" refers to a nucleotide at position 3107 of the Cambridge Reference Sequence (CRS, Anderson et al. 1981 Nature 290:457-465), later determined to be absent from the human mtDNA sequence according to the revised CRS (rCRS, Andrews et al. 1999 Nature Genetics 23:147); "n" therefore represents a single nucleotide deletion at a position corresponding to nucleotide 3107 of SEQ ID NO:1 as provided herein.
gatcacaggtctatcaccctattaaccactcacgggagctctccatgcatttggtattttcgtctggggggtgtgcacgcgatagcattgcgagacgctggagccggagcaccctatgtcgcagtatctgtctttgattcctgcctcatcctgttatttatcgcacctacgttcaatattacaggcgaacatacctactgaagtgtgttaattaattaatgcttatgggacataataataacaattgaatgtctgcacagccgctttccacacagacatcataacaaaaaatttccaccaaaccccccctcccccgccttctggccacagcacttaaacacatctctgccaaaccccaaaaacaaagaaccctaacaccagcctaaccagatttcaaattttatcttttggcggtatgcacttttaacagtcaccccccaactaacacattattttcccctcccactcccatactactaatctcatcaatacaacccccgcccatcctacccagcacacacacaccgctgctaaccccataccccgaaccaaccaaaccccaaagacaccccccacagtttatgtagcttacctcctcaaagcaatacactgaaaatgtttagacgggctcacatcaccccataaacaaataggtttggtcctagcctttctattagctcttagtaagattacacatgcaagcatccccgttccagtgagttcaccctctaaatcaccacgatcaaaagggacaagcatcaagcacgcagcaatgcagctcaaaacgcttagcctagccacacccccacgggaaacagcagtgattaacctttagcaataaacgaaagtttaactaagctatactaaccccagggttggtcaatttcgtgccagccaccgcggtcacacgattaacccaagtcaatagaagccggcgtaaagagtgttttagatcaccccctccccaataaagctaaaactcacctgagttgtaaaaaactccagttgacacaaaatagactacgaaagtggctttaacatatctgaacacacaatagctaagacccaaactgggattagataccccactatgcttagccctaaacctcaacagttaaatcaacaaaactgctcgccagaacactacgagccacagcttaaaactcaaaggacctggcggtgcttcatatccctctagaggagcctgttctgtaatcgataaaccccgatcaacctcaccacctcttgctcagcctatataccgccatcttcagcaaaccctgatgaaggctacaaagtaagcgcaagtacccacgtaaagacgttaggtcaaggtgtagcccatgaggtggcaagaaatgggctacattttctaccccagaaaactacgatagcccttatgaaacttaagggtcgaaggtggatttagcagtaaactgagagtagagtgcttagttgaacagggccctgaagcgcgtacacaccgcccgtcaccctcctcaagtatacttcaaaggacatttaactaaaacccctacgcatttatatagaggagacaagtcgtaacatggtaagtgtactggaaagtgcacttggacgaaccagagtgtagcttaacacaaagcacccaacttacacttaggagatttcaacttaacttgaccgctctgagctaaacctagccccaaacccactccaccttactaccagacaaccttaaccaaaccatttacccaaataaagtataggcgatagaaattgaaacctggcgcaatagatatagtaccgcaagggaaagatgaaaaattataaccaagcataatatagcaaggactaacccctataccttctgcataatgaattaactagaaataactttgcaaggagagccaaagctaagacccccgaaaccagacgagctacctaagaacagctaaaagagcacacccgtctatgtagcaaaatagtgggaagatttataggtagaggcgacaaacctaccgagcctggtgatagctggttgtccaagatagaatcttagttcaactttaaatttgcccacagaaccctctaaatccccttgtaaatttaactgttagtccaaagaggaacagctctttggacactaggaaaaaaccttgtagagagagtaaaaaatttaacacccatagtaggcctaaaagcagccaccaattaagaaagcgttcaagctcaacacccactacctaaaaaatcccaaacatataactgaactcctcacacccaattggaccaatctatcaccctatagaagaactaatgttagtataagtaacatgaaaacattctcctccgcataagcctgcgtcagattaaaacactgaactgacaattaacagcccaatatctacaatcaaccaacaagtcattattaccctcactgtcaacccaacacaggcatgctcataaggaaaggttaaaaaaagtaaaaggaactcggcaaatcttaccccgcctgtttaccaaaaacatcacctctagcatcaccagtattagaggcaccgcctgcccagtgacacatgtttaacggccgcggtaccctaaccgtgcaaaggtagcataatcacttgttccttaaatagggacctgtatgaatggctccacgagggttcagctgtctcttacttttaaccagtgaaattgacctgcccgtgaagaggcgggcatgacacagcaagacgagaagaccctatggagctttaatttattaatgcaaacagtacctaacaaacccacaggtcctaaactaccaaacctgcattaaaaatttcggttggggcgacctcggagcagaacccaacctccgagcagtacatgctaagacttcaccagtcaaagcgaactactatactcaattgatccaataacttgaccaacggaacaagttaccctagggataacagcgcaatcctattctagagtccatatcaacaatagggtttacgacctcgatgttggatcaggacatcccgatggtgcagccgctattaaaggttcgtttgttcaacgattaaagtcctacgtgatctgagttcagaccggagtaatccaggtcggtttctatctacnttcaaattcctccctgtacgaaaggacaagagaaataaggcctacttcacaaagcgccttcccccgtaaatgatatcatctcaacttagtattatacccacacccacccaagaacagggtttgttaagatggcagagcccggtaatcgcataaaacttaaaactttacagtcagaggttcaattcctcttcttaacaacatacccatggccaacctcctactcctcattgtacccattctaatcgcaatggcattcctaatgcttaccgaacgaaaaattctaggctatatacaactacgcaaaggccccaacgttgtaggcccctacgggctactacaacccttcgctgacgccataaaactcttcaccaaagagcccctaaaacccgccacatctaccatcaccctctacatcaccgccccgaccttagctctcaccatcgctcttctactatgaacccccctccccatacccaaccccctggtcaacctcaacctaggcctcctatttattctagccacctctagcctagccgtttactcaatcctctgatcagggtgagcatcaaactcaaactacgccctgatcggcgcactgcgagcagtagcccaaacaatctcatatgaagtcaccctagccatcattctactatcaacattactaataagtggctcctttaacctctccacccttatcacaacacaagaacacctctgattactcctgccatcatgacccttggccataatatgatttatctccacactagcagagaccaaccgaacccccttcgaccttgccgaaggggagtccgaactagtctcaggcttcaacatcgaatacgccgcaggccccttcgccctattcttcatagccgaatacacaaacattattataataaacaccctcaccactacaatcttcctaggaacaacatatgacgcactctcccctgaactctacacaacatattttgtcaccaagaccctacttctaacctccctgttcttatgaattcgaacagcatacccccgattccgctacgaccaactcatacacctcctatgaaaaaacttcctaccactcaccctagcattacttatatgatatgtctccatacccattacaatctccagcattccccctcaaacctaagaaatatgtctgataaaagagttactttgatagagtaaataataggagcttaaacccccttatttctaggactatgagaatcgaacccatccctgagaatccaaaattctccgtgccacctatcacaccccatcctaaagtaaggtcagctaaataagctatcgggcccataccccgaaaatgttggttatacccttcccgtactaattaatcccctggcccaacccgtcatctactctaccatctttgcaggcacactcatcacagcgctaagctcgcactgattttttacctgagtaggcctagaaataaacatgctagcttttattccagttctaaccaaaaaaataaaccctcgttccacagaagctgccatcaagtatttcctcacgcaagcaaccgcatccataatccttctaatagctatcctcttcaacaatatactctccggacaatgaaccataaccaatactaccaatcaatactcatcattaataatcataatggctatagcaataaaactaggaatagccccctttcacttctgagtcccagaggttacccaaggcacccctctgacatccggcctgcttcttctcacatgacaaaaactagcccccatctcaatcatataccaaatctctccctcactaaacgtaagccttctcctcactctctcaatcttatccatcatagcaggcagttgaggtggattaaaccaaacccagctacgcaaaatcttagcatactcctcaattacccacataggatgaataatagcagttctaccgtacaaccctaacataaccattcttaatttaactatttatattatcctaactactaccgcattcctactactcaacttaaactccagcaccacgaccctactactatctcgcacctgaaacaagctaacatgactaacacccttaattccatccaccctcctctccctaggaggcctgcccccgctaaccggctttttgcccaaatgggccattatcgaagaattcacaaaaaacaatagcctcatcatccccaccatcatagccaccatcaccctccttaacctctacttctacctacgcctaatctactccacctcaatcacactactccccatatctaacaacgtaaaaataaaatgacagtttgaacatacaaaacccaccccattcctccccacactcatcgcccttaccacgctactcctacctatctccccttttatactaataatcttatagaaatttaggttaaatacagaccaagagccttcaaagccctcagtaagttgcaatacttaatttctgtaacagctaaggactgcaaaaccccactctgcatcaactgaacgcaaatcagccactttaattaagctaagcccttactagaccaatgggacttaaacccacaaacacttagttaacagctaagcaccctaatcaactggcttcaatctacttctcccgccgccgggaaaaaaggcgggagaagccccggcaggtttgaagctgcttcttcgaatttgcaattcaatatgaaaatcacctcggagctggtaaaaagaggcctaacccctgtctttagatttacagtccaatgcttcactcagccattttacctcacccccactgatgttcgccgaccgttgactattctctacaaaccacaaagacattggaacactatacctattattcggcgcatgagctggagtcctaggcacagctctaagcctccttattcgagccgagctgggccagccaggcaaccttctaggtaacgaccacatctacaacgttatcgtcacagcccatgcatttgtaataatcttcttcatagtaatacccatcataatcggaggctttggcaactgactagttcccctaataatcggtgcccccgatatggcgtttccccgcataaacaacataagcttctgactcttacccccctctctcctactcctgctcgcatctgctatagtggaggccggagcaggaacaggttgaacagtctaccctcccttagcagggaactactcccaccctggagcctccgtagacctaaccatcttctccttacacctagcaggtgtctcttctatcttaggggccatcaatttcatcacaacaattatcaatataaaaccccctgccataacccaataccaaacgcccctcttcgtctgatccgtcctaatcacagcagtcctacttctcctatctctcccagtcctagctgctggcatcactatactactaacagaccgcaacctcaacaccaccttcttcgaccccgccggaggaggagaccccattctataccaacacctattctgatttttcggtcaccctgaagtttatattcttatcctaccaggcttcggaataatctcccatattgtaacttactactccggaaaaaaagaaccatttggatacataggtatggtctgagctatgatatcaattggcttcctagggtttatcgtgtgagcacaccatatatttacagtaggaatagacgtagacacacgagcatatttcacctccgctaccataatcatcgctatccccaccggcgtcaaagtatttagctgactcgccacactccacggaagcaatatgaaatgatctgctgcagtgctctgagccctaggattcatctttcttttcaccgtaggtggcctgactggcattgtattagcaaactcatcactagacatcgtactacacgacacgtactacgttgtagctcacttccactatgtcctatcaataggagctgtatttgccatcataggaggcttcattcactgatttcccctattctcaggctacaccctagaccaaacctacgccaaaatccatttcactatcatattcatcggcgtaaatctaactttcttcccacaacactttctcggcctatccggaatgccccgacgttactcggactaccccgatgcatacaccacatgaaacatcctatcatctgtaggctcattcatttctctaacagcagtaatattaataattttcatgatttgagaagccttcgcttcgaagcgaaaagtcctaatagtagaagaaccctccataaacctggagtgactatatggatgccccccaccctaccacacattcgaagaacccgtatacataaaatctagacaaaaaaggaaggaatcgaaccccccaaagctggtttcaagccaaccccatggcctccatgactttttcaaaaaggtattagaaaaaccatttcataactttgtcaaagttaaattataggctaaatcctatatatcttaatggcacatgcagcgcaagtaggtctacaagacgctacttcccctatcatagaagagcttatcacctttcatgatcacgccctcataatcattttccttatctgcttcctagtcctgtatgcccttttcctaacactcacaacaaaactaactaatactaacatctcagacgctcaggaaatagaaaccgtctgaactatcctgcccgccatcatcctagtcctcatcgccctcccatccctacgcatcctttacataacagacgaggtcaacgatccctcccttaccatcaaatcaattggccaccaatggtactgaacctacgagtacaccgactacggcggactaatcttcaactcctacatacttcccccattattcctagaaccaggcgacctgcgactccttgacgttgacaatcgagtagtactcccgattgaagcccccattcgtataataattacatcacaagacgtcttgcactcatgagctgtccccacattaggcttaaaaacagatgcaattcccggacgtctaaaccaaaccactttcaccgctacacgaccgggggtatactacggtcaatgctctgaaatctgtggagcaaaccacagtttcatgcccatcgtcctagaattaattcccctaaaaatctttgaaatagggcccgtatttaccctatagcaccccctctaccccctctagagcccactgtaaagctaacttagcattaaccttttaagttaaagattaagagaaccaacacctctttacagtgaaatgccccaactaaatactaccgtatggcccaccataattacccccatactccttacactattcctcatcacccaactaaaaatattaaacacaaactaccacctacctccctcaccaaagcccataaaaataaaaaattataacaaaccctgagaaccaaaatgaacgaaaatctgttcgcttcattcattgcccccacaatcctaggcctacccgccgcagtactgatcattctatttccccctctattgatccccacctccaaatatctcatcaacaaccgactaatcaccacccaacaatgactaatcaaactaacctcaaaacaaatgataaccacacacaacactaaaggacgaacctgatctcttatactagtatccttaatcatttttattgccacaactaacctcctcggactcctgcctcactcatttacaccaaccacccaactatctataaacctagccatggccatccccttatgagcgggcgcagtgattataggctttcgctctaagattaaaaatgccctagcccacttcttaccacaaggcacacctacaccccttatccccatactagttattatcgaaaccatcagcctactcattcaaccaatagccctggccgtacgcctaaccgctaacattactgcaggccacctactcatgcacctaattggaagcgccaccctagcaatatcaaccattaaccttccctctacacttatcatcttcacaattctaattctactgactatcctagaaatcgctgtcgccttaatccaagcctacgttttcacacttctagtaagcctctacctgcacgacaacacataatgacccaccaatcacatgcctatcatatagtaaaacccagcccatgacccctaacaggggccctctcagccctcctaatgacctccggcctagccatgtgatttcacttccactccataacgctcctcatactaggcctactaaccaacacactaaccatataccaatgatggcgcgatgtaacacgagaaagcacataccaaggccaccacacaccacctgtccaaaaaggccttcgatacgggataatcctatttattacctcagaagtttttttcttcgcaggatttttctgagccttttaccactccagcctagcccctaccccccaattaggagggcactggcccccaacaggcatcaccccgctaaatcccctagaagtcccactcctaaacacatccgtattactcgcatcaggagtatcaatcacctgagctcaccatagtctaatagaaaacaaccgaaaccaaataattcaagcactgcttattacaattttactgggtctctattttaccctcctacaagcctcagagtacttcgagtctcccttcaccatttccgacggcatctacggctcaacattttttgtagccacaggcttccacggacttcacgtcattattggctcaactttcctcactatctgcttcatccgccaactaatatttcactttacatccaaacatcactttggcttcgaagccgccgcctgatactggcattttgtagatgtggtttgactatttctgtatgtctccatctattgatgagggtcttactcttttagtataaatagtaccgttaacttccaattaactagttttgacaacattcaaaaaagagtaataaacttcgccttaattttaataatcaacaccctcctagccttactactaataattattacattttgactaccacaactcaacggctacatagaaaaatccaccccttacgagtgcggcttcgaccctatatcccccgcccgcgtccctttctccataaaattcttcttagtagctattaccttcttattatttgatctagaaattgccctccttttacccctaccatgagccctacaaacaactaacctgccactaatagttatgtcatccctcttattaatcatcatcctagccctaagtctggcctatgagtgactacaaaaaggattagactgaaccgaattggtatatagtttaaacaaaacgaatgatttcgactcattaaattatgataatcatatttaccaaatgcccctcatttacataaatattatactagcatttaccatctcacttctaggaatactagtatatcgctcacacctcatatcctccctactatgcctagaaggaataatactatcgctgttcattatagctactctcataaccctcaacacccactccctcttagccaatattgtgcctattgccatactagtctttgccgcctgcgaagcagcggtgggcctagccctactagtctcaatctccaacacatatggcctagactacgtacataacctaaacctactccaatgctaaaactaatcgtcccaacaattatattactaccactgacatgactttccaaaaaacacataatttgaatcaacacaaccacccacagcctaattattagcatcatccctctactattttttaaccaaatcaacaacaacctatttagctgttccccaaccttttcctccgaccccctaacaacccccctcctaatactaactacctgactcctacccctcacaatcatggcaagccaacgccacttatccagtgaaccactatcacgaaaaaaactctacctctctatactaatctccctacaaatctccttaattataacattcacagccacagaactaatcatattttatatcttcttcgaaaccacacttatccccaccttggctatcatcacccgatgaggcaaccagccagaacgcctgaacgcaggcacatacttcctattctacaccctagtaggctcccttcccctactcatcgcactaatttacactcacaacaccctaggctcactaaacattctactactcactctcactgcccaagaactatcaaactcctgagccaacaacttaatatgactagcttacacaatagcttttatagtaaagatacctctttacggactccacttatgactccctaaagcccatgtcgaagcccccatcgctgggtcaatagtacttgccgcagtactcttaaaactaggcggctatggtataatacgcctcacactcattctcaaccccctgacaaaacacatagcctaccccttccttgtactatccctatgaggcataattataacaagctccatctgcctacgacaaacagacctaaaatcgctcattgcatactcttcaatcagccacatagccctcgtagtaacagccattctcatccaaaccccctgaagcttcaccggcgcagtcattctcataatcgcccacggacttacatcctcattactattctgcctagcaaactcaaactacgaacgcactcacagtcgcatcataatcctctctcaaggacttcaaactctactcccactaatagctttttgatgacttctagcaagcctcgctaacctcgccttaccccccactattaacctactgggagaactctctgtgctagtaaccacgttctcctgatcaaatatcactctcctacttacaggactcaacatactagtcacagccctatactccctctacatatttaccacaacacaatggggctcactcacccaccacattaacaacataaaaccctcattcacacgagaaaacaccctcatgttcatacacctatcccccattctcctcctatccctcaaccccgacatcattaccgggttttcctcttgtaaatatagtttaaccaaaacatcagattgtgaatctgacaacagaggcttacgaccccttatttaccgagaaagctcacaagaactgctaactcatgcccccatgtctaacaacatggctttctcaacttttaaaggataacagctatccattggtcttaggccccaaaaattttggtgcaactccaaataaaagtaataaccatgcacactactataaccaccctaaccctgacttccctaattccccccatccttaccaccctcgttaaccctaacaaaaaaaactcatacccccattatgtaaaatccattgtcgcatccacctttattatcagtctcttccccacaacaatattcatgtgcctagaccaagaagttattatctcgaactgacactgagccacaacccaaacaacccagctctccctaagcttcaaactagactacttctccataatattcatccctgtagcattgttcgttacatggtccatcatagaattctcactgtgatatataaactcagacccaaacattaatcagttcttcaaatatctactcattttcctaattaccatactaatcttagttaccgctaacaacctattccaactgttcatcggctgagagggcgtaggaattatatccttcttgctcatcagttgatgatacgcccgagcagatgccaacacagcagccattcaagcaatcctatacaaccgtatcggcgatatcggtttcatcctcgccttagcatgatttatcctacactccaactcatgagacccacaacaaatagcccttctaaacgctaatccaagcctcaccccactactaggcctcctcctagcagcagcaggcaaatcagcccaattaggtctccacccctgactcccctcagccatagaaggccccaccccagtctcagccctactccactcaagcactatagttgtagcaggaatcttcttactcatccgcttccaccccctagcagaaaatagcccactaatccaaactctaacactatgcttaggcgctatcaccactctgttcgcagcagtctgcgcccttacacaaaatgacatcaaaaaaatcgtagccttctccacttcaagtcaactaggactcataatagttacaatcggcatcaaccaaccacacctagcattcctgcacatctgtacccacgccttcttcaaagccatactatttatgtgctccgggtccatcatccacaaccttaacaatgaacaagatattcgaaaaataggaggactactcaaaaccatacctctcacttcaacctccctcaccattggcagcctagcattagcaggaatacctttcctcacaggtttctactccaaagaccacatcatcgaaaccgcaaacatatcatacacaaacgcctgagccctatctattactctcatcgctacctccctgacaagcgcctatagcactcgaataattcttctcaccctaacaggtcaacctcgcttccccacccttactaacattaacgaaaataaccccaccctactaaaccccattaaacgcctggcagccggaagcctattcgcaggatttctcattactaacaacatttcccccgcatcccccttccaaacaacaatccccctctacctaaaactcacagccctcgctgtcactttcctaggacttctaacagccctagacctcaactacctaaccaacaaacttaaaataaaatccccactatgcacattttatttctccaacatactcggattctaccctagcatcacacaccgcacaatcccctatctaggccttcttgcgagccaaaacctgcccctactcctcctagacctaacctgactagaaaagctattacctaaaacaatttcacagcaccaaatctccacctccatcatcacctcaacccaaaaaggcataattaaactttacttcctctctttcttcttcccactcatcctaaccctactcctaatcacataacctattcccccgagcaatctcaattacaatatatacaccaacaaacaatgttcaaccagtaactactactaatcaacgcccataatcatacaaagcccccgcaccaataggatcctcccgaatcaaccctgacccctctccttcataaattattcagcttcctacactattaaagtttaccacaaccaccaccccatcatactctttcacccacagcaccaatcctacctccatcgctaaccccactaaaacactcaccaagacctcaacccctgacccccatgcctcaggatactcctcaatagccatcgctgtagtatacccaaagacaaccatcattccccctaaataaattaaaaaaactattaaacccatataacctcccccaaaattcagaataataacacacccgaccacaccgctaacaatcaatactaaacccccataaataggagaaggcttagaagaaaaccccacaaaccccattactaaacccacactcaacagaaacaaagcatacatcattattctcgcacggactacaaccacgaccaatgatatgaaaaaccatcgttgtatttcaactacaagaacaccaatgaccccaatacgcaaaattaaccccctaataaaattaattaaccactcattcatcgacctccccaccccatccaacatctccgcatgatgaaacttcggctcactccttggcgcctgcctgatcctccaaatcaccacaggactattcctagccatgcactactcaccagacgcctcaaccgccttttcatcaatcgcccacatcactcgagacgtaaattatggctgaatcatccgctaccttcacgccaatggcgcctcaatattctttatctgcctcttcctacacatcgggcgaggcctatattacggatcatttctctactcagaaacctgaaacatcggcattatcctcctgcttgcaactatagcaacagccttcataggctatgtcctcccgtgaggccaaatatcattctgaggggccacagtaattacaaacttactatccgccatcccatacattgggacagacctagttcaatgaatctgaggaggctactcagtagacagtcccaccctcacacgattctttacctttcacttcatcttgcccttcattattgcagccctagcagcactccacctcctattcttgcacgaaacgggatcaaacaaccccctaggaatcacctcccattccgataaaatcaccttccacccttactacacaatcaaagacgccctcggcttacttctcttccttctctccttaatgacattaacactattctcaccagacctcctaggcgacccagacaattataccctagccaaccccttaaacacccctccccacatcaagcccgaatgatatttcctattcgcctacacaattctccgatccgtccctaacaaactaggaggcgtccttgccctattactatccatcctcatcctagcaataatccccatcctccatatatccaaacaacaaagcataatatttcgcccactaagccaatcactttattgactcctagccgcagacctcctcattctaacctgaatcggaggacaaccagtaagctacccttttaccatcattggacaagtagcatccgtactatacttcacaacaatcctaatcctaataccaactatctccctaattgaaaacaaaatactcaaatgggcctgtccttgtagtataaactaatacaccagtcttgtaaaccggagatgaaaacctttttccaaggacaaatcagagaaaaagtctttaactccaccattagcacccaaagctaagattctaatttaaactattctctgttctttcatggggaagcagatttgggtaccacccaagtattgactcacccatcaacaaccgctatgtatttcgtacattactgccagccaccatgaatattgtacggtaccataaatacttgaccacctgtagtacataaaaacccaatccacatcaaacccccccccccatgcttacaagcaagcacagcaatcaaccttcaactatcacacatcaactgcaactccaaagccacccctcacccactaggatatcaacaaacctacccacccttaacagtacatagtacataaagccatttaccgtacatagcacattacagtcaaatcccttctcgtccccatggatgacccccctcagataggggtcccttgaccaccatcctccgtgaaatcaatatcccgcacaagagtgctactctcctcgctccgggcccataacacttgggggtagctaaagtgaactgtatccgacatctggttcctacttcagggccataaagcctaaatagcccacacgttccccttaaataagacatcacgatg

SEQ ID NO: 310 - DNA, 16569 bp, Homo sapiens mitochondrial
  3108: "n" refers to a nucleotide at position 3107 of the Cambridge Reference Sequence (CRS, Anderson et al. 1981 Nature 290:457-465), later determined to be absent from the human mtDNA sequence according to the revised CRS (rCRS, Andrews et al. 1999 Nature Genetics 23:147); "n" therefore represents a single nucleotide deletion at a position corresponding to nucleotide 3107 of SEQ ID NO:1 as provided herein.
gatcacaggtctatcaccctattaaccactcacgggagctctccatgcatttggtattttcgtctggggggtgtgcacgcgatagcattgcgagacgctggagccggagcaccctatgtcgcagtatctgtctttgattcctgcctcatcctattatttatcgcacctacgttcaatattacaggcgaacatacttactaaagtgtgttaattaattaatgcttgtaggacataataataacaattgaatgtctgcacagccgctttccacacagacatcataacaaaaaatttccaccaaaccccccctcccccgccttctggccacagcacttaaacacatctctgccaaaccccaaaaacaaagaaccctaacaccagcctaaccagatttcaaattttatcttttggcggtatgcacttttaacagtcaccccccaactaacacattattttcccctcccactcccatactactaatctcatcaatacaacccccgcccatcctacccagcacacacaccgctgctaaccccataccccgaaccaaccaaaccccaaagacaccccccacccagtttatgtagcttacctcctcaaagcaatacactgaaaatgtttagacgggctcacatcaccccataaacaaataggtttggtcctagcctttctattagctcttagtaagattacacatgcaagcatccccgttccagtgagttcaccctctaaatcaccacgatcaaaagggacaagcatcaagcacgcagcaatgcagctcaaaacgcttagcctagccacacccccacgggaaacagcagtgattaacctttagcaataaacgaaagtttaactaagctatactaaccccagggttggtcaatttcgtgccagccaccgcggtcacacgattaacccaagtcaatagaagccggcgtaaagagtgttttagatcaccccctccccaataaagctaaaactcacctgagttgtaaaaaactccagttgacacaaaatagactacgaaagtggctttaacatatctgaacacacaatagctaagacccaaactgggattagataccccactatgcttagccctaaacctcaacagttaaatcaacaaaactgctcgccagaacactacgagccacagcttaaaactcaaaggacctggcggtgcttcatatccctctagaggagcctgttctgtaatcgataaaccccgatcaacctcaccacctcttgctcagcctatataccgccatcttcagcaaaccctgatgaaggctacaaagtaagcgcaagtacccacgtaaagacgttaggtcaaggtgtagcccatgaggtggcaagaaatgggctacattttctaccccagaaaactacgatagcccttatgaaacttaagggtcgaaggtggatttagcagtaaactgagagtagagtgcttagttgaacagggccctgaagcgcgtacacaccgcccgtcaccctcctcaagtatacttcaaaggacatttaactaaaacccctacgcatttatatagaggagacaagtcgtaacatggtaagtgtactggaaagtgcacttggacgaaccagagtgtagcttaacacaaagcacccaacttacacttaggagatttcaacttaacttgaccgctctgagctaaacctagccccaaacccactccaccttactaccagacaaccttagccaaaccatttacccaaataaagtataggcgatagaaattgaaacctggcgcaatagatatagtaccgcaagggaaagatgaaaaattataaccaagcataatatagcaaggactaacccctataccttctgcataatgaattaactagaaataactttgcaaggagagccaaagctaagacccccgaaaccagacgagctacctaagaacagctaaaagagcacacccgtctatgtagcaaaatagtgggaagattcataggtagaggcgacaaacctaccgagcctggtgatagctggttgtccaagatagaatcttagttcaactttaaatttgcccacagaaccctctaaatccccttgtaaatttaactgttagtccaaagaggaacagctctttggacactaggaaaaaaccttgtagagagagtaaaaaatttaacacccatagtaggcctaaaagcagccaccaattaagaaagcgttcaagctcaacacccactacctaaaaaatcccaaacatataactgaactcctcacacccaattggaccaatctatcaccctatagaagaactaatgttagtataagtaacatgaaaacattctcctctgcataagcctgcgtcagattaaaacactgaactgacaattaacagcccaatatctacaatcaaccaacaagtcattattaccctcactgtcaacccaacacaggcatgctcataaggaaaggttaaaaaaagtaaaaggaactcggcaaatcttaccccgcctgtttaccaaaaacatcacctctagcatcaccagtattagaggcaccgcctgcccagtgacacatgtttaacggccgcggtaccctaaccgtgcaaaggtagcataatcacttgttccttaaatagggacctgtatgaatggctccacgagggttcagctgtctcttacttttaaccagtgaaattgacctgcccgtgaagaggcgggcatgacacagcaagacgagaagaccctatggagctttaatttattaatgcaaacagtacctaacaaacccacaggtcctaaactaccaaacctgcattaaaaatttcggttggggcgacctcggagcagaacccaacctccgagcagtacatgctaagacttcaccagtcaaagcgaactactatactcaattgatccaataacttgaccaacggaacaagttaccctagggataacagcgcaatcctattctagagtccatatcaacaatagggtttacgacctcgatgttggatcaggacatcccgatggtgcagccgctattaaaggttcgtttgttcaacgattaaagtcctacgtgatctgagttcagaccggagtaatccaggtcggtttctatctacnttcaaattcctccctgtacgaaaggacaagagaaataaggcctacttcacaaagcgccttcccccgtaaatgatatcatctcaacttagtattatacccacacccacccaagaacagggtttgttaagatggcagagcccggtaatcgcataaaacttaaaactttacagtcagaggttcaattcctcttcttaacaacatacccatggccaacctcctactcctcattgtacccattctaatcgcaatggcattcctaatgcttaccgaacgaaaaattctaggctatatacaactacgcaaaggccccaacgttgtaggcccctacgggctactacaacctttcgctgacgccataaaactcttcaccaaagagcccctaaaacccgccacatctaccatcaccctctacatcaccgccccgaccttagctctcaccatcgctcttctactatgaacccccctccccatacccaaccccctggtcaacctcaacctaggcctcctatttattctagccacctctagcctagccgtttactcaatcctctgatcagggtgagcatcaaactcaaactacgccctgatcggcgcactgcgagcagtagcccaaacaatctcatatgaagtcaccctagccatcattctactatcaacattactaataagtggctcctttaacctctccacccttatcacaacacaagaacacctctgattactcctgccatcatgacccttggccataatatgatttatctccacactagcagagaccaaccgaacccccttcgaccttgccgaaggggagtccgaactagtctcaggcttcaacatcgaatacgccgcaggccccttcgccctattcttcatagccgaatacacaaacattattataataaacaccctcaccactacaatcttcctaggaacaacatatgacgcactctcccctgaactctacacaacatattttgtcaccaagaccctacttctaacctccctgttcttatgaattcgaacagcatacccccgattccgctacgaccaactcatacacctcctatgaaaaaacttcctaccactcaccctagcattacttatatgatatgtctccatacccattacaatctccagcattccccctcaaacctaagaaatatgtctgataaaagagttactttgatagagtaaataataggagcttaaacccccttatttctaggactatgagaatcgaacccatccctgagaatccaaaattctccgtgccacctatcacaccccatcctaaagtaaggtcagctaaataagctatcgggcccataccccgaaaatgttggttatacccttcccgtactaattaatcccctggcccaacccgtcatctactctaccatctttgcaggcacactcatcacagcgctaagctcgcactgattttttacctgagtaggcctagaaataaacatgctagcttttattccagttctaaccaaaaaaataaaccctcgttccacagaagctgccatcaagtatttcctcacgcaagcaaccgcatccataatccttctaatagctatcctcttcaacaatatactctccggacaatgaaccataaccaatactaccaatcaatactcatcattaataatcataatggctatagcaataaaactaggaatagccccctttcacttctgagtcccagaggttacccaaggcacccctctgacatccggcctgcttcttctcacatgacaaaaactagcccccatctcaatcatataccaaatctctccctcactaaacgtaagccttctcctcactctctcaatcttatccatcatagcaggcagttgaggtggattaaaccaaacccagctacgcaaaatcttagcatactcctcaattacccacataggatgaataatagcagttctaccgtacaaccctaacataaccattcttaatttaactatttatattatcctaactactaccgcattcctactactcaacttaaactccagcaccacgaccctactactatctcgcacctgaaacaagctaacatgactaacacccttaattccatccaccctcctctccctaggaggcctgcccccgctaaccggctttttgcccaaatgggccattatcgaagaattcacaaaaaacaatagcctcatcatccccaccatcatagccaccatcaccctccttaacctctacttctacctacgcctaatctactccacctcaatcacactactccccatatctaacaacgtaaaaataaaatgacagtttgaacatacaaaacccaccccattcctccccacactcatcgcccttaccacgctactcctacctatctccccttttatactaataatcttatagaaatttaggttaaatacagaccaagagccttcaaagccctcagtaagttgcaatacttaatttctgtaacagctaaggactgcaaaaccccactctgcatcaactgaacgcaaatcagccactttaattaagctaagcccttactagaccaatgggacttaaacccacaaacacttagttaacagctaagcaccctaatcaactggcttcaatctacttctcccgccgccgggaaaaaaggcgggagaagccccggcagatttgaagctgcttcttcgaatttgcaattcaatatgaaaatcacctcggagctggtaaaaagaggcctaacccctgtctttagatttacagtccaatgcttcactcagccattttacctcacccccactgatgttcgccgaccgttgactattctctacaaaccacaaagacattggaacactatacctattattcggcgcatgagctggagtcctaggcacagctctaagcctccttattcgagccgagctgggccagccaggcaaccttctaggtaacgaccacatctacaacgttatcgtcacagcccatgcatttgtaataatcttcttcatagtaatacccatcataatcggaggctttggcaactgactagttcccctaataatcggtgcccccgatatggcgtttccccgcataaacaacataagcttctgactcttacccccctctctcctactcctgctcgcatctgctatagtggaggccggagcaggaacaggttgaacagtctaccctcccttagcagggaactactcccaccctggagcctccgtagacctaaccatcttctccttacacctagcaggtgtctcctctatcttaggggccatcaatttcatcacaacaattatcaatataaaaccccctgccataacccaataccaaacgcccctcttcgtctgatccgtcctaatcacagcagtcctacttctcctatctctcccagtcctagctgctggcatcactatactactaacagaccgcaacctcaacaccaccttcttcgaccccgccggaggaggagaccccattctataccaacacctattctgatttttcggtcaccctgaagtttatattcttatcctaccaggcttcggaataatctcccatattgtaacttactactccggaaaaaaagaaccatttggatacataggtatggtctgagctatgatatcaattggcttcctagggtttatcgtgtgagcacaccatatatttacagtaggaatagacgtagacacacgagcatatttcacctccgctaccataatcatcgctatccccaccggcgtcaaagtatttagctgactcgccacactccacggaagcaatatgaaatgatctgctgcagtgctctgagccctaggattcatctttcttttcaccgtaggtggcctgactggcattgtattagcaaactcatcactagacatcgtactacacgacacgtactacgttgtagctcacttccactatgtcctatcaataggagctgtatttgccatcataggaggcttcattcactgatttcccctattctcaggctacaccctagaccaaacctacgccaaaatccatttcactatcatattcatcggcgtaaatctaactttcttcccacaacactttctcggcctatccggaatgccccgacgttactcggactaccccgatgcatacaccacatgaaacatcctatcatctgtaggctcattcatttctctaacagcagtaatattaataattttcatgatttgagaagccttcgcttcgaagcgaaaagtcctaatagtagaagaaccctccataaacctggagtgactatatggatgccccccaccctaccacacattcgaagaacccgtatacataaaatctagacaaaaaaggaaggaatcgaaccccccaaagctggtttcaagccaaccccatggcctccatgactttttcaaaaaggtattagaaaaaccatttcataactttgtcaaagttaaattataggctaaatcctatatatcttaatggcacatgcagcgcaagtaggtctacaagacgctacttcccctatcatagaagagcttatcacctttcatgatcacgccctcataatcattttccttatctgcttcctagtcctgtatgcccttttcctaacactcacaacaaaactaactaatactaacatctcagacgctcaggaaatagaaaccgtctgaactatcctgcccgccatcatcctagtcctcatcgccctcccatccctacgcatcctttacataacagacgaggtcaacgatccctcccttaccatcaaatcaattggccaccaatggtactgaacctacgagtacaccgactacggcggactaatcttcaactcctacatacttcccccattattcctagaaccaggcgacctgcgactccttgacgttgacaatcgagtagtactcccgattgaagcccccattcgtataataattacatcacaagacgtcttgcactcatgagctgtccccacattaggcttaaaaacagatgcaattcccggacgtctaaaccaaaccactttcaccgctacacgaccgggggtatactacggtcaatgctctgaaatctgtggagcaaaccacagtttcatgcccatcgtcctagaattaattcccctaaaaatctttgaaatagggcccgtatttaccctatagcaccccctctaccccctctagagcccactgtaaagctaacttagcattaaccttttaagttaaagattaagagaaccaacacctctttacagtgaaatgccccaactaaatactaccgtatggcccaccataattacccccatactccttacactattcctcatcacccaactaaaaatattaaacacaaactaccacctacctccctcaccaaagcccataaaaataaaaaattataacaaaccctgagaaccaaaatgaacgaaaatctgttcgcttcattcattgcccccacaatcctaggcctacccgccgcagtactgatcattctatttccccctctattgatccccacctccaaatatctcatcaacaaccgactaatcaccacccaacaatgactaatcaaactaacctcaaaacaaatgatagccatacacaacactaaaggacgaacctgatctcttatactagtatccttaatcatttttattgccacaactaacctcctcggactcctgcctcactcatttacaccaaccacccaactatctataaacctagccatggccatccccttatgagcgggcgcagtgattataggctttcgctctaagattaaaaatgccctagcccacttcttaccacaaggcacacctacaccccttatccccatactagttattatcgaaaccatcagcctactcattcaaccaatagccctggccgtacgcctaaccgctaacattactgcaggccacctactcatgcacctaattggaagcgccaccctagcaatatcaaccattaaccttccctctacacttatcatcttcacaattctaattctactgactatcctagaaatcgctgtcgccttaatccaagcctacgttttcacacttctagtaagcctctacctgcacgacaacacataatgacccaccaatcacatgcctatcatatagtaaaacccagcccatgacccctaacaggggccctctcagccctcctaatgacctccggcctagccatgtgatttcacttccactccataacgctcctcatactaggcctactaaccaacacactaaccatataccaatgatggcgcgatgtaacacgagaaagcacataccaaggccaccacacaccacctgtccaaaaaggccttcgatatgggataatcctatttattacctcagaagtttttttcttcgcaggatttttctgagccttttaccactccagcctagcccctaccccccaactaggagggcactggcccccaacaggcatcaccccgctaaatcccctagaagtcccactcctaaacacatccgtattactcgcatcaggagtatcaatcacctgagctcaccatagtctaatagaaaacaaccgaaaccaaataattcaagcactgcttattacaattttactgggtctctattttaccctcctacaagcctcagagtacttcgagtctcccttcaccatttccgacggcatctacggctcaacattttttgtagccacaggcttccacggacttcacgtcattattggctcaactttcctcactatctgcttcatccgccaactaatatttcactttacatccaaacatcactttggcttcgaagccgccgcctgatactggcattttgtagatgtggtttgactatttctgtatgtctccatctattgatgagggtcttactcttttagtataaatagtaccgttaacttccaattaactagttttgacaacattcaaaaaagagtaataaacttcgccttaattttaataatcgacaccctcctagccttactactaataattattacattttgactaccacaactcaacggctacatagaaaaatccaccccttacgagtgcggcttcgaccctatatcccccgcccgcgtccctttctccataaaattcttcttagtagctattaccttcttattatttgatctagaaattgccctccttttacccctaccatgagccctacaaacaactaacctgccactaatagttatgtcatccctcttattaatcatcatcctagccctaagtctggcctatgaatgactacaaaaaggattagactgagccgaattggtatatagtttaaacaaaacgaatgatttcgactcattaaattatgataatcatatttaccaaatgcccctcatttacataaatattatactagcatttaccatctcacttctaggaatactagtatatcgctcacacctcatatcctccctactatgcctagaaggaataatactatcgctgttcattatagctactctcataaccctcaacacccactccctcttagccaatattgtgcctattgccatactagtctttgccgcctgcgaagcagcggtgggcctagccctactagtctcaatctccaacacatatggcctagactacgtacataacctaaacctactccaatgctaaaactaatcgtcccaacaattatattactaccactgacatgactttccaaaaaacacataatttgaatcaacacaaccacccacagcctaattattagcatcatccccctactattttttaaccaaatcaacaacaacctatttagctgttccccaaccttttcctccgaccccctaacaacccccctcctaatactaactacctgactcctacccctcacaatcatggcaagccagcgccacttatccagtgaaccactatcacgaaaaaaactctacctctctatactaatctccctacaaatctccttaattataacattcacagccacagaactaatcatattttatatcttcttcgaaaccacacttatccccaccttggctatcatcacccgatgaggcaaccagccagaacgcctgaacgcaggcacatacttcctattctacaccctagtaggctcccttcccctactcatcgcactaatttacactcacaacaccctaggctcactaaacattctactactcactctcactgcccaagaactatcaaactcctgagccaacaacttaatatgactagcttacacaatagcttttatagtaaagatacctctttacggactccacttatgactccctaaagcccatgtcgaagcccccatcgctgggtcaatagtacttgccgcagtactcttaaaactaggcggctatggtataatacgcctcacactcattctcaaccccctgacaaaacacatagcctaccccttccttgtactatccctatgaggcataattataacaagctccatctgcctacgacaaacagacctaaaatcgctcattgcatactcttcaatcagccacatagccctcgtagtaacagccattctcatccaaaccccctgaagcttcaccggcgcagtcattctcataatcgcccacggacttacatcctcattactattctgcctagcaaactcaaactacgaacgcactcacagtcgcatcataatcctctctcaaggacttcaaactctactcccactaatagctttttgatgacttctagcaagcctcgctaacctcgccttaccccccactattaacctactgggagaactctctgtgctagtaaccacgttctcctgatcaaatatcactctcctacttacaggactcaacatactagtcacagccctatactccctctacatatttaccacaacacaatggggctcactcacccaccacattaacaacataaaaccctcattcacacgagaaaacaccctcatgttcatacacctatcccccattctcctcctatccctcaaccccgacatcattaccgggttttcctcttgtaaatatagtttaaccaaaacatcagattgtgaatctgacaacagaggcttacgaccccttatttaccgagaaagctcacaagaactgctaactcatgcccccatgtctaacaacatggctttctcaacttttaaaggataacagctatccattggtcttaggccccaaaaattttggtgcaactccaaataaaagtaataaccatgcacactactataaccaccctaaccctgacttccctaattccccccatccttaccaccctcgttaaccctaacaaaaaaaactcatacccccattatgtaaaatccattgtcgcatccacctttattatcagtctcttccccacaacaatattcatgtgcctagaccaagaagttattatctcgaactgacactgagccacaacccaaacaacccagctctccctaagcttcaaactagactacttctccataatattcatccctgtagcattgttcgttacatggtccatcatagaattctcactgtgatatataaactcagacccaaacattaatcagttcttcaaatatctactcatcttcctaattaccatactaatcttagttaccgctaacaacctattccaactgttcatcggctgagagggcgtaggaattatatccttcttgctcatcagttgatgatacgcccgagcagatgccaacacagcagccattcaagcaatcctatacaaccgtatcggcgatatcggtttcatcctcgccttagcatgatttatcctacactccaactcatgagacccacaacaaatagcccttctaaacgctaatccaagcctcaccccactactaggcctcctcctagcagcagcaggcaaatcagcccaattaggtctccacccctgactcccctcagccatagaaggccccaccccagtctcagccctactccactcaagcactatagttgtagcaggagtcttcttactcatccgcttccaccccctagcagaaaatagcccactaatccaaactctaacactatgcttaggcgctatcaccactctgttcgcagcagtctgcgcccttacacaaaatgacatcaaaaaaatcgtagccttctccacttcaagtcaactaggactcataatagttacaatcggcatcaaccaaccacacctagcattcctgcacatctgtacccacgccttcttcaaagccatactatttatgtgctccgggtccatcatccacaaccttaacaatgaacaagatattcgaaaaataggaggactactcaaaaccatacctctcacttcaacctccctcaccattggcagcctagcattagcaggaatacctttcctcacaggtttctactccaaagaccacatcatcgaaaccgcaaacatatcatacacaaacgcctgagccctatctattactctcatcgctacctccctgacaagcgcctatagcactcgaataattcttctcaccctaacaggtcaacctcgcttccccacccttactaacattaacgaaaataaccccaccctactaaaccccattaaacgcctggcagccggaagcctattcgcaggatttctcattactaacaacatttcccccgcatcccccttccaaacaacaatccccctctacctaaaactcacagccctcgctgtcactttcctaggacttctaacagccctagacctcaactacctaaccaacaaacttaaaataaaatccccactatgcacattttatttctccaacatactaggattctaccctagcatcacacaccgcacaatcccctatctaggccttcttacgagccaaaacctgcccctactcctcctagacctaacctgactagaaaagctattacctaaaacaatttcacagcaccaaatctccacctccatcatcacctcaacccaaaaaggcataattaaactttacttcctctctttcttcttcccactcatcctaaccctactcctaatcacataacctattcccccgagcaatctcaattacaatatatacaccaacaaacaatgttcaaccagtaactactactaatcaacgcccataatcatacaaagcccccgcaccaataggatcctcccgaatcaaccctgacccctctccttcataaattattcagcttcctacactattaaagtttaccacaaccaccaccccatcatactctttcacccacagcaccaatcctacctccatcgctaaccccactaaaacactcaccaagacctcaacccctgacccccatgcctcaggatactcctcaatagccatcgctgtagtatatccaaagacaaccatcattccccctaaataaattaaaaaaactattaaacccatataacctcccccaaaattcagaataataacacacccgaccacaccgctaacaatcaatactaaacccccataaataggagaaggcttagaagaaaaccccacaaaccccattactaaacccacactcaacagaaacaaagcatacatcattattctcgcacggactacaaccacgaccaatgatatgaaaaaccatcgttgtatttcaactacaagaacaccaatgaccccaatacgcaaaattaaccccctaataaaattaattaaccactcattcatcgacctccccaccccatccaacatctccgcatgatgaaacttcggctcactccttggcgcctgcctgatcctccaaatcaccacaggactattcctagccatgcactactcaccagacgcctcaaccgccttttcatcaatcgcccacatcactcgagacgtaaattatggctgaatcatccgctaccttcacgccaatggcgcctcaatattctttatctgcctcttcctacacatcgggcgaggcctatattacggatcatttctctactcagaaacctgaaacatcggcattatcctcctgcttgcaactatagcaacagccttcataggctatgtcctcccgtgaggccaaatatcattctgaggggccacagtaattacaaacttactatccgccatcccatacattgggacagacctagttcaatgaatctgaggaggctactcagtagacagtcccaccctcacacgattctttacctttcacttcatcttacccttcattgttgcagccctagcagcactccacctcctattcttgcacgaaacgggatcaaacaaccccctaggaatcacctcccattccgataaaatcaccttccacccttactacacaatcaaagacgccctcggcttacttctcttccttctctccttaatgacattaacactattctcaccagacctcctaggcgacccagacaattataccctagccaaccccttaaacacccctccccacatcaagcccgaatgatatttcctattcgcctacacaattctccgatccgtccctaacaaactaggaggcgtccttgccctattactatccatcctcatcctagcaataatccccatcctccatatatccaaacaacaaagcataatatttcgcccactaagccaatcactttattgactcctagccgcagacctcctcattctaacctgaatcggaggacaaccagtaagctacccttttaccatcattggacaagtagcatccgtactatacttcgcaacaatcctaatcctaataccaactatctccctaattgaaaacaaaatactcaaatgggcctgtccttgtagtataaactaatacaccagtcttgtaaaccggagatgaaaaccttttccaaggacaaatcagagaaaaagtctttaactccaccattagcacccaaagctaagattctaatttaaactattctctgttctttcatggggaagcagatttgggtaccacccaagtattgactcacccatcaacaaccgctatgtatttcgtacattactgccagccaccatgaatattgtacggtaccataaatacttaaccacctgtagtacataaaaacccaatccacatcaaaaccccctccccatgcttacaagcaagtacagcaatcaaccttcaactatcacacatcaactgcaactccaaagccacccctcacccactaggatatcaacaaacctacccactcttaacagtacatagtacataaagccatttaccgtacatagcacattacagtcaaatcccttctcgcccccatggatgacccccctcagataggggtcccttgaccaccatcctccgtgaaatcaatatcccgcacaagagtgctactctcctcgctccgggcccataacacttgggggtagctaaagtgaactgtatccgacatctggttcctacttcagggccataaagcctaaatagcccacacgttccccttaaataagacatcacgatg

SEQ ID NO: 311 - DNA, 16570 bp, Homo sapiens mitochondrial
  3108: "n" refers to a nucleotide at position 3107 of the Cambridge Reference Sequence (CRS, Anderson et al. 1981 Nature 290:457-465), later determined to be absent from the human mtDNA sequence according to the revised CRS (rCRS, Andrews et al. 1999 Nature Genetics 23:147); "n" therefore represents a single nucleotide deletion at a position corresponding to nucleotide 3107 of SEQ ID NO:1 as provided herein.
gatcacaggtctatcaccctattaaccactcacgggagctctccatgcatttggtattttcgtctggggggtatgcacgcgatagcattgcgagacgctggagccggagcaccctatgtcgcagtatctgtctttgattcctgcctcatcctattatttatcgcacctacgttcaatattacaggcgaacatacttactaaagtgtgttaattaattaatgcttgtaggacataataataacaattgaatgtctgcacagccgctttccacacagacatcataacaaaaaatttccaccaaaccccccctcccccgccttctggccacagcacttaaacacatctctgccaaaccccaaaaacaaagaaccctaacaccagcctaaccagatttcaaattttatcttttggcggtatgcacttttaacagtcaccccccaactaacacattattttcccctcccactcccatactactaatctcatcaatacaacccccgcccatcctacccagcacacacacaccgctgctaaccccataccccgaaccaaccaaaccccaaagacaccccccacagtttatgtagcttacctcctcaaagcaatacactgaaaatgtttagacgggctcacatcaccccataaacaaataggtttggtcctagcctttctattagctcttagtaagattacacatgcaagcatccccgttccagtgagttcaccctctaaatcaccacgatcaaaagggacaagcatcaagcacgcagcaatgcagctcaaaacgcttagcctagccacacccccacgggaaacagcagtgattaacctttagcaataaacgaaagtttaactaagctatactaaccccagggttggtcaatttcgtgccagccaccgcggtcacacgattaacccaagtcaatagaagccggcgtaaagagtgttttagatcaccccctccccaataaagctaaaactcacctgagttgtaaaaaactccagttgacacaaaatagactacgaaagtggctttaacatatctgaacacacaatagctaagacccaaactgggattagataccccactatgcttagccctaaacctcaacagttaaatcaacaaaactgctcgccagaacactacgagccacagcttaaaactcaaaggacctggcggtgcttcatatccctctagaggagcctgttctgtaatcgataaaccccgatcaacctcaccacctcttgctcagcctatataccgccatcttcagcaaaccctgatgaaggctacaaagtaagcgcaagtacccacgtaaagacgttaggtcaaggtgtagcccatgaggtggcaagaaatgggctacattttctaccccagaaaactacgatagcccttatgaaacttaagggtcgaaggtggatttagcagtaaactgagagtagagtgcttagttgaacagggccctgaagcgcgtacacaccgcccgtcaccctcctcaagtatacttcaaaggacatttaactaaaacccctacgcatttatatagaggagacaagtcgtaacatggtaagtgtactggaaagtgcacttggacgaaccagagtgtagcttaacacaaagcacccaacttacacttaggagatttcaacttaacttgaccgctctgagctaaacctagccccaaacccactccaccttactaccagacaaccttagccaaaccatttacccaaataaagtataggcgatagaaattgaaacctggcgcaatagatatagtaccgcaagggaaagatgaaaaattataaccaagcataatatagcaaggactaacccctataccttctgcataatgaattaactagaaataactttgcaaggagagccaaagctaagacccccgaaaccagacgagctacctaagaacagctaaaagagcacacccgtctatgtagcaaaatagtgggaagatttataggtagaggcgacaaacctaccgagcctggtgatagctggttgtccaagatagaatcttagttcaactttaaatttgcccacagaaccctctaaatccccttgtaaatttaactgttagtccaaagaggaacagctctttggacactaggaaaaaaccttgtagagagagtaaaaaatttaacacccatagtaggcctaaaagcagccaccaattaagaaagcgttcaagctcaacacccactacctaaaaaatcccaaacatataactgaactcctcacacccaattggaccaatctatcaccctatagaagaactaatgttagtataagtaacatgaaaacattctcctccgcataagcctgcgtcagattaaaacactgaactgacaattaacagcccaatatctacaatcaaccaacaagtcattattaccctcactgtcaacccaacacaggcatgctcataaggaaaggttaaaaaaagtaaaaggaactcggcaaatcttaccccgcctgtttaccaaaaacatcacctctagcatcaccagtattagaggcaccgcctgcccagtgacacatgtttaacggccgcggtaccctaaccgtgcaaaggtagcataatcacttgttccttaaatagggacctgtatgaatggctccacgagggttcagctgtctcttacttttaaccagtgaaattgacctgcccgtgaagaggcgggcataacacagcaagacgagaagaccctatggagctttaatttattaatgcaaacagtacctaacaaacccacaggtcctaaactaccaaacctgcattaaaaatttcggttggggcgacctcggagcagaacccaacctccgagcagtacatgctaagacttcaccagtcaaagcgaactactatactcaattgatccaataacttgaccaacggaacaagttaccctagggataacagcgcaatcctattctagagtccatatcaacaatagggtttacgacctcgatgttggatcaggacatcccaatggtgcagccgctattaaaggttcgtttgttcaacgattaaagtcctacgtgatctgagttcagaccggagtaatccaggtcggtttctatctacnttcaaattcctccctgtacgaaaggacaagagaaataaggcctacttcacaaagcgccttcccccgtaaatgatatcatctcaacttagtattatacccacacccacccaagaacagggtttgttaagatggcagagcccggtaatcgcataaaacttaaaactttacagtcagaggttcaattcctcttcttaacaacatacccatggccaacctcctactcctcattgtacccattctaatcgcaatggcattcctaatgcttaccgaacgaaaaattctaggctatatacaactacgcaaaggccccaacgttgtaggcccctacgggctactacaacccttcgctgacgccataaaactcttcaccaaagagcccctaaaacccgccacatctaccatcaccctctacatcaccgccccgaccttagctctcaccatcgctcttctactatgaacccccctccccatacccaaccccctggtcaacctcaacctaggcctcctatttattctagccacctctagcctagccgtttactcaatcctctgatcagggtgagcatcaaactcaaactacgccctgatcggcgcactgcgagcagtagcccaaacaatctcatatgaagtcaccctagccatcattctactatcaacattactaataagtggctcctttaacctctccacccttatcacaacacaagaacacctctgattactcctgccatcatgacccttggccataatatgatttatctccacactagcagagaccaaccgaacccccttcgaccttgccgaaggggagtccgaactagtctcaggcttcaacatcgaatacgccgcaggccccttcgccctattcttcatagccgaatacacaaacattattataataaacaccctcaccactacaatcttcctaggaacaacatatgacgcactctcccctgaactctacacaacatattttgtcaccaagaccctacttctaacctccctgttcttatgaattcgaacagcatacccccgattccgctacgaccaactcatacacctcctatgaaaaaacttcctaccactcaccctagcattacttatatgatatgtctccatacccattacaatctccagcattccccctcaaacctaagaaatatgtctgataaaagagttactttgatagagtaaataataggagcttaaacccccttatttctaggactatgagaatcgaacccatccctgagaatccaaaattctccgtgccacctatcacaccccatcctaaagtaaggtcagctaaataagctatcgggcccataccccgaaaatgttggttatacccttcccgtactaattaatcccctggcccaacccgtcatctactctaccatctttgcaggcacactcatcacagcgctaagctcgcactgattttttacctgagtaggcctagaaataaacatgctagcttttattccagttctaaccaaaaaaataaaccctcgttccacagaagctgccatcaagtatttcctcacgcaagcaaccgcatccataatccttctaatagctatcctcttcaacaatatactctccggacaatgaaccataaccaatactaccaatcaatactcatcattaataatcataatggctatagcaataaaactaggaatagccccctttcacttctgagtcccagaggttacccaaggcacccctctgacatccggcctgcttcttctcacatgacaaaaactagcccccatctcaatcatataccaaatctctccctcactaaacgtaagccttctcctcactctctcaatcttatccatcatagcaggcagttgaggtggattaaaccaaacccagctacgcaaaatcttagcatactcctcaattacccacataggatgaataatagcagttctaccgtacaaccctaacataaccattcttaatttaactatttatattatcctaactactaccgcattcctactactcaacttaaactccagcaccacgaccctactactatctcgcacctgaaacaagctaacatgactaacacccttaattccatccaccctcctctccctaggaggcctgcccccgctaaccggctttttgcccaaatgggccattatcgaagaattcacaaaaaacaatagcctcatcatccccaccatcatagccaccatcaccctccttaacctctacttctacctacgcctaatctactccacctcaatcacactactccccatatctaacaacgtaaaaataaaatgacagtttgaacatacaaaacccaccccattcctccccacactcatcgcccttaccacgctactcctacctatctccccttttatactaataatcttatagaaatttaggttaaatacagaccaagagccttcaaagccctcagtaagttgcaatacttaatttctgtaacagctaaggactgcaaaaccccactctgcatcaactgaacgcaaatcagccactttaattaagctaagcccttactagaccaatgggacttaaacccacaaacacttagttaacagctaagcaccctaatcaactggcttcaatctacttctcccgccgccgggaaaaaaggcgggagaagccccggcaggtttgaagctgcttcttcgaatttgcaattcaatatgaaaatcacctcggagctggtaaaaagaggcctaacccctgtctttagatttacagtccaatgcttcactcagccattttacctcacccccactgatgttcgccgaccgttgactattctctacaaaccacaaagacattggaacactatacctattattcggcgcatgagctggagtcctaggcacagctctaagcctccttattcgagccgagctgggccagccaggcaaccttctaggtaacgaccacatctacaacgttatcgtcacagcccatgcatttgtaataatcttcttcatagtaatacccatcataatcggaggctttggcaactgactagttcccctaataatcggtgcccccgatatggcgtttccccgcataaacaacataagcttctgactcttacctccctctctcctactcctgctcgcatctactatagtggaggccggagcaggaacaggttgaacagtctaccctcccttagcagggaactactcccaccctggagcctccgtagacctaaccatcttctccttacacctagcaggtgtctcctctatcttaggggccatcaatttcatcacaacaattatcaatataaaaccccctgccataacccaataccaaacgcccctcttcgtctgatccgtcctaatcacagcagtcctacttctcctatctctcccagtcctagctgctggcatcactatactactaacagaccgcaacctcaacaccaccttcttcgaccccgccggaggaggagaccccattctataccaacacctattctgatttttcggtcaccctgaagtttatattcttatcctaccaggcttcggaataatctcccatattgtaacttactactccggaaaaaaagaaccatttggatacataggtatggtctgagctatgatatcaattggcttcctagggtttatcgtgtgagcacaccatatatttacagtaggaatagacgtagacacacgagcatatttcacctccgctaccataatcatcgctatccccaccggcgtcaaagtatttagctgactcgccacactccacggaagcaatatgaaatgatctgctgcagtgctctgagccctaggattcatctttcttttcaccgtaggtggcctgactggcattgtattagcaaactcatcactagacatcgtactacacgacacgtactacgttgtagcccacttccactatgtcctatcaataggagctgtatttgccatcataggaggcttcattcactgatttcccctattctcaggctacaccctagaccaaacctacgccaaaatccatttcactatcatattcatcggcgtaaatctaactttcttcccacaacactttctcggcctatccggaatgccccgacgttactcggactaccccgatgcatacaccacatgaaacatcctatcatctgtaggctcattcatttctctaacagcagtaatattaataattttcatgatttgagaagccttcgcttcgaagcgaaaagtcctaatagtagaagaaccctccataaacctggagtgactatatggatgccccccaccctaccacacattcgaagaacccgtatacataaaatctagacaaaaaaggaaggaatcgaaccccccaaagctggtttcaagccaaccccatggcctccatgactttttcaaaaaggtattagaaaaaccatttcataactttgtcaaagttaaattataggctaaatcctatatatcttaatggcacatgcagcgcaagtaggtctacaagacgctacttcccctatcatagaagagcttatcacctttcatgatcacgccctcataatcattttccttatctgcttcctagtcctgtatgcccttttcctaacactcacaacaaaactaactaatactaacatctcagacgctcaggaaatagaaaccgtctgaactatcctgcccgccatcatcctagtcctcatcgccctcccatccctacgcatcctttacataacagacgaggtcaacgatccctcccttaccatcaaatcaattggccaccaatggtactgaacctacgagtacaccgactacggcggactaatcttcaactcctacatacttcccccattattcctagaaccaggcgacctgcgactccttgacgttgacaatcgagtagtactcccgattgaagcccccattcgtataataattacatcacaagacgtcttgcactcatgagctgtccccacattaggcttaaaaacagatgcaattcccggacgtctaaaccaaaccactttcaccgctacacgaccgggggtatactacggtcaatgctctgaaatctgtggagcaaaccacagtttcatgcccatcgtcctagaattaattcccctaaaaatctttgaaatagggcccgtatttaccctatagcaccccctctaccccctctagagcccactgtaaagctaacttagcattaaccttttaagttaaagattaagagaaccaacacctctttacagtgaaatgccccaactaaatactaccgtatggcccaccataattacccccatactccttacactattcctcatcacccaactaaaaatattaaacacaaactaccacctacctccctcaccaaagcccataaaaataaaaaattataacaaaccctgagaaccaaaatgaacgaaaatctgttcgcttcattcattgcccccacaatcctaggcctacccgccgcagtactgatcattctacttccccctctattgatccccacctccaaatatctcatcaacaaccgactaatcaccacccaacaatgactaatcaaactaacctcaaaacaaatgataaccatacacaacactaaaggacgaacctgatctcttatactagtatccttaatcatttttattgccacaactaacctcctcggactcctgcctcactcatttacaccaaccacccaactatctataaacctagccatggccatccccttatgagcgggcgcagtgattataggctttcgctctaagattaaaaatgccctagcccacttcttaccacaaggcacacctacaccccttatccccatactagttattatcgaaaccatcagcctactcattcaaccaatagccctggccgtacgcctaaccgctaacattactgcaggccacctactcatgcacctaattggaagcgccaccctagcaatatcaaccattaaccttccctctacacttatcatcttcacaattctaattctactgactatcctagaaatcgctgtcgccttaatccaagcctacgttttcacacttctagtaagcctctacctgcacgacaacacataatgacccaccaatcacatgcctatcatatagtaaaacccagcccatgacccctaacaggggccctctcagccctcctaatgacctccggcctagccatgtgatttcacttccactccataacgctcctcatactaggcctactaaccaacacactaaccatataccaatgatggcgcgatgtaacacgagaaagcacataccaaggccaccacacaccacctgtccaaaaaggccttcgatacgggataatcctatttattacctcagaagtttttttcttcgcaggatttttctgagccttttaccactccagcctagcccctaccccccaattaggagggcactggcccccaacaggcatcaccccgctaaatcccctagaagtcccactcctaaacacatccgtattactcgcatcaggagtatcaatcacctgagctcaccatagtctaatagaaaacaaccgaaaccaaataattcaagcactgcttattacaattttactgggtctctattttaccctcctacaagcctcagagtacttcgagtctcccttcaccatttccgacggcatctacggctcaacattttttgtagccacaggcttccacggacttcacgtcattattggctcaactttcctcactatctgcttcatccgccaactaatatttcactttacatccaaacatcactttggcttcgaagccgccgcctgatactggcattttgtagatgtggtttgactatttctgtatgtctccatctattgatgagggtcttactcttttagtataaatagtaccgttaacttccaattaactagttttgacaacattcaaaaaagagtaataaacttcgccttaattttaataatcaacaccctcctagccttactactaataattattacattttgactaccacaactcaacggctacatagaaaaatccaccccttacgagtgcggcttcgaccctatatcccccgcccgcgtccctttctccataaaattcttcttagtagctattaccttcttattatttgatctagaaattgccctccttttacccctaccatgagccctacaaacaactaacctgccactaatagttatgtcatccctcttattaatcatcatcctagccctaagtctggcctatgagtgactacaaaaaggattagactgaaccgaattggtatatagtttaaacaaaacgaatgatttcgactcattaaattatgataatcatatttaccaaatgcccctcatttacataaatattatactagcatttaccatctcacttctaggaatactagtatatcgctcacacctcatatcctccctactatgcctagaaggaataatactatcgctgttcattatagctactctcataaccctcaacacccactccctcttagccaatattgtgcctattgccatactagtctttgccgcctgcgaagcagcggtgggcctagccctactagtctcaatctccaacacatatggcctagactacgtacataacctaaacctactccaatgctaaaactaatcgtcccaacaattatattactaccactgacatgactttccaaaaaacacataatttgaatcaacacaaccacccacagcctaattattagcatcatccctctactattttttaaccaaatcaacaacaacctatttagctgttccccaaccttttcctccgaccccctaacaacccccctcctaatactaactacctgactcctacccctcacaatcatggcaagccaacgccacttatccagtgaaccactatcacgaaaaaaactctacctctctatactaatctccctacaaatctccttaattataacattcacagccacagaactaatcatattttatatcttcttcgaaaccacacttatccccaccttggctatcatcacccgatgaggcaaccagccagaacgcctgaacgcaggcacatacttcctattctacaccctagtaggctcccttcccctactcatcgcactaatttacactcacaacaccctaggctcactaaacattctactactcactctcactgcccaagaactatcaaactcctgagccaacaacttaatatgactagcttacacaatagcttttatagtaaagatacctctttacggactccacttatgactccctaaagcccatgtcgaagcccccatcgctgggtcaatagtacttgccgcagtactcttaaaactaggcggctatggtataatacgcctcacactcattctcaaccccctgacaaaacacatagcctaccccttccttgtactatccctatgaggcataattataacaagctccatctgcctacgacaaacagacctaaaatcgctcattgcatactcttcaatcagccacatagccctcgtagtaacagccattctcatccaaaccccctgaagcttcaccggcgcagtcattctcataatcgcccacgggcttacatcctcattactattctgcctagcaaactcaaactacgaacgcactcacagtcgcatcataatcctctctcaaggacttcaaactctactcccactaatagctttttgatgacttctagcaagcctcgctaacctcgccttaccccccactattaacctactgggagaactctctgtgctagtaaccacgttctcctgatcaaatatcactctcctacttacaggactcaacatactagtcacagccctatactccctctacatatttaccacaacacaatggggctcactcacccaccacattaacaacataaaaccctcattcacacgagaaaacaccctcatgttcatacacctatcccccattctcctcctatccctcaaccccgacatcattaccgggttttcctcttgtaaatatagtttaaccaaaacatcagattgtgaatctgacaacagaggcttacgaccccttatttaccgagaaagctcacaagaactgctaactcatgcccccatgtctaacaacatggctttctcaacttttaaaggataacagctatccattggtcttaggccccaaaaattttggtgcaactccaaataaaagtaataaccatgcacactactataaccaccctaaccctgacttccctaattccccccatccttaccaccctcgttaaccctaacaaaaaaaactcatacccccattatgtaaaatccattgtcgcatccacctttattatcagtctcttccccacaacaatattcatgtgcctagaccaagaagttattatctcgaactgacactgagccacaacccaaacaacccagctctccctaagcttcaaactagactacttctccataatattcatccctgtagcattgttcgttacatggtccatcatagaattctcactgtgatatataaactcagacccaaacattaatcagttcttcaaatatctactcatcttcctaattaccatactaatcttagttaccgctaacaacctattccaactgttcatcggctgagagggcgtaggaattatatccttcttgctcatcagttgatgatacgcccgagcagatgccaacacagcagccattcaagcaatcctatacaaccgtatcggcgatatcggtttcatcctcgccttagcatgatttatcctacactccaactcatgagacccacaacaaatagcccttctaaacgctaatccaagcctcaccccactactaggcctcctcctagcagcagcaggcaaatcagcccaattaggtctccacccctgactcccctcagccatagaaggccccaccccagtctcagccctactccactcaagcactatagttgtagcaggaatcttcttactcatccgcttccaccccctagcagaaaatagcccactaatccaaactctaacactatgcttaggcgctatcaccactctgttcgcagcagtctgcgcccttacacaaaatgacatcaaaaaaatcgtagccttctccacttcaagtcaactaggactcataatagttacaatcggcatcaaccaaccacacctagcattcctgcacatctgtacccacgccttcttcaaagccatactatttatgtgctccgggtccatcatccacaaccttaacaatgaacaagatattcgaaaaataggaggactactcaaaaccatacctctcacttcaacctccctcaccattggcagcctagcattagcaggaatacctttcctcacaggtttctactccaaagaccacatcatcgaaaccgcaaacatatcatacacaaacgcctgagccctatctattactctcatcgctacctccctgacaagcgcctatagcactcgaataattcttctcaccctaacaggtcaacctcgcttccccacccttactaacattaacgaaaataaccccaccctactaaaccccattaaacgcctggcagccggaagcctattcgcaggatttctcattactaacaacatttcccccgcatcccccttccaaacaacaatccccctctacctaaaactcacagccctcgctgtcactttcctaggacttctaacagccctagacctcaactacctaaccaacaaacttaaaataaaatccccactatgcacattttatttctccaacatactcggattctaccctagcatcacacaccgcacaatcccctatctaggccttcttacgagccaaaacctgcccctactcctcctagacctaacctgactagaaaagctattacctaaaacaatttcacagcaccaaatctccacctccatcatcacctcaacccaaaaaggcataattaaactttacttcctctctttcttcttcccactcatcctaaccctactcctaatcacataacctattcccccgagcaatctcaattacaatatatacaccaacaaacaatgttcaaccagtaaccactactaatcaacgcccataatcatacaaagcccccgcaccaataggatcctcccgaatcaaccctgacccctctccttcataaattattcagcttcctacactattaaagtttaccacaaccaccaccccatcatactctttcacccacagcaccaatcctacctccatcgctaaccccactaaaacactcaccaagacctcaacccctgacccccatgcctcaggatactcctcaatagccatcgctgtagtatatccaaagacaaccatcattccccctaaataaattaaaaaaactattaaacccatataacctcccccaaaattcagaataataacacacccgaccacaccgctaacaatcaatactaaacccccataaataggagaaggcttagaagaaaaccccacaaaccccattactaaacccacactcaacagaaacaaagcatacatcattattctcgcacggactacaaccacgaccaatgatatgaaaaaccatcgttgtatttcaactacaagaacaccaatgaccccaatacgcaaaactaaccccctaataaaattaattaaccactcattcatcgacctccccaccccatccaacatctccgcatgatgaaacttcggctcactccttggcgcctgcctgatcctccaaatcaccacaggactattcctagccatgcactactcaccagacgcctcaaccgccttttcatcaatcgcccacatcactcgagacgtaaattatggctgaatcatccgctaccttcacgccaatggcgcctcaatattctttatctgcctcttcctacacatcgggcgaggcctatattacggatcatttctctactcagaaacctgaaacatcggcattatcctcctgcttgcaactatagcaacagccttcataggctatgtcctcccgtgaggccaaatatcattctgaggggccacagtaattacaaacttactatccgccatcccatacattgggacagacctagttcaatgaatctgaggaggctactcagtagacagtcccaccctcacacgattctttacctttcacttcatcttgcccttcattattgcagccctagcagcactccacctcctattcttgcacgaaacgggatcaaacaaccccctaggaatcacctcccattccgataaaatcaccttccacccttactacacaatcaaagacgccctcggcttacttctcttccttctctccttaatgacattaacactattctcaccagacctcctaggcgacccagacaattataccctagccaaccccttaaacacccctccccacatcaagcccgaatgatatttcctattcgcctacacaattctccgatccgtccctaacaaactaggaggcgtccttgccctattactatccatcctcatcctagcaataatccccatcctccatatatccaaacaacaaagcataatatttcgcccactaagccaatcactttattgactcctagccgcagacctcctcattctaacctgaatcggaggacaaccagtaagctacccttttaccatcattggacaagtagcatccgtactatacttcacaacaatcctaatcctaataccaactatctccctaattgaaaacaaaatactcaaatgggcctgtccttgtagtataaactaatacaccagtcttgtaaaccggagatgaaaacctttttccaaggacaaatcagagaaaaagtctttaactccaccattagcacccaaagctaagattctaatttaaactattctctgttctttcatggggaagcagatttgggtaccacccaagtattgactcacccatcaacaaccgctatgtatttcgtacattactgccagccaccatgaatattgtacggtaccataaatacttgaccacctgtagtacataaaaacccaatccacatcaaaaccccccccccatgcttacaagcaagtacagcaatcaaccctcaactatcacacatcaactgcaactccaaagccacccctcacccactaggataccaacaaacctacccacccttaacagtacatagtacataaagccatttaccgtacatagcacattacagtcaaatcccttctcgtccccatggatgacccccctcagataggggtcccttgaccaccatcctccgtgaaatcaatatcccgcacaagagtgctactctcctcgctccgggcccataacacttgggggtagctaaagtgaactgtatccgacatctggttcctacttcagggccataaagcctaaatagcccacacgttccccttaaataagacatcacgatg

SEQ ID NO: 312 - DNA, 16569 bp, Homo sapiens mitochondrial
  3107: "n" refers to a nucleotide at position 3107 of the Cambridge Reference Sequence (CRS, Anderson et al. 1981 Nature 290:457-465), later determined to be absent from the human mtDNA sequence according to the revised CRS (rCRS, Andrews et al. 1999 Nature Genetics 23:147); "n" therefore represents a single nucleotide deletion at a position corresponding to nucleotide 3107 of SEQ ID NO:1 as provided herein.
gatcacaggtctatcaccctattaaccactcacgggagctctccatgcatttggtattttcgtctggggggtgtgcacgcgatagcattgcgagacgctggagccggagcaccctatgtcgcagtatctgtctttgattcctgcctcatcctattatttatcgcacctacgttcaatattacaggcgaacatacttactaaagtgtgttaattaattaatgcttgtaggacataataataacaattgaatgtctgcacagccgctttccacacagacatcataacaaaaaatttccaccaaaccccccctcccccccgcttctggccacagcacttaaacacatctctgccaaaccccaaaaacaaagaaccctaacaccagcctaaccagatttcaaattttatcttttggcggtatgcacttttaacagtcaccccccaactaacacattattttcccctcccacccccatactactaatctcatcaatacaacccccgcccatcctacccagcacacacaccgctgctaaccccataccccgaaccaaccaaaccccaaagacaccccccacagtttatgtagcttacctcctcaaagcaatacactgaaaatgtttagacgggctcacatcaccccataaacaaataggtttggtcctagcctttctattagctcttagtaagattacacatgcaagcatccccgttccagtgagttcaccctctaaatcaccacgatcaaaagggacaagcatcaagcacgcagcaatgcagctcaaaacgcttagcctagccacacccccacgggaaacagcagtgattaacctttagcaataaacgaaagtttaactaagctatactaaccccagggttggtcaatttcgtgccagccaccgcggtcacacgattaacccaagtcaatagaagccggcgtaaagagtgttttagatcaccccctccccaataaagctaaaactcacctgagttgtaaaaaactccagttgacacaaaatagactacgaaagtggctttaacatatctgaacacacaatagctaagacccaaactgggattagataccccactatgcttagccctaaacctcaacagttaaatcaacaaaactgctcgccagaacactacgagccacagcttaaaactcaaaggacctggcggtgcttcatatccctctagaggagcctgttctgtaatcgataaaccccgatcaacctcaccacctcttgctcagcctatataccgccatcttcagcaaaccctgatgaaggctacaaagtaagcgcaagtacccacgtaaagacgttaggtcaaggtgtagcccatgaggtggcaagaaatgggctacattttctaccccagaaaactacgatagcccttatgaaacttaagggtcgaaggtggatttagcagtaaactgagagtagagtgcttagttgaacagggccctgaagcgcgtacacaccgcccgtcaccctcctcaagtatacttcaaaggacatttaactaaaacccctacgcatttatatagaggagacaagtcgtaacatggtaagtgtactggaaagtgcacttggacgaaccagagtgtagcttaacacaaagcacccaacttacacttaggagatttcaacttaacttgaccgctctgagctaaacctagccccaaacccactccaccttactaccagacaaccttagccaaaccatttacccaaataaagtataggcgatagaaattgaaacctggcgcaatagatatagtaccgcaagggaaagatgaaaaattataaccaagcataatatagcaaggactaacccctataccttctgcataatgaattaactagaaataactttgcaaggagagccaaagctaagacccccgaaaccagacgagctacctaagaacagctaaaagagcacacccgtctatgtagcaaaatagtgggaagatttataggtagaggcgacaaacctaccgagcctggtgatagctggttgtccaagatagaatcttagttcaactttaaatttgcccacagaaccctctaaatccccttgtaaatttaactgttagtccaaagaggaacagctctttggacactaggaaaaaaccttgtagagagagtaaaaaatttaacacccatagtaggcctaaaagcagccaccaattaagaaagcgttcaagctcaacacccactacctaaaaaatcccaaacatataactgaactcctcacacccaattggaccaatctatcaccctatagaagaactaatgttagtataagtaacatgaaaacattctcctccgcataagcctgcgtcagattaaaacactgaactgacaattaacagcccaatatctacaatcaaccaacaagtcattattaccctcactgtcaacccaacacaggcatgctcataaggaaaggttaaaaaaagtaaaaggaactcggcaaatcttaccccgcctgtttaccaaaaacatcacctctagcatcaccagtattagaggcaccgcctgcccagtgacacatgtttaacggccgcggtaccctaaccgtgcaaaggtagcataatcacttgttccttaaatagggacctgtatgaatggctccacgagggttcagctgtctcttacttttaaccagtgaaattgacctgcccgtgaagaggcgggcatgacacagcaagacgagaagaccctatggagctttaatttattaatgcaaacagtacctaacaaacccacaggtcctaaactaccaaacctgcattaaaaatttcggttggggcgacctcggagcagaacccaacctccgagcagtacatgctaagacttcaccagtcaaagcgaactactatactcaattgatccaataacttgaccaacggaacaagttaccctagggataacagcgcaatcctattctagagtccatatcaacaatagggtttacgacctcgatgttggatcaggacatcccgatggtgcagccgctattaaaggttcgtttgttcaacgattaaagtcctacgtgatctgagttcagaccggagtaatccaggtcggtttctatctacnttcaaattcctccctgtacgaaaggacaagagaaataaggcctacttcacaaagcgccttcccccgtaaatgatatcatctcaacttagcattatacccacacccacccaagaacagggtttgttaagatggcagagcccggtaatcgcataaaacttaaaactttacagtcagaggttcaattcctcttcttaacaacatacccatggccaacctcctactcctcattgtacccattctaatcgcaatggcattcctaatgcttaccgaacgaaaaattctaggctatatacaactacgcaaaggccccaacgttgtaggcccctacgggctactacaacccttcgctgacgccataaaactcttcaccaaagagcccctaaaacccgccacatctaccatcaccctctacatcaccgccccgaccttagctctcaccatcgctcttctactatgaacccccctccccatacccaaccccctggtcaacctcaacctaggcctcctatttattctagccacctctagcctagccgtttactcaatcctctgatcagggtgagcatcaaactcaaactacgccctgatcggcgcactgcgagcagtagcccaaacaatctcatatgaagtcaccctagccatcattctactatcaacattactaataagtggctcctttaacctctccacccttatcacaacacaagaacacctctgattactcctgccatcatgacccttggccataatatgatttatctccacactagcagagaccaaccgaacccccttcgaccttgccgaaggggagtccgaactagtctcaggcttcaacatcgaatacgccgcaggccccttcgccctattcttcatagccgaatacacaaacattattataataaacaccctcaccactacaatcttcctaggaacaacatatgacgcactctcccctgaactctacacaacatattttgtcaccaagaccctacttctaacctccctgttcttatgaattcgaacagcatacccccgattccgctacgaccaactcatacacctcctatgaaaaaacttcctaccactcaccctagcattacttatatgatatgtctccatacccattacaatctccagcattccccctcaaacctaagaaatatgtctgataaaagagttactttgatagagtaaataataggagcttaaacccccttatttctaggactatgagaatcgaacccatccctgagaatccaaaattctccgtgccacctatcacaccccatcctaaagtaaggtcagctaaataagctatcgggcccataccccgaaaatgttggttatacccttcccgtactaattaatcccctggcccaacccgtcatctactctaccatctttgcaggcacactcatcacagcgctaagctcgcactgattttttacctgagtaggcctagaaataaacatgctagcttttattccagttctaaccaaaaaaataaaccctcgttccacagaagctgccatcaagtatttcctcacgcaagcaaccgcatccataatccttctaatagctatcctcttcaacaatatactctccggacaatgaaccataaccaatactaccaatcaatactcatcattaataatcataatggctatagcaataaaactaggaatagccccctttcacttctgagtcccagaggttacccaaggcacccctctgacatccggcctgcttcttctcacatgacaaaaactagcccccatctcaatcatataccaaatctctccctcactaaacgtaagccttctcctcactctctcaatcttatccatcatagcaggcagttgaggtggattaaaccaaacccagctacgcaaaatcttagcatactcctcaattacccacataggatgaataatagcagttctaccgtacaaccctaacataaccattcttaatttaactatttatattatcctaactactaccgcattcctactactcaacttaaactccagcaccacgaccctactactatctcgcacctgaaacaagctaacatgactaacacccttaattccatccaccctcctctccctaggaggcctgcccccgctaaccggctttttgcccaaatgggccattatcgaagaattcacaaaaaacaatagcctcatcatccccaccatcatagccaccatcaccctccttaacctctacttctacctacgcctaatctactccacctcaatcacactactccccatatctaacaacgtaaaaataaaatgacagtttgaacatacaaaacccaccccattcctccccacactcatcgcccttaccacgctactcctacctatctccccttttatactaataatcttatagaaatttaggttaaatacagaccaagagccttcaaagccctcagtaagttgcaatacttaatttctgtaacagctaaggactgcaaaaccccactctgcatcaactgaacgcaaatcagccactttaattaagctaagcccttactagaccaatgggacttaaacccacaaacacttagttaacagctaagcaccctaatcaactggcttcaatctacttctcccgccgccgggaaaaaaggcgggagaagccccggcaggtttgaagctgcttcttcgaatttgcaattcaatatgaaaatcacctcggagctggtaaaaagaggcctaacccctgtctttagatttacagtccaatgcttcactcagccattttacctcacccccactgatgttcgccgaccgttgactattctctacaaaccacaaagacattggaacactatacctattattcggcgcatgagctggagtcctaggcacagctctaagcctccttattcgagccgagctgggccagccaggcaaccttctaggtaacgaccacatctacaacgttatcgtcacagcccatgcatttgtaataatcttcttcatagtaatacccatcataatcggaggctttggcaactgactagttcccctaataatcggtgcccccgatatggcgtttccccgcataaacaacataagcttctgactcttacctccctctctcctactcctgctcgcatctgctatagtggaagccggagcaggaacaggttgaacagtctaccctcccttagcagggaactactcccaccctggagcctccgtagacctaaccatcttctccttacacctagcaggtgtctcctctatcttaggggccatcaatttcatcacaacaattatcaatataaaaccccctgccataacccaataccaaacgcccctcttcgtctgatccgtcctaatcacagcagtcctacttctcctatctctcccagtcctagctgctggcatcactatactactaacagaccgcaacctcaacaccaccttcttcgaccccgccggaggaggagaccccattctataccaacacctattctgatttttcggtcaccctgaagtttatattcttatcctaccaggcttcggaataatctcccatattgtaacttactactccggaaaaaaagaaccatttggatacataggtatggtctgagctatgatatcaattggcttcctagggtttatcgtgtgagcacaccatatatttacagtaggaatagacgtagacacacgagcatatttcacctccgctaccataatcatcgctatccccaccggcgtcaaagtatttagctgactcgccacactccacggaagcaatatgaaatgatctgctgcagtgctctgagccctaggattcatctttcttttcaccgtaggtggcctgactggcattgtattagcaaactcatcactagacatcgtactacacgacacgtactacgttgtagctcacttccactatgtcctatcaataggagctgtatttgccatcataggaggcttcattcactgatttcccctattctcaggctacaccctagaccaaacctacgccaaaatccatttcactatcatattcatcggcgtaaatctaactttcttcccacaacactttctcggcctatccggaatgccccgacgttactcggactaccccgatgcatacaccacatgaaacatcctatcatctgtaggctcattcatttctctaacagcagtaatattaataattttcatgatttgagaagccttcgcttcgaagcgaaaagtcctaatagtagaagaaccctccataaacctggagtgactatatggatgccccccaccctaccacacattcgaagaacccgtatacataaaatctagacaaaaaaggaaggaatcgaaccccccaaagctggtttcaagccaaccccatggcctccatgactttttcaaaaaggtattagaaaaaccatttcataactttgtcaaagttaaattataggctaaatcctatatatcttaatggcacatgcagcgcaagtaggtctacaagacgctacttcccctatcatagaagagcttatcacctttcatgatcacgccctcataatcattttccttatctgcttcctagtcctgtatgcccttttcctaacactcacaacaaaactaactaatactaacatctcagacgctcaggaaatagaaaccgtctgaactatcctgcccgccatcatcctagtcctcatcgccctcccatccctacgcatcctttacataacagacgaggtcaacgatccctcccttaccatcaaatcaattggccaccaatggtactgaacctacgagtacaccgactacggcggactaatcttcaactcctacatacttcccccattattcctagaaccaggcgacctgcgactccttgacgttgacaatcgagtagtactcccgattgaagcccccattcgtataataattacatcacaagacgtcttgcactcatgagctgtccccacattaggcttaaaaacagatgcaattcccggacgtctaaaccaaaccactttcaccgctacacgaccgggggtatactacggtcaatgctctgaaatctgtggagcaaaccacagtttcatgcccatcgtcctagaattaattcccctaaaaatctttgaaatagggcccgtatttaccctatagcaccccctctaccccctctagagcccactgtaaagctaacttagcattaaccttttaagttaaagattaagagaaccaacacctctttacagtgaaatgccccaactaaatactaccgtatggcccaccataattacccccatactccttacactattcctcatcacccaactaaaaatattaaacacaaactaccacctacctccctcaccaaagcccataaaaataaaaaattataacaaaccctgagaaccaaaatgaacgaaaatctgttcgcttcattcattgcccccacaatcctaggcctacccgccgcagtactgatcattctatttccccctctattgatccccacctccaaatatctcatcaacaaccgactaatcaccacccaacaatgactaatcaaactaacctcaaaacaaatgataaccatacacaacactaaaggacgaacctgatctcttatactagtatccttaatcatttttattgccacaactaacctcctcggactcctgcctcactcatttacaccaaccacccaactatctataaacctagccatggccatccccttatgagcgggcgcagtgattataggctttcgctctaagattaaaaatgccctagcccacttcttaccacaaggcacacctacaccccttatccccatactagttattatcgaaaccatcagcctactcattcaaccaatagccctggccgtacgcctaaccgctaacattactgcaggccacctactcatgcacctaattggaagcgccaccctagcaatatcaaccattaaccttccctctacacttatcatcttcacaattctaattctactgactatcctagaaatcgctgtcgccttaatccaagcctacgttttcacacttctagtaagcctctacctgcacgacaacacataatgacccaccaatcacatgcctatcatatagtaaaacccagcccatgacccctaacaggggccctctcagccctcctaatgacctccggcctagccatgtgatttcacttccactccataacgctcctcatactaggcctactaaccaacacactaaccatataccaatgatggcgcgatgtaacacgagaaagcacataccaaggccaccacacaccacctgtccaaaaaggccttcgatacgggataatcctatttattacctcagaaatttttttcttcgcaggatttttctgagccttttaccactccagcctagcccctaccccccaattaggagggcactggcccccaacaggcatcaccccgctaaatcccctagaagtcccactcctaaacacatccgtattactcgcatcaggagtatcaatcacctgagctcaccatagtctaatagaaagcaaccgaaaccaaataattcaagcactgcttattacaattttactgggtctctattttaccctcctacaagcctcagagtacttcgagtctcccttcaccatttccgacggcatctacggctcaacattttttgtagccacaggcttccacggacttcacgtcattattggctcaactttcctcactatctgcttcatccgccaactaatatttcactttacatccaaacatcactttggcttcgaagccgccgcctgatactggcattttgtagatgtggtttgactatttctgtatgtctccatctattgatgagggtcttactcttttagtataaatagtaccgttaacttccaattaactagttttgacaacattcaaaaaagagtaataaacttcgccttaattttaataatcaacaccctcctagccttactactaataattattacattttgactaccacaactcaacggctacatagaaaaatccaccccttacgagtgcggcttcgaccctatatcccccgcccgcgtccctttctccataaaattcttcttagtagctattaccttcttattatttgatctagaaattgccctccttttacccctaccatgagccctacaaacaactaacctgccactaatagttatgtcatccctcttattaatcatcatcctagccctaagtctggcctatgagtgactacaaaaaggattagactgaaccgaattggtatatagtttaaacaaaacgaatgatttcgactcattaaattatgataatcatatttaccaaatgcccctcatttacataaatattatactagcatttaccatctcacttctaggaatactagtatatcgctcacacctcatatcctccctactatgcctagaaggaataatactatcgctgttcattatagctactctcataaccctcaacacccactccctcttagccaatattgtgcctattgccatactagtctttgccgcctgcgaagcagcggtgggcctagccctactagtctcaatctccaacacatatggcctagactacgtacataacctaaacctactccaatgctaaaactaatcgtcccaacaattatattactaccactgacatgactttccaaaaaacacataatttgaatcaacacaaccacccacagcctaattattagcatcatccctctactattttttaaccaaatcaacaacaacctatttagctgttccccaaccttttcctccgaccccctaacaacccccctcctaatactaactacctgactcctacccctcacaatcatggcaagccaacgccacttatccagtgaaccactatcacgaaaaaaactctacctctctatactaatctccctacaaatctccttaattataacattcacagccacagaactaatcatattttatatcttcttcgaaaccacacttatccccaccttggctatcatcacccgatgaggcaaccagccagaacgcctgaacgcaggcacatacttcctattctacaccctagtaggctcccttcccctactcatcgcactaatttacactcacaacaccctaggctcactaaacattctactactcactctcactgcccaagaactatcaaactcctgagccaacaacttaatatgactagcttacacaatagcttttatagtaaagatacctctttacggactccacttatgactccctaaagcccatgtcgaagcccccatcgctgggtcaatagtacttgccgcagtactcttgaaactaggcggctatggtataatacgcctcacactcattctcaaccccctgacaaaacacatagcctaccccttccttgtactatccctatgaggcataattataacaagctccatctgcctacgacaaacagacctaaaatcgctcattgcatactcttcaatcagccacatagccctcgtagtaacagccattctcatccaaaccccctgaagcttcaccggcgcagtcattctcataatcgcccacggacttacatcctcattactattctgcctagcaaactcaaactacgaacgcactcacagtcgcatcataatcctctctcaaggacttcaaactctactcccactaatagctttttgatgacttctagcaagcctcgctaacctcgccttaccccccactattaacctactgggagaactctctgtgctagtaaccacgttctcctgatcaaatatcactctcctacttacaggactcaacatactagtcacagccctatactccctctacatatttaccacaacacaatggggctcactcacccaccacattaacaacataaaaccctcattcacacgagaaaacaccctcatgttcatacacctatcccccattctcctcctatccctcaaccccgacatcattaccgggttttcctcttgtaaatatagtttaaccaaaacatcagattgtgaatctgacaacagaggcttacgaccccttatttaccgagaaagctcacaagaactgctaactcatgcccccatgtctaacaacatggctttctcaacttttaaaggataacagctatccattggtcttaggccccaagaattttggtgcaactccaaataaaagtaataaccatgcacactactataaccaccctaaccctaacttccctaattccccccatccttaccaccctcgttaaccctaacaaaaaaaactcatacccccattatgtaaaatccattgtcgcatccacctttattatcagtctcttccccacaacaatattcatgtgcctagaccaagaagttattatctcgaactgacactgagccacaacccaaacaacccagctctccctaagcttcaaactggactacttctccataatattcatccctgtagcattgttcgttacatggtccatcatagaattctcactgtgatatataaactcagacccaaacattaatcagttcttcaaatatctactcatcttcctaattaccatactaatcttagttaccgctaacaacctattccaactgttcatcggctgagagggcgtaggaattatatccttcttgctcatcagttgatgatacgcccgagcagatgccaacacagcagccattcaagcaatcctatacaaccgtatcggcgatatcggtttcatcctcgccttagcatgatttatcctacactccaactcatgagacccacaacaaatagcccttctaaacgctaatccaagcctcaccccactactaggcctcctcctagcagcagcaggcaaatcagcccaattaggtctccacccctgactcccctcagccatagaaggccccaccccagtctcagccctactccactcaagcactatagttgtagcaggaatcttcttactcatccgcttccaccccctagcagaaaatagcccactaatccaaactctaacactatgcttaggcgctatcaccactctgttcgcagcagtctgcgcccttacacaaaatgacatcaaaaaaatcgtagccttctccacttcaagtcaactaggactcataatagttacaatcggcatcaaccaaccacacctagcattcctgcacatctgtacccacgccttcttcaaagccatactatttatgtgctccgggtccatcatccacaaccttaacaatgaacaagatattcgaaaaataggaggactactcaaaaccatacctctcacttcaacctccctcaccattggcagcctagccttagcaggaatacctttcctcacaggtttctactccaaagaccacatcatcgaaaccgcaaacatatcatacacaaacgcctgagccctatctattactctcatcgctacctccctgacaagcgcctatagcactcgaataatccttctcaccctaacaggtcaacctcgcttccccacccttactaacattaacgaaaataaccccaccctactaaaccccattaaacgcctggcagccggaagcctattcgcaggatttctcattactaacaacatttcccccgcatcccccttccaaacaacaatccccctctacctaaaactcacagccctcgctgtcactttcctaggacttctaacagccctagacctcaactacctaaccaacaaacttaaaataaaatccccactatgcacattttatttctccaacatactcggattctaccctagcatcacacaccgcacaatcccctatctaggccttcttacgagccaaaacctgcccctactcctcctagacctaacctgactagaaaagctattacctaaaacaatttcacagcaccaaatctccacctccatcatcacctcaacccaaaaaggcataattaaactttacttcctctctttcttcttcccactcatcctaaccctactcctaatcacataacctattcccccgagcaatctcaattacaatatatacaccaacaaacaatgttcaaccagtaactactactaatcaacgcccataatcatacaaagcccccgcaccaataggatcctcccgaatcaaccctgacccctctccttcataaattattcagcttcctacactattaaagtttaccacaaccaccaccccatcatactctttcacccacagcaccaatcctacctccatcgctaaccccactaaaacactcaccaagacctcaacccctgacccccatgcctcaggatactcctcaatagccatcgctgtagtatatccaaagacaaccatcattccccctaaataaattaaaaaaactattaaacccatataacctcccccaaaattcagaataataacacacccgaccacaccgctaacaatcaatactaaacccccataaataggagaaggcttagaagaaaaccccacaaaccccattactaaacccacactcaacagaaacaaagcatacatcattattctcgcacggactacaaccacgaccaatgatatgaaaaaccatcgttgtatttcaactacaagaacaccaatgaccccaatacgcaaaattaaccccctaataaaattaattaaccgctcattcatcgacctccccaccccatccaacatctccgcatgatgaaacttcggctcactccttggcgcctgcctgatcctccaaatcaccacaggactattcctagccatgcactactcaccagacgcctcaaccgccttttcatcaatcgcccacatcactcgagacgtaaattatggctgaatcatccgctaccttcacgccaatggcgcctcaatattctttatctgcctcttcctacacatcgggcgaggcctatattacggatcatttctctactcagaaacctgaaacatcggcattatcctcctgcttgcaactatagcaacagccttcataggctatgtcctcccgtgaggccaaatatcattctgaggggccacagtaattacaaacttactatccgccatcccatacattggggcagacctagttcaatgaatctgaggaggctactcagtagacagtcccaccctcacacgattctttacctttcacttcatcttgcccttcattattgcagccctagcagcactccacctcctattcttgcacgaaacgggatcaaacaaccccctaggaatcacctcccattccgataaaatcaccttccacccttactacacaatcaaagacgccctcggcttacttctcttccttctctccttaatgacattaacactattctcaccagacctcctaggcgacccagacaactataccctagccaaccccttaaacacccctccccacatcaagcccgaatgatatttcctattcgcctacacaattctccgatccgtccctaacaaactaggaggcgtccttgccctattactatccatcctcatcctagcaataatccccatcctccatatatccaaacaacaaagcataatatttcgcccactaagccaatcactttattgactcctagccgcagacctcctcattctaacctgaatcggaggacaaccagtaagctacccttttaccatcattggacaagtagcatccgtactatacttcacaacaatcctaatcctaataccaactatctccctaattgaaaacaaaatactcaaatgggcctgtccttgtagtataaactaatacaccagtcttgtaaaccggagatgaaaacctttttccaaggacaaatcagagaaaaagtctttaactccaccattagcacccaaagctaagattctaatttaaactattctctgttctttcatggggaagcagatttgggtaccacccaagtattgactcacccatcaacaaccgctatgtatttcgtacattactgccagccaccatgaatattgtacggtaccataaatacttgaccacctgtagtacataaaaacccaatccacatcaaaaccccctcctcatgcttacaagcaagtacagcaatcaaccctcaactatcacacatcaactgcaactccaaagtcacccctcacccattaggataccaacaaacctactcacccttaacagtacatagtacataaagccatttaccgtacatagcacattacagtcaaatcccttctcgtccccatggatgacccccctcagataggggtcccttggccaccatcctccgtgaaatcaatatcccgcacaagagtgctactctcctcgctccgggcccataacacttgggggtagctaaagtgaactgtatccgacatctggttcctacttcagggtcataaagcctaaatagcccacacgttccccttaaataagacatcacgatg

SEQ ID NO: 313 - DNA, 16571 bp, Homo sapiens mitochondrial
  3109: "n" refers to a nucleotide at position 3107 of the Cambridge Reference Sequence (CRS, Anderson et al. 1981 Nature 290:457-465), later determined to be absent from the human mtDNA sequence according to the revised CRS (rCRS, Andrews et al. 1999 Nature Genetics 23:147); "n" therefore represents a single nucleotide deletion at a position corresponding to nucleotide 3107 of SEQ ID NO:1 as provided herein.
gatcacaggtctatcaccctattaaccactcacgggagctctccatgcatttggtattttcgtctggggggtatgcacgcgatagcattgcgagacgctggagccggagcaccctatgtcgcagtatctgtctttgattcctgcctcatcctattatttatcgcacctacgttcaatattacaggcgaacatacttactaaagtgtgttaattaattaatgcttgtaggacataataataacaattgaatgtctgcacagccgctttccacacagacatcataacaaaaaatttccaccaaaccccccctcccccccgcttctggccacagcacttaaacacatctctgccaaaccccaaaaacaaagaaccctaacaccagcctaaccagatttcaaattttatcttttggcggtatgcacttttaacagtcaccccccaactaacacattattttcccctcccactcccatactactaacctcatcaatacaacccccgcccatcctacccagcacacacacaccgctgctaaccccataccccgaaccaaccaaaccccaaagacaccccccacagtttatgtagcttacctcctcaaagcaatacactgaaaatgtttagacgggctcacatcaccccataaacaaataggtttggtcctagcctttctattagctcttagtaagattacacatgcaagcatccccgttccagtgagttcaccctctaaatcaccacgatcaaaagggacaagcatcaagcacgcagcaatgcagctcaaaacgcttagcctagccacacccccacgggaaacagcagtgattaacctttagcaataaacgaaagtttaactaagctatactaaccccagggttggtcaatttcgtgccagccaccgcggtcacacgattaacccaagtcaatagaagccggcgtaaagagtgttttagatcaccccctccccaataaagctaaaactcacctgagttgtaaaaaactccagttgacacaaaatagactacgaaagtggctttaacatatctgaacacacaatagctaagacccaaactgggattagataccccactatgcttagccctaaacctcaacagttaaatcaacaaaactgctcgccagaacactacgagccacagcttaaaactcaaaggacctggcggtgcttcatatccctctagaggagcctgttctgtaatcgataaaccccgatcaacctcaccacctcttgctcagcctatataccgccatcttcagcaaaccctgatgaaggctacaaagtaagcgcaagtacccacgtaaagacgttaggtcaaggtgtagcccatgaggtggcaagaaatgggctacattttctaccccagaaaactacgatagcccttatgaaacttaagggtcgaaggtggatttagcagtaaactgagagtagagtgcttagttgaacagggccctgaagcgcgtacacaccgcccgtcaccctcctcaagtatacttcaaaggacatttaactaaaacccctacgcatttatatagaggagacaagtcgtaacatggtaagtgtactggaaagtgcacttggacgaaccagagtgtagcttaacacaaagcacccaacttacacttaggagatttcaacttaacttgaccgctctgagctaaacctagccccaaacccactccaccttactaccagacaaccttagccaaaccatttacccaaataaagtataggcgatagaaattgaaacctggcgcaatagatatagtaccgcaagggaaagatgaaaaattataaccaagcataatatagcaaggactaacccctataccttctgcataatgaattaactagaaataactttgcaaggagagccaaagctaagacccccgaaaccagacgagctacctaagaacagctaaaagagcacacccgtctatgtagcaaaatagtgggaagatttataggtagaggcgacaaacctaccgagcctggtgatagctggttgtccaagatagaatcttagttcaactttaaatttgcccacagaaccctctaaatccccttgtaaatttaactgttagtccaaagaggaacagctctttggacactaggaaaaaaccttgtagagagagtaaaaaatttaacacccatagtaggcctaaaagcagccaccaattaagaaagcgttcaagctcaacacccactacctaaaaaatcccaaacatataactgaactcctcacacccaattggaccaatctatcaccctatagaagaactaatgttagtataagtaacatgaaaacattctcctccgcataagcctgcgtcagattaaaacactgaactgacaattaacagcccaatatctacaatcaaccaacaagtcattattaccctcactgtcaacccaacacaggcatgctcataaggaaaggttaaaaaaagtaaaaggaactcggcaaatcttaccccgcctgtttaccaaaaacatcacctctagcatcaccagtattagaggcaccgcctgcccagtgacacatgtttaacggccgcggtaccctaaccgtgcaaaggtagcataatcacttgttccttaaatagggacctgtatgaatggctccacgagggttcagctgtctcttacttttaaccagtgaaattgacctgcccgtgaagaggcgggcataacacagcaagacgagaagaccctatggagctttaatttattaatgcaaacagtacctaacaaacccacaggtcctaaactaccaaacctgcattaaaaatttcggttggggcgacctcggagcagaacccaacctccgagcagtacatgctaagacttcaccagtcaaagcgaactactatactcaattgatccaataacttgaccaacggaacaagttaccctagggataacagcgcaatcctattctagagtccatatcaacaatagggtttacgacctcgatgttggatcaggacatcccgatggtgcagccgctattaaaggttcgtttgttcaacgattaaagtcctacgtgatctgagttcagaccggagtaatccaggtcggtttctatctacnttcaaattcctccctgtacgaaaggacaagagaaataaggcctacttcacaaagcgccttcccccgtaaatgatatcatctcaacttagtattatacccacacccacccaagaacagggtttgttaagatggcagagcccggtaatcgcataaaacttaaaactttacagtcagaggttcaattcctcttcttaacaacatacccatggccaacctcctactcctcattgtacccattctaatcgcaatggcattcctaatgcttaccgaacgaaaaattctaggctatatacaactacgcaaaggccccaacgttgtaggcccctacgggctactacaacccttcgctgacgccataaaactcttcaccaaagagcccctaaaacccgccacatctaccatcaccctctacatcaccgccccgaccttagctctcaccatcgctcttctactatgaacccccctccccatacccaaccccctggtcaacctcaacctaggcctcctatttattctagccacctctagcctagccgtttactcaatcctctgatcagggtgagcatcaaactcaaactacgccctgatcggcgcactgcgagcagtagcccaaacaatctcatatgaagtcaccctagccatcattctactatcaacattactaataagtggctcctttaacctctccacccttatcacaacacaagaacacctctgattactcctgccatcatgacccttggccataatatgatttatctccacactagcagagaccaaccgaacccccttcgaccttgccgaaggagagtccgaactagtctcaggcttcaacatcgaatacgccgcaggccccttcgccctattcttcatagccgaatacacaaacattattataataaacaccctcaccactacaatcttcctaggaacaacatatgacgcactctcccctgaactctacacaacatattttgtcaccaagaccctacttctaacctccctgttcttatgaattcgaacagcatacccccgattccgctacgaccaactcatacacctcctatgaaaaaacttcctaccactcaccctagcattacttatatgatatgtctccatacccattacaatctccagcattccccctcaaacctaagaaatatgtctgataaaagagttactttgatagagtaaataataggagcttaaacccccttatttctaggactatgagaatcgaacccatccctgagaatccaaaattctccgtgccacctatcacaccccatcctaaagtaaggtcagctaaataagctatcgggcccataccccgaaaatgttggttatacccttcccgtactaattaatcccctggcccaacccgtcatctactctaccatctttgcaggcacactcatcacagcgctaagctcgcactgattttttacctgagtaggcctagaaataaacatgctagcttttattccagttctaaccaaaaaaataaaccctcgttccacagaagctgccatcaagtatttcctcacgcaagcaaccgcatccataatccttctaatagctatcctcttcaacaatatactctccggacaatgaaccataaccaatactaccaatcaatactcatcattaataatcataatggctatagcaataaaactaggaatagccccctttcacttctgagtcccagaggttacccaaggcacccctctgacatccggcctgcttcttctcacatgacaaaaactagcccccatctcaatcatataccaaatctctccctcactaaacgtaagccttctcctcactctctcaatcttatccatcatagcaggcagttgaggtggattaaaccaaacccagctacgcaaaatcttagcatactcctcaattacccacataggatgaataatagcagttctaccgtacaaccctaacataaccattcttaatttaactatttatattatcctaactactaccgcattcctactactcaacttaaactccagcaccacgaccctactactatctcgcacctgaaacaagctaacatgactaacacccttaattccatccaccctcctctccctaggaggcctgcccccgctaaccggctttttgcccaaatgggccattatcgaagaattcacaaaaaacaatagcctcatcatccccaccatcatagccaccatcaccctccttaacctctacttctacctacgcctaatctactccacctcaatcacactactccccatatctaacaacgtaaaaataaaatgacagtttgaacatacaaaacccaccccattcctccccacactcatcgcccttaccacgctactcctacctatctccccttttatactaataatcttatagaaatttaggttaaatacagaccaagagccttcaaagccctcagtaagttgcaatacttaatttctgtaacagctaaggactgcaaaaccccactctgcatcaactgaacgcaaatcagccactttaattaagctaagcccttactagaccaatgggacttaaacccacaaacacttagttaacagctaagcaccctaatcaactggcttcaatctacttctcccgccgccgggaaaaaaggcgggagaagccccggcaggtttgaagctgcttcttcgaatttgcaattcaatatgaaaatcacctcggagctggtaaaaagaggcctaacccctgtctttagatttacagtccaatgcttcactcagccattttacctcacccccactgatgttcgccgaccgttgactattctctacaaaccacaaagacattggaacactatacctattattcggcgcatgagctggagtcctaggcacagctctaagcctccttattcgagccgagctgggccagccaggcaaccttctaggtaacgaccacatctacaacgttatcgtcacagcccatgcatttgtaataatcttcttcatagtaatacccatcataatcggaggctttggcaactgactagttcccctaataatcggtgcccccgatatggcgtttccccgcataaacaacataagcttctgactcttacctccctctctcctactcctgctcgcatctgctatagtggaggccggagcaggaacaggttgaacagtctaccctcctttagcagggaactactcccaccctggagcctccgtagacctaaccatcttctccttacacctagcaggtgtctcctctatcttaggggccatcaatttcatcacaacaattatcaatataaaaccccctgccataacccaataccaaacgcccctcttcgtctgatccgtcctaatcacagcagtcctacttctcctatctctcccagtcctagctgctggcatcactatactactaacagaccgcaacctcaacaccaccttcttcgaccccgccggaggaggagaccccattctataccaacacctattctgatttttcggtcaccctgaagtttatattcttatcctaccaggcttcggaataatctcccatattgtaacttactactccggaaaaaaagaaccatttggatacataggtatggtctgagctatgatatcaattggcttcctagggtttatcgtgtgagcacaccatatatttacagtaggaatagacgtagacacacgagcatatttcacctccgctaccataatcatcgctatccccaccggcgtcaaagtatttagctgactcgccacactccacggaagcaatatgaaatgatctgctgcagtgctctgagccctaggattcatctttcttttcaccgtaggtggcctgactggcattgtattagcaaactcatcactagacatcgtactacacgacacgtactacgttgtagcccacttccactatgtcctatcaataggagctgtatttgccatcataggaggcttcattcactgatttcccctattctcaggctacaccctagaccaaacctacgccaaaatccatttcactatcatattcatcggcgtaaatctaactttcttcccacaacactttctcggcctatccggaatgccccgacgttactcggactaccccgatgcatacaccacatgaaacatcctatcatctgtaggctcattcatttctctaacagcagtaatattaataattttcatgatttgagaagccttcgcttcgaagcgaaaagtcctaatagtagaagaaccctccataaacctggagtgactatatggatgccccccaccctaccacacattcgaagaacccgtatacataaaatctagacaaaaaaggaaggaatcgaaccccccaaagctggtttcaagccaaccccatggcctccatgactttttcaaaaaggtattagaaaaaccatttcataactttgtcaaagttaaattataggctaaatcctatatatcttaatggcacatgcagcgcaagtaggtctacaagacgctacttcccctatcatagaagagcttatcacctttcatgatcacgccctcataatcattttccttatctgcttcctagtcctgtatgcccttttcctaacactcacaacaaaactaactaatactaacatctcagacgctcaggaaatagaaaccgtctgaactatcctgcccgccatcatcctagtcctcatcgccctcccatccctacgcatcctttacataacagacgaggtcaacgatccctcccttaccatcaaatcaattggccaccaatggtactgaacctacgagtacaccgactacggcggactaatcttcaactcctacatacttcccccattattcctagaaccaggcgacctgcgactccttgacgttgacaatcgagtagtactcccgattgaagcccccattcgtataataattacatcacaagacgtcttgcactcatgagctgtccccacattaggcttaaaaacagatgcaattcccggacgtctaaaccaaaccactttcaccgctacacgaccgggggtatactacggtcaatgctctgaaatctgtggagcaaaccacagtttcatgcccatcgtcctagaattaattcccctaaaaatctttgaaatagggcccgtatttaccctatagcaccccctctaccccctctagagcccactgtaaagctaacttagcattaaccttttaagttaaagattaagagaaccaacacctctttacagtgaaatgccccaactaaatactaccgtatggcccaccataattacccccatactccttacactattcctcatcacccaactaaaaatattaaacacaaactaccacctacctccctcaccaaagcccataaaaataaaaaattataacaaaccctgagaaccaaaatgaacgaaaatctgttcgcttcattcattgcccccacaatcctaggcctacccgccgcagtactgatcattctatttccccctctattgatccccacctccaaatatctcatcaacaaccgactaatcaccacccaacaatgactaatcaaactaacctcaaaacaaatgataaccatacacaacactaaaggacgaacctgatctcttatactagtatccttaatcatttttattgccacaactaacctcctcggactcctgcctcactcatttacaccaaccacccaactatctataaacctagccatggccatccccttatgagcgggcgcagtgattataggctttcgctctaagattaaaaatgccctagcccacttcttaccacaaggcacacctacaccccttatccccatactagttattatcgaaaccatcagcctactcattcaaccaatagccctggccgtacgcctaaccgctaacattactgcaggccacctactcatgcacctaattggaagcgccaccctagcaatatcaaccattaaccttccctctacacttatcatcttcacaattctaattctactgactatcctagaaatcgctgtcgccttaatccaagcctacgttttcacacttctagtaagcctctacctgcacgacaacacataatgacccaccaatcacatgcctatcatatagtaaaacccagcccatgacccctaacaggggccctctcagccctcctaatgacctccggcctagccatgtgatttcacttccactccataacgctcctcatactaggcctactaaccaacacactaaccatataccaatgatggcgcgatgtaacacgagaaagcacataccaaggccaccacacaccacctgtccaaaaaggccttcgatacgggataatcctatttattacctcagaagtttttttcttcgcaggatttttctgagccttttaccactccagcctagcccctaccccccaattaggagggcactggcccccaacaggcatcaccccgctaaatcccctagaagtcccactcctaaacacatccgtattactcgcatcaggagtatcaatcacctgagctcaccatagtctaatagaaaacaaccgaaaccaaataattcaagcactgcttattacaattttactgggtctctattttaccctcctacaagcctcagagtacttcgagtctcccttcaccatttccgacggcatctacggctcaacattttttgtagccacaggcttccacggacttcacgtcattattggctcaactttcctcactatctgcttcatccgccaactaatatttcactttacatccaaacatcactttggcttcgaagccgccgcctgatactggcattttgtagatgtggtttgactatttctgtatgtctccatctattgatgagggtcttactcttttagtataaatagtaccgttaacttccaattaactagttttgacaacattcaaaaaagagtaataaacttcgccttaattttaataatcaacaccctcctagccttactactaataattattacattttgactaccacaactcaacggctacatagaaaaatccaccccttacgagtgcggcttcgaccctatatcccccgcccgcgtccctttctccataaaattcttcttagtagctattaccttcttattatttgatctagaaattgccctccttttacccctaccatgagccctacaaacaactaacctgccactaatagttatgtcatccctcttattaatcatcatcctagccctaagtctggcctatgagtgactacaaaaaggattagactgaaccgaattggtatatagtttaaacaaaacgaatgatttcgactcattaaattatgataatcatatttaccaaatgcccctcatttacataaatattatactagcatttaccatctcacttctaggaatactagtatatcgctcacacctcatatcctccctactatgcctagaaggaataatactatcgctgttcattatagctactctcataaccctcaacacccactccctcttagccaatattgtgcctattgccatactagtctttgccgcctgcgaagcagcggtgggcctagccctactagtctcaatctccaacacatatggcctagactacgtacataacctaaacctactccaatgctaaaactaatcgtcccaacaattatattactaccactgacatgactttccaaaaaacacataatttgaatcaacacaaccacccacagcctaattattagcatcatccctctactattttttaaccaaatcaacaacaacctatttagctgttccccaaccttttcctccgaccccctaacaacccccctcctaatactaactacctgactcctacccctcacaatcatggcaagccaacgccacttatccagtgaaccactatcacgaaaaaaactctacctctctatactaatctccctacaaatctccttaattataacattcacagccacagaactaatcatattttatatcttcttcgaaaccacacttatccccaccttggctatcatcacccgatgaggcaaccagccagaacgcctgaacgcaggcacatacttcctattctacaccctagtaggctcccttcccctactcatcgcactaatttacactcacaacaccctaggctcactaaacattctactactcactctcactgcccaagaactatcaaactcctgagccaacaacttaatatgactagcttacacaatagcttttatagtaaagatacctctttacggactccacttatgactccctaaagcccatgtcgaagcccccatcgctgggtcaatagtacttgccgcagtactcttaaaactaggcggctatggtataatacgcctcacactcattctcaaccccctgacaaaacacatagcctaccccttccttgtactatccctatgaggcataattataacaagctccatctgcctacgacaaacagacctaaaatcgctcattgcatactcttcaatcagccacatagccctcgtagtaacagccattctcatccaaaccccctgaagcttcaccggcgcagtcattctcataatcgcccacgggcttacatcctcattactattctgcctagcaaactcaaactacgaacgcactcacagtcgcatcataatcctctctcaaggacttcaaactctactcccactaatagctttttgatgacttctagcaagcctcgctaacctcgccttaccccccactattaacctactgggagaactctctgtgctagtaaccacgttctcctgatcaaatatcactctcctacttacaggactcaacatactagtcacagccctatactccctctacatatttaccacaacacaatggggctcactcacccaccacattaacaacataaaaccctcattcacacgagaaaacaccctcatgttcatacacctatcccccattctcctcctatccctcaaccccgacatcattaccgggttttcctcttgtaaatatagtttaaccaaaacatcagattgtgaatctgacaacagaggcttacgaccccttatttaccgagaaagctcacaagaactgctaactcatgcccccatgtctaacaacatggctttctcaacttttaaaggataacagctatccattggtcttaggccccaaaaattttggtgcaactccaaataaaagtaataaccatgtacactactataaccaccctaaccctgacttccctaattccccccatccttaccaccctcgttaaccctaacaaaaaaaactcatacccccattatgtaaaatccattgtcgcatccacctttattatcagtctcttccccacaacaatattcatgtgcctagaccaagaagttattatctcgaactgacactgagccacaacccaaacaacccagctctccctaagcttcaaactagactacttctccataatattcatccctgtagcattgttcgttacatggtccatcatagaattctcactgtgatatataaactcagacccaaacattaatcagttcttcaaatatctactcatcttcctaattaccatactaatcttagttaccgctaacaacctattccaactgttcatcggctgagagggcgtaggaattatatccttcttgctcatcagttgatgatacgcccgagcagatgccaacacagcagccattcaagcaatcctatacaaccgtatcggcgatatcggtttcatcctcgccttagcatgatttatcctacactccaactcatgagacccacaacaaatagcccttctaaacgctaatccaagcctcaccccactactaggcctcctcctagcagcagcaggcaaatcagcccaattaggtctccacccctgactcccctcagccatagaaggccccaccccagtctcagccctactccactcaagcactatagttgtagcaggaatcttcttactcatccgcttccaccccctagcagaaaatagcccactaatccaaactctaacactatgcttaggcgctatcaccactctgttcgcagcagtctgcgcccttacacaaaatgacatcaaaaaaatcgtagccttctccacttcaagtcaactaggactcataatagttacaatcggcatcaaccaaccacacctagcattcctgcacatctgtacccacgccttcttcaaagccatactatttatgtgctccgggtccatcatccacaaccttaacaatgaacaagatattcgaaaaataggaggactactcaaaaccatacctctcacttcaacctccctcaccattggcagcctagcattagcaggaatacctttcctcacaggtttctactccaaagaccacatcatcgaaaccgcaaacatatcatacacaaacgcctgagccctatctattactctcatcgctacctccctgacaagcgcctatagcactcgaataattcttctcaccctaacaggtcaacctcgcttccccacccttactaacattaacgaaaataaccccaccctactaaaccccattaaacgcctggcagccggaagcctattcgcaggatttctcattactaacaacatttcccccgcatcccccttccaaacaacaatccccctctacctaaaactcacagccctcgctgtcactttcctaggacttctaacagccctagacctcaactacctaaccaacaaacttaaaataaaatccccactatgcacattttatttctccaacatactcggattctaccctagcatcacacaccgcacaatcccctatctaggccttcttacgagccaaaacctgcccctactcctcctagacctaacctgactagaaaagctattacctaaaacaatttcacagcaccaaatctccacctccatcatcacctcaacccaaaaaggcataattaaactttacttcctctctttcttcttcccactcatcctaaccctactcctaatcacataacctattcccccgagcaatctcaattacaatatatacaccaacaaacaatgttcaaccagtaactactactaatcaacgcccataatcatacaaagcccccgcaccaataggatcctcccgaatcaaccctgacccctctccttcataaattattcagcttcctacactattaaagtttaccacaaccaccaccccatcatactctttcacccacagcaccaatcctacctccatcgctaaccccactaaaacactcaccaagacctcaacccctgacccccatgcctcaggatactcctcaatagccatcgctgtagtatatccaaagacaaccatcattccccctaaataaattaaaaaaactattaaacccatataacctcccccaaaattcagaataataacacacccgaccacaccgctaacaatcaatactaaacccccataaataggagaaggcttagaagaaaaccccacaaaccccattactaaacccacactcaacagaaacaaagcatacatcattattctcgcacggactacaaccacgaccaatgatatgaaaaaccatcgttgtatttcaactacaagaacaccaatgaccccaatacgcaaaactaaccccctaataaaattaattaaccactcattcatcgacctccccaccccatccaacatctccgcatgatgaaacttcggctcactccttggcgcctgcctgatcctccaaatcaccacaggactattcctagccatgcactactcaccagacgcctcaaccgccttttcatcaatcgcccacatcactcgagacgtaaattatggctgaatcatccgctaccttcacgccaatggcgcctcaatattctttatctgcctcttcctacacatcgggcgaggcctatattacggatcatttctctactcagaaacctgaaacatcggcattatcctcctgcttgcaactatagcaacagccttcataggctatgtcctcccgtgaggccaaatatcattctgaggggccacagtaattacaaacttactatccgccatcccatacattgggacagacctagttcaatgaatctgaggaggctactcagtagacagtcccaccctcacacgattctttacctttcacttcatcttgcccttcattattgcagccctagcagcactccacctcctattcttgcacgaaacgggatcaaacaaccccctaggaatcacctcccattccgataaaatcaccttccacccttactacacaatcaaagacgccctcggcttacttctcttccttctctccttaatgacattaacactattctcaccagacctcctaggcgacccagacaattataccctagccaaccccttaaacacccctccccacatcaagcccgaatgatatttcctattcgcctacacaattctccgatccgtccctaacaaactaggaggcgtccttgccctattactatccatcctcatcctagcaataatccccatcctccatatatccaaacaacaaagcataatatttcgcccactaagccaatcactttattgactcctagccgcagacctcctcattctaacctgaatcggaggacaaccagtaagctacccttttaccatcattggacaagtagcatccgtactatacttcacaacaatcctaatcctaataccaactatctccctaattgaaaacaaaatactcaaatgggcctgtccttgtagtataaactaatacaccagtcttgtaaaccggagatgaaaacctttttccaaggacaaatcagagaaaaagtctttaactccaccattagcacccaaagctaagattctaatttaaactattctctgttctttcatggggaagcagatttgggtaccacccaagtattgactcacccatcaacaaccgctatgtatttcgtacattactgccagccaccatgaatattgtacagtaccataaatacttgaccacctgtagtacataaaaacccaatccacatcaaaaccccccccccatgcttacaagcaagtacagcaatcaaccctcaactatcacacatcaactgcaactccaaagccacccctcacccactaggataccaacaaacctactcacccttaacagtacatagtacataaagccatttaccgtacatagcacattacagtcaaatcccttctcgtccccatggatgacccccctcagataggggtcccttgaccaccatcctccgtgaaatcaatatcccgcacaagagtgctactctcctcgctccgggcccataacacttgggggtagctaaagtgaactgtatccgacatctggttcctacttcagggccataaagcctaaatagcccacacgttccccttaaataagacatcacgatg

SEQ ID NO: 314 - DNA, 16568 bp, Homo sapiens mitochondrial
  3106: "n" refers to a nucleotide at position 3107 of the Cambridge Reference Sequence (CRS, Anderson et al. 1981 Nature 290:457-465), later determined to be absent from the human mtDNA sequence according to the revised CRS (rCRS, Andrews et al. 1999 Nature Genetics 23:147); "n" therefore represents a single nucleotide deletion at a position corresponding to nucleotide 3107 of SEQ ID NO:1 as provided herein.
gatcacaggtctatcaccctattaaccactcacgggagctctccatgcatttggtattttcgtctggggggtatgcacgcgatagcattgcgagacgctggagccggagcaccctatgtcgcagtatctgtctttgattcctgcctcatcctattatttatcgcacctacgttcaatattacaggcgaacatacctactaaagtgtgttaattaattaatgcttgtaggacataataataacaattgaatgtctgcacagccgctttccacacagacatcataacaaaaaatttccaccaaaccccccctcccccgccttctggccacagcacttaaacacatctctgccaaaccccaaaaacaaagaaccctaacaccagcctaaccagatttcaaattttatcttttggcggtatgcacttttaacagtcaccccccaactaacacattattttcccctcccactcccatactactaatctcatcaatacaacccccgcccatcctacccagcacacacaccgctgctaaccccataccccgaaccaaccaaaccccaaagacaccccccacagtttatgtagcttacctcctcaaagcaatacactgaaaatgtttagacgggctcacatcaccccataaacaaataggtttggtcctagcctttctattagctcttagtaagattacacatgcaagcatccccgttccagtgagttcaccctctaaatcaccacgatcaaaagggacaagcatcaagcacgcagcaatgcagctcaaaacgcttagcctagccacacccccacgggaaacagcagtgattaacctttagcaataaacgaaagtttaactaagctatactaaccccagggttggtcaatttcgtgccagccaccgcggtcacacgattaacccaagtcaatagaagccggcgtaaagagtgttttagatcaccccctccccaataaagctaaaactcacctgagttgtaaaaaactccagttgacacaaaatagactacgaaagtggctttaacatatctgaacacacaatagctaagacccaaactgggattagataccccactatgcttagccctaaacctcaacagttaaatcaacaaaactgctcgccagaacactacgagccacagcttaaaactcaaaggacctggcggtgcttcatatccctctagaggagcctgttctgtaatcgataaaccccgatcaacctcaccacctcttgctcagcctatataccgccatcttcagcaaaccctgatgaaggctacaaagtaagcgcaagtacccacgtaaagacgttaggtcaaggtgtagcccatgaggtggcaagaaatgggctacattttctaccccagaaaactacgatagcccttatgaaacttaagggtcgaaggtggatttagcagtaaactgagagtagagtgcttagttgaacagggccctgaagcgcgtacacaccgcccgtcaccctcctcaagtatacttcaaaggacatttaactaaaacccctacgcatttatatagaggagacaagtcgtaacatggtaagtgtactggaaagtgcacttggacgaaccagagtgtagcttaacacaaagcacccaacttacacttaggagatttcaacttaacttgaccgctctgagctaaacctagccccaaacccactccaccttactaccagacaaccttagccaaaccatttacccaaataaagtataggcgatagaaattgaaacctggcgcaatagatatagtaccgcaagggaaagatgaaaaattataaccaagcataatatagcaaggactaacccctataccttctgcataatgaattaactagaaataactttgcaaggagagccaaagctaagacccccgaaaccagacgagctacctaagaacagctaaaagagcacacccgtctatgtagcaaaatagtgggaagatttataggtagaggcgacaaacctaccgagcctggtgatagctggttgtccaagatagaatcttagttcaactttaaatttgcccacagaaccctctaaatccccttgtaaatttaactgttagtccaaagaggaacagctctttggacactaggaaaaaaccttgtagagagagtaaaaaatttaacacccatagtaggcctaaaagcagccaccaattaagaaagcgttcaagctcaacacccactacctaaaaaatcccaaacatataactgaactcctcacacccaattggaccaatctatcaccctatagaagaactaatgttagtataagtaacatgaaaacattctcctccgcataagcctgcgtcagattaaaacactgaactgacaattaacagcccaatatctacaatcaaccaacaagtcattattaccctcactgtcaacccaacacaggcatgctcataaggaaaggttaaaaaaagtaaaaggaactcggcaaatcttaccccgcctgtttaccaaaaacatcacctctagcatcaccagtattagaggcaccgcctgcccagtgacacatgtttaacggccgcggtaccctaaccgtgcaaaggtagcataatcacttgttccttaaatagggacctgtatgaatggctccacgagggttcagctgtctcttacttttaaccagtgaaattgacctgcccgtgaagaggcgggcataacacagcaagacgagaagaccctatggagctttaatttattaatgcaaacagtacctaacaaacccacaggtcctaaactaccaaacctgcattaaaaatttcggttggggcgacctcggagcagaacccaacctccgagcagtacatgctaagacttcaccagtcaaagcgaactactatactcaattgatccaataacttgaccaacggaacaagttaccctagggataacagcgcaatcctattctagagtccatatcaacaatagggtttacgacctcgatgttggatcaggacatcccgatggtgcagccgctattaaaggttcgtttgttcaacgattaaagtcctacgtgatctgagttcagaccggagtaatccaggtcggtttctatctacnttcaaattcctccctgtacgaaaggacaagagaaataaggcctacttcacaaagcgccttcccccgtaaatgatatcatctcaacttagtattatacccacacccacccaagaacagggtttgttaagatggcagagcccggtaatcgcataaaacttaaaactttacagtcagaggttcaattcctcttcttaacaacatacccatggccaacctcctactcctcattgtacccattctaatcgcaatggcattcctaatgcttaccgaacgaaaaattctaggctatatacaactacgcaaaggccccaacgttgtaggcccctacgggctactacaacccttcgctgacgccataaaactcttcaccaaagagcccctaaaacccgccacatctaccatcaccctctacatcaccgccccgaccttagctctcaccatcgctcttctactatgaacccccctccccatacccaaccccctggtcaacctcaacctaggcctcctatttattctagccacctctagcctagccgtttactcaatcctctgatcagggtgagcatcaaactcaaactacgccctgatcggcgcactgcgagcagtagcccaaacaatctcatatgaagtcaccctagccatcattctactatcaacattactaataagtggctcctttaacctctccacccttatcacaacacaagaacacctctgattactcctgccatcatgacccttggccataatatgatttatctccacactagcagagaccaaccgaacccccttcgaccttgccgaaggggagtccgaactagtctcaggcttcaacatcgaatacgccgcaggccccttcgccctattcttcatagccgaatacataaacattattataataaacaccctcaccactgcaatcttcctaggaacaacatatgacgcactctcccctgaactctacacaacatattttgtcaccaagaccctacttctaacctccctgttcttatgaattcgaacagcatacccccgattccgctacgaccaactcatacacctcctatgaaaaaacttcctaccactcaccctagcattacttatatgatatgtctccatacccattacaatctccagcattccccctcaaacctaagaaatatgtctgataaaagagttactttgatagagtaaataataggagcttaaacccccttatttctaggactatgagaatcgaacccatccctgagaatccaaaattctccgtgccacctatcacaccccatcctaaagtaaggtcagctaaataagctatcgggcccataccccgaaaatgttggttatacccttcccgtactaattaatcccctggcccaacccgtcatctactctaccatctttgcaggcacactcatcacagcgctaagctcgcactgattttttacctgagtaggcctagaaataaacatgctagcttttattccagttctaaccaaaaaaataaaccctcgttccacagaagctgccatcaagtatttcctcacgcaagcaaccgcatccataatccttctaatagctatcctcttcaacaatatactctccggacaatgaaccataaccaatactaccaatcaatactcatcattaataatcataatggctatagcaataaaactaggaatagccccctttcacttctgagtcccagaggttacccaaggcacccctctgacatccggcctgcttcttctcacatgacaaaaactagcccccatctcaatcatataccaaatctctccctcactaaacgtaagccttctcctcactctctcaatcttatccatcatagcaggcagttgaggtggattaaaccaaacccagctacgcaaaatcctagcatactcctcaattacccacataggatgaataatagcagttctaccgtacaaccctaacataaccattcttaatttaactatttatattatcctaactactaccgcattcctactactcaacttaaactccagcaccacgaccctactactatctcgcacctgaaacaagctaacatgactaacacccttaattccatccaccctcctctccctaggaggcctgcccccgctaaccggctttttgcccaaatgggccattatcgaagaattcacaaaaaacaatagcctcatcatccccaccatcatagccaccatcaccctccttaacctctacttctacctacgcctaatctactccacctcaatcacactactccccatatctaacaacgtaaaaataaaatgacagtttgaacatacaaaacccaccccattcctccccacactcatcgcccttaccacgctactcctacctatctccccttttatactaataatcttatagaaatttaggttaaatacagaccaagagccttcaaagccctcagtaagttgcaatacttaatttctgtaacagctaaggactgcaaaaccccactctgcatcaactgaacgcaaatcagccactttaattaagctaagcccttactagaccaatgggacttaaacccacaaacacttagttaacagctaagcaccctaatcaactggcttcaatctacttctcccgccgccgggaaaaaaggcgggagaagccccggcaggtttgaagctgcttcttcgaatttgcaattcaatatgaaaatcacctcggagctggtaaaaagaggcctaacccctgtctttagatttacagtccaatgcttcactcagccattttacctcacccccactgatgttcgccgaccgttgactattctctacaaaccacaaagacattggaacactatacctattattcggcgcatgagctggagtcctaggcacagctctaagcctccttattcgagccgagctgggccagccaggcaaccttctaggtaacgaccacatctacaacgttatcgtcacagcccatgcatttgtaataatcttcttcatagtaatacccatcataatcggaggctttggcaactgactagttcccctaataatcggtgcccccgatatggcgtttccccgcataaacaacataagcttctgactcttacctccctctctcctactcctgctcgcatctgctatagtggaggccggagcaggaacaggttgaacagtctaccctcccttagcagggaactactcccaccctggagcctccgtagacctaaccatcttctccttacacctagcaggtgtctcctctatcttaggggccatcaatttcatcacaacaattatcaatataaaaccccctgccataacccaataccaaacgcccctcttcgtctgatccgtcctaatcacagcagtcctacttctcctatctctcccagtcctagctgctggcatcactatactactaacagaccgcaacctcaacaccaccttcttcgaccccgccggaggaggagaccccattctataccaacacctattctgatttttcggtcaccctgaagtttatattcttatcctaccaggcttcggaataatctcccatattgtaacttactactccggaaaaaaagaaccatttggatacataggtatggtctgagctatgatatcaattggcttcctagggtttatcgtgtgagcacaccatatatttacagtaggaatagacgtagacacacgagcatatttcacctccgctaccataatcatcgctatccccaccggcgtcaaagtatttagctgactcgccacactccacggaagcaatatgaaatgatctgctgcagtgctctgagccctaggattcatctttcttttcaccgtaggtggcctgactggcattgtattagcaaactcatcactagacatcgtactacacgacacgtactacgttgtagcccacttccactatgtcctatcaataggagctgtatttgccatcataggaggcttcattcactgatttcccctattctcaggctacaccctagaccaaacctacgccaaaatccatttcactatcatattcatcggcgtaaatctaactttcttcccacaacactttctcggcctatccggaatgccccgacgttactcggactaccccgatgcatacaccacatgaaacatcctatcatctgtaggctcattcatttctctaacagcagtaatattaataattttcatgatttgagaagccttcgcttcgaagcgaaaagtcctaatagtagaagaaccctccataaacctggagtgactatatggatgccccccaccctaccacacattcgaagaacccgtatacataaaatctagacaaaaaaggaaggaatcgaaccccccaaagctggtttcaagccaaccccatggcctccatgactttttcaaaaaggtattagaaaaaccatttcataactttgtcaaagttaaattataggctaaatcctatatatcttaatggcacatgcagcgcaagtaggtctacaagacgctacttcccctatcatagaagagcttatcacctttcatgatcacgccctcataatcattttccttatctgcttcctagtcctgtatgcccttttcctaacactcacaacaaaactaactaatactaacatctcagacgctcaggaaatagaaaccgtctgaactatcctgcccgccatcatcctagtcctcatcgccctcccatccctacgcatcctttacataacagacgaggtcaacgatccctcccttaccatcaaatcaattggccaccaatggtactgaacctacgagtacaccgactacggcggactaatcttcaactcctacatacttcccccattattcctagaaccaggcgacctgcgactccttgacgttgacaatcgagtagtactcccgattgaagcccccattcgtataataattacatcacaagacgtcttgcactcatgagctgtccccacattaggcttaaaaacagatgcaattcccggacgtctaaaccaaaccactttcaccgctacacgaccgggggtatactacggtcaatgctctgaaatctgtggagcaaaccacagtttcatgcccatcgtcctagaattaattcccctaaaaatctttgaaatagggcccgtatttaccctataacaccccctctaccccctctagagcccactgtaaagctaacttagcattaaccttttaagttaaagattaagagaaccaacacctctttacagtgaaatgccccaactaaatactaccgtatggcccaccataattacccccatactccttacactattcctcatcacccaactaaaaatattaaacacaaactaccacctacctccctcaccaaagcccataaaaataaaaaattataacaaaccctgagaaccaaaatgaacgaaaatctgttcgcttcattcattgcccccacaatcctaggcctacccgccgcagtactgatcattctatttccccctctattgatccccacctccaaatatctcatcaacaaccgactaatcaccacccaacaatgactaatcaaactaacctcaaaacaaatgataaccatacacaacactaaaggacgaacctgatctcttatactagtatccttaatcatttttattgccacaactaacctcctcggactcctgcctcactcatttacaccaaccacccaactatctataaacctagccatggccatccccttatgagcgggcgcagtgattataggctttcgctctaagattaaaaatgccctagcccacttcttaccacaaggcacacctacaccccttatccccatactagttattatcgaaaccatcagcctactcattcaaccaatagccctggccgtacgcctaaccgctaacattactgcaggccacctactcatgcacctaattggaagcgccaccctagcaatatcaaccattaaccttccctctacacttatcatcttcacaattctaattctactaactatcctagaaatcgctgtcgccttaatccaagcctacgttttcacacttctagtaagcctctacctgcacgacaacacataatgacccaccaatcacatgcctatcatatagtaaaacccagcccatgacccctaacaggggccctctcagccctcctaatgacctccggcctagccatgtgatttcacttccactccataacgctcctcatactaggcctactaaccaacacactaaccatataccaatgatggcgcgatgtaacacgagaaagcacataccaaggccaccacacaccacctgtccaaaaaggccttcgatacgggataatcctatttattacctcagaagtttttttcttcgcaggatttttctgagccttttaccactccagcctagcccctaccccccaattaggagggcactggcccccaacaggcatcaccccgctaaatcccctagaagtcccactcctaaacacatccgtattactcgcatcaggagtatcaatcacctgagctcaccatagtctaatagaaaacaaccgaaaccaaataattcaagcactgcttattacaattttactgggtctctattttaccctcctacaagcctcagagtacttcgagtctcccttcaccatttccgacggcatctacggctcaacattttttgtagccacaggcttccacggacttcacgtcattattggctcaactttcctcactatctgcttcatccgccaactaatatttcactttacatccaaacatcactttggcttcgaagccgccgcctgatactggcattttgtagatgtggtttgactatttctgtatgtctccatctattgatgagggtcttactcttttagtataaatagtaccgttaacttccaattaactagttttgacaacattcaaaaaagagtaataaacttcgccttaattttaataatcaacaccctcctagccttactactaataattattacattttgactaccacaactcaacggctacatagaaaaatccaccccttacgagtgcggcttcgaccctatatcccccgcccgcgtccctttctccataaaattcttcttagtagctattaccttcttattatttgatctagaaattgccctccttttacccctaccatgagccctacaaacaactaacctgccactaatagttatgtcatccctcttattaatcatcatcctagccctaagtctggcctatgagtgactacaaaaaggattagactgaaccgaattggtatatagtttaaacaaaacgaatgatttcgactcattaaattatgataatcatatttaccaaatgcccctcatttacataaatattatactagcatttaccatctcacttctaggaatactagtatatcgctcacacctcatatcctccctactatgcctagaaggaataatactatcgctgttcattatagctactctcataaccctcaacacccactccctcttagccaatattgtgcctattgccatactagtctttgccgcctgcgaagcagcggtgggcctagccctactagtctcaatctccaacacatatggcctagactacgtacataacctaaacctactccaatgctaaaactaatcgtcccaacaattatattactaccactgacatgactttccaaaaaacacataatttgaatcaacacaaccacccacagcctaattattagcatcatccctctactattttttaaccaaatcaacaacaacctatttagctgttccccaaccttttcctccgaccccctaacaacccccctcctaatactaactacctgactcctacccctcacaatcatggcaagccaacgccacttatccagtgaaccactatcacgaaaaaaactctacctctctatactaatctccctacaaatctccttaattataacattcacagccacagaactaatcatattttatatcttcttcgaaaccacacttatccccaccttggctatcatcacccgatgaggcaaccagccagaacgcctgaacgcaggcacatacttcctattctacaccctagtaggctcccttcccctactcatcgcactaatttacactcacaacaccctaggctcactaaacattctactactcactctcactgcccaagaactatcaaactcctgagccaacaacttaatatgactagcttacacaatagcttttatagtaaagatacctctttacggactccacttatgactccctaaagcccatgtcgaagcccccatcgctgggtcaatagtacttgccgcagtactcttaaaactaggcggctatggtataatacgcctcacactcattctcaaccccctgacaaaacacatagcctaccccttccttgtactatccctatgaggcataattataacaagctccatctgcctacgacaaacagacctaaaatcgctcattgcatactcttcaatcagccacatagccctcgtagtaacagccattctcatccaaaccccctgaagcttcaccggcgcagtcattctcataatcgcccacgggcttacatcctcattactattctgcctagcaaactcaaactacgaacgcactcacagtcgcatcataatcctctctcaaggacttcaaactctactcccactaatagctttttgatgacttctagcaagcctcgctaacctcgccttaccccccactattaacctactgggagaactctctgtgctagtaaccacgttctcctgatcaaatatcactctcctacttacaggactcaacatactagtcacagccctatactccctctacatatttaccacaacacaatggggctcactcacccaccacattaacaacataaaaccctcattcacacgagaaaacaccctcatgttcatacacctatcccccattctcctcctatccctcaaccccgacatcattaccgggttttcctcttgtaaatatagtttaaccaaaacatcagattgtgaatctgacaacagaggcttacgaccccttatttaccgagaaagctcacaagaactgctaactcatgcccccatgtctaacaacatggctttctcaacttttaaaggataacagctatccattggtcttaggccccaaaaattttggtgcaactccaaataaaagtaataaccatgcacactactataaccaccctaaccctgacttccctaattccccccatccttaccaccctcgttaaccctaacaaaaaaaactcatacccccattatgtaaaatccattgtcgcatccacctttattatcagtctcttccccacaacaatattcatgtgcctagaccaagaagttattatctcgaactgacactgagccacaacccaaacaacccagctctccctaagcttcaaactagactacttctccataatattcatccctgtagcattgttcgttacatggtccatcatagagttctcactgtgatatataaactcagacccaaacattaatcagttcttcaaatatctactcatcttcctaattaccatactaatcttagttaccgctaacaacctattccaactgttcatcggctgagagggcgtaggaattatatccttcttgctcatcagttgatgatacgcccgagcagatgccaacacagcagccattcaagcaatcctatacaaccgtatcggcgatatcggtttcatcctcgccttagcatgatttatcctacactccaactcatgagacccacaacaaatagcccttctaaacgctaatccaagcctcaccccactactaggcctcctcctagcagcagcaggcaaatcagcccaattaggtctccacccctgactcccctcagccatagaaggccccaccccagtctcagccctactccactcaagcactatagttgtagcaggaatcttcttactcatccgcttccaccccctagcagaaaatagcccactaatccaaactctaacactatgcttaggcgctatcaccactctgttcgcagcagtctgcgcccttacacaaaatgacatcaaaaaaatcgtagccttctccacttcaagtcaactaggactcataatagttacaatcggcatcaaccaaccacacctagcattcctgcacatctgtacccacgccttcttcaaagccatactatttatgtgctccgggtccatcatccacaaccttaacaatgaacaagatattcgaaaaataggaggactactcaaaaccatacctctcacttcaacctccctcaccattggcagcctagcattagcaggaatacctttcctcacaggtttctactccaaagaccacatcatcgaaaccgcaaacatatcatacacaaacgcctgagccctatctattactctcatcgctacctccctgacaagcgcctatagcactcgaataattcttctcaccctaacaggtcaacctcgcttccccacccttactaacattaacgaaaataaccccaccctactaaaccccattaaacgcctggcagccggaagcctattcgcaggatttctcattactaacaacatttcccccgcatcccccttccaaacaacaatccccctctacctaaaactcacagccctcgctgtcactttcctaggacttctaacagccctagacctcaactacctaaccaacaaacttaaaataaaatccccactatgcacattttatttctccaacatactcggattctaccctagcatcacacaccgcacaatcccctatctaggccttcttacgagccaaaacctgcccctactcctcctagacctaacctgactagaaaagctattacctaaaacaatttcacagcaccaaatctccacctccatcatcacctcaacccaaaaaggcataattaaactttacttcctctctttcttcttcccactcatcctaaccctactcctaatcacataacctattcccccgagcaatctcaattacaatatatacaccaacaaacaatgttcaaccagtaactactactaatcaacgcccataatcatacaaagcccccgcaccaataggatcctcccgaatcaaccctgacccctctccttcataaattattcagcttcctacactattaaagtttaccacaaccaccaccccatcatactctttcacccacagtaccaatcctacctccatcgctaaccccactaaaacactcaccaagacctcaacccctgacccccatgcctcaggatactcctcaatagccatcgctgtagtatatccaaagacaaccatcattccccctaaataaattaaaaaaactattaaacccatataacctcccccaaaattcagaataataacacacccgaccacaccactaacaatcaatgctaaacccccataaataggagaaggcttagaagaaaaccccacaaaccccattactaaacccacactcaacagaaacaaagcatacatcattattctcgcacggactacaaccacgaccaatgatatgaaaaaccatcgttgtatttcaactacaagaacaccaatgaccccaatacgcaaaactaaccccctaataaaattaattaaccactcattcatcgacctccccaccccatccaacatctccgcatgatgaaacttcggctcactccttggcgcctgcctgatcctccaaatcaccacaggactattcctagccatgcactactcaccagacgcctcaaccgccttttcatcaatcgcccacatcactcgagacgtaaattatggctgaatcatccgctaccttcacgccaatggcgcctcaatattctttatctgcctcttcctacacatcgggcgaggcctatattacggatcatttctctactcagaaacctgaaacatcggcattatcctcctgcttgcaactatagcaacagccttcataggctatgtcctcccgtgaggccaaatatcattctgaggggccacagtaattacaaacttactatccgccatcccatacattgggacagacctagttcaatgaatctgaggaggctactcagtagacagtcccaccctcacacgattctttacctttcacttcatcttgcccttcattattgcagccctagcagcactccacctcctattcttgcacgaaacgggatcaaacaaccccctaggaatcacctcccattccgataaaatcaccttccacccttactacacaatcaaagacgccctcggcttacttctcttccttctctccttaatgacattaacactattctcaccagacctcctaggcgacccagacaattataccctagccaaccccttaaacacccctccccacatcaagcccgaatgatatttcctattcgcctacacaattctccgatccgtccctaacaaactaggaggcgtccttgccctattactatccatcctcatcctagcaataatccccatcctccatatatccaaacaacaaagcataatatttcgcccactaagccaatcactttattgactcctagccgcagacctcctcattctaacctgaatcggaggacaaccagtaagctacccttttaccatcattggacaagtagcatccgtactatacttcacaacaatcctaatcctaataccaactatctccctaattgaaaacaaaatactcaaatggacctgtccttgtagtataaactaatacaccagtcttgtaaaccggagatgaaaacctttttccaaggacaaatcagagaaaaagtctttaactccaccattagcacccaaagctaagattctaatttaaactattctctgttctttcatggggaagcagatttgggtaccacccaagtattgactcacccatcaacaaccgctatgtatttcgtacattactgccagccaccatgaatattgtacggtaccataaatacttgaccacctgtagtacataaaaacccaatccacatcaaaaccccctccccatgcttacaagcaagtacagcaatcaaccctcaactatcacacatcaattgcaactccaaagccacccctcacccactaggataccaacaaacctacccacccttaacagtacatagtacataaagccatttaccgtacatagcacattacagtcaaatcccttctcgtccccatggatgacccccctcagataggggtcccttgaccaccatcctccgtgaaatcaatatcccgcacaagagtgctactctcctcgctccgggcccataacacttgggggtagctaaagtgaactgtatccgacatctggttcctacttcagggtcataaagcctaaatagcccacacgttccccttaaataagacatcacgatg

SEQ ID NO: 315 - DNA, 16571 bp, Homo sapiens mitochondrial
  3109: "n" refers to a nucleotide at position 3107 of the Cambridge Reference Sequence (CRS, Anderson et al. 1981 Nature 290:457-465), later determined to be absent from the human mtDNA sequence according to the revised CRS (rCRS, Andrews et al. 1999 Nature Genetics 23:147); "n" therefore represents a single nucleotide deletion at a position corresponding to nucleotide 3107 of SEQ ID NO:1 as provided herein.
gatcacaggtctatcaccctattaaccactcacgggagctctccatgcatttggtattttcgtctggggggtatgcacgcgatagcattgcgagacgctggagccggagcaccctatgtcgcagtatctgtctttgattcctgcctcatcctattatttatcgcacctacgttcaatattacaggcgaacatacttactaaagtgtgttaattaattaatgcttgtaggacataataataacaattgaatgtctgcacagccgctttccacacagacatcataacaaaaaatttccaccaaaccccccctcccccccgcttctggccacagcacttaaacacatctctgccaaaccccaaaaacaaagaaccctaacaccagcctaaccagatttcaaattttatcttttggcggtatgcacttttaacagtcaccccccaactaacacattattttcccctcccactcccatactactaatctcatcaatacaacccccgcccatcctacccagcacacacacaccgctgctaaccccataccccgaaccaaccaaaccccaaagacaccccccacagtttatgtagcttacctcctcaaagcaatacactgaaaatgtttagacgggctcacatcaccccataaacaaataggtttggtcctagcctttctattagctcttagtaagattacacatgcaagcatccccgttccagtgagttcaccctctaaatcaccacgatcaaaagggacaagcatcaagcacgcagcaatgcagctcaaaacgcttagcctagccacacccccacgggaaacagcagtgattaacctttagcaataaacgaaagtttaactaagctatactaaccccagggttggtcaatttcgtgccagccaccgcggtcacacgattaacccaagtcaatagaagccggcgtaaagagtgttttaaatcaccccctccccaataaagctaaaactcacctgagttgtaaaaaactccagttgacacaaaatagactacgaaagtggctttaacatatctgaacacacaatagctaagacccaaactgggattagataccccactatgcttagccctaaacctcaacagttaaatcaacaaaactgctcgccagaacactacgagccacagcttaaaactcaaaggacctggcggtgcttcatatccctctagaggagcctgttctgtaatcgataaaccccgatcaacctcaccacctcttgctcagcctatataccgccatcttcagcaaaccctgatgaaggctacaaagtaagcgcaagtacccacgtaaagacgttaggtcaaggtgtagcccatgaggtggcaagaaatgggctacattttctaccccagaaaactacgatagcccttatgaaacttaagggtcgaaggtggatttagcagtaaactaagagtagagtgcttagttgaacagggccctgaagcgcgtacacaccgcccgtcaccctcctcaagtatacttcaaaggacatttaactaaaacccctacgcatttatatagaggagacaagtcgtaacatggtaagtgtactggaaagtgcacttggacgaaccagagtgtagcttaacacaaagcacccaacttacacttaggagatttcaacttaacttgaccgctctgagctaaacctagccccaaacccactccaccttactaccagacaaccttagccaaaccatttacccaaataaagtataggcgatagaaattgaaacctggcgcaatagatatagtaccgcaagggaaagatgaaaaattataaccaagcataatatagcaaggactaacccctataccttctgcataatgaattaactagaaataactttgcaaggagagccaaagctaagacccccgaaaccagacgagctacctaagaacagctaaaagagcacacccgtctatgtagcaaaatagtgggaagatttataggtagaggcgacaaacctaccgagcctggtgatagctggttgtccaagatagaatcttagttcaactttaaatttgcccacagaaccctctaaatccccttgtaaatttaactgttagtccaaagaggaacagctctttggacactaggaaaaaaccttgtagagagagtaaaaaatttaacacccatagtaggcctaaaagcagccaccaattaagaaagcgttcaagctcaacacccactacctaaaaaatcccaaacatataactgaactcctcacacccaattggaccaatctatcaccctatagaagaactaatgttagtataagtaacatgaaaacattctcctccgcataagcctgcgtcagattaaaacactgaactgacaattaacagcccaatatctacaatcaaccaacaagtcattattaccctcactgtcaacccaacacaggcatgctcataaggaaaggttaaaaaaagtaaaaggaactcggcaaatcttaccccgcctgtttaccaaaaacatcacctctagcatcaccagtattagaggcaccgcctgcccagtgacacatgtttaacggccgcggtaccctaaccgtgcaaaggtagcataatcacttgttccttaaatagggacctgtatgaatggctccacgagggttcagctgtctcttacttttaaccagtgaaattgacctgcccgtgaagaggcgggcataacacagcaagacgagaagaccctatggagctttaatttattaatgcaaacagtacctaacaaacccacaggtcctaaactaccaaacctgcattaaaaatttcggttggggcgacctcggagcagaacccaacctccgagcagtacatgctaagacttcaccagtcaaagcgaactactatactcaattgatccaataacttgaccaacggaacaagttaccctagggataacagcgcaatcctattctagagtccatatcaacaatagggtttacgacctcgatgttggatcaggacatcccgatggtgcagccgctattaaaggttcgtttgttcaacgattaaagtcctacgtgatctgagttcagaccggagtaatccaggtcggtttctatctacnttcaaattcctccctgtacgaaaggacaagagaaataaggcctacttcacaaagcgccttcccccgtaaatgatatcatctcaacttagtattatacccacacccacccaagaacagggtttgttaagatggcagagcccggtaatcgcataaaacttaaaactttacagtcagaggttcaattcctcttcttaacaacatacccatggccaacctcctactcctcattgtacccattctaatcgcaatggcattcctaatgcttaccgaacgaaaaattctaggctatatacaactacgcaaaggccccaacgttgtaggcccctacgggctactacaacccttcgctgacgccataaaactcttcaccaaagagcccctaaaacccgccacatctaccatcaccctctacatcaccgccccgaccttagctctcaccatcgctcttctactatgaacccccctccccatacccaaccccctggtcaacctcaacctaggcctcctatttattctagccacctctagcctagccgtttactcaatcctctgatcagggtgagcatcaaactcaaactacgccctgatcggcgcactgcgagcagtagcccaaacaatctcatatgaagtcaccctagccatcattctactatcaacattactaataagtggctcctttaacctctccacccttatcacaacacaagaacacctctgattactcctgccatcatgacccttggccataatatgatttatctccacactagcagagaccaaccgaacccccttcgaccttgccgaaggggagtccgaactagtctcaggcttcaacatcgaatacgccgcaggccccttcgccctattcttcatagccgaatacacaaacattattataataaacaccctcaccactacaatcttcctaggaacaacatatgacgcactctcccctgaactctacacaacatattttgtcaccaagaccctacttctaacctccctgttcttatgaattcgaacagcatacccccgattccgctacgaccaactcatacacctcctatgaaaaaacttcctaccactcaccctagcattacttatatgatatgtctccatacccattacaatctccagcattccccctcaaacctaagaaatatgtctgataaaagagttactttgatagagtaaataataggagcttaaacccccttatttctaggactatgagaatcgaacccatccctgagaatccaaaattctccgtgccacctatcacaccccatcctaaagtaaggtcagctaaataagctatcgggcccataccccgaaaatgttggttatacccttcccgtactaattaatcccctggcccaacccgtcatctactctaccatctttgcaggcacactcatcacagcgctaagctcgcactgattttttacctgagtaggcctagaaataaacatgctagcttttattccagttctaaccaaaaaaataaaccctcgttccacagaagctgccatcaagtatttcctcacgcaagcaaccgcatccataatccttctaatagctatcctcttcaacaatatactctccggacaatgaaccataaccaatactaccaatcaatactcatcattaataatcataatggctatagcaataaaactaggaatagccccctttcacttctgagtcccagaggttacccaaggcacccctctgacatccggcctgcttcttctcacatgacaaaaactagcccccatctcaatcatataccaaatctctccctcactaaacgtaagccttctcctcactctctcaatcttatccatcatagcaggcagttgaggtggattaaaccaaacccagctacgcaaaatcttagcatactcctcaattacccacataggatgaataatagcagttctaccgtacaaccctaacataaccattcttaatttaactatttatattatcctaactactaccgcattcctactactcaacttaaactccagcaccacgaccctactactatctcgcacctgaaacaagctaacatgactaacacccttaattccatccaccctcctctccctaggaggcctgcccccgctaaccggctttttgcccaaatgggccattatcgaagaattcacaaaaaacaatagcctcatcatccccaccatcatagccaccatcaccctccttaacctctacttctacctacgcctaatctactccacctcaatcacactactccccatatctaacaacgtaaaaataaaatgacagtttgaacatacaaaacccaccccattcctccccacactcatcgcccttaccacgctactcctacctatctccccttttatactaataatcttatagaaatttaggttaaatacagaccaagagccttcaaagccctcagtaagttgcaatacttaatttctgtaacagctaaggactgcaaaaccccactctgcatcaactgaacgcaaatcagccactttaattaagctaagcccttactagaccaatgggacttaaacccacaaacacttagttaacagctaagcaccctaatcaactggcttcaatctacttctcccgccgccgggaaaaaaggcgggagaagccccggcaggtttgaagctgcttcttcgaatttgcaattcaatatgaaaatcacctcggagctggtaaaaagaggcctaacccctgtctttagatttacagtccaatgcttcactcagccattttacctcacccccactgatgttcgccgaccgttgactattctctacaaaccacaaagacattggaacactatacctattattcggcgcatgagctggagtcctaggcacagctctaagcctccttattcgagccgagctgggccagccaggcaaccttctaggtaacgaccacatctacaacgttatcgtcacagcccatgcatttgtaataatcttcttcatagtaatacccatcataatcggaggctttggcaactgactagttcccctaataatcggtgcccccgatatggcgtttccccgcataaacaacataagcttctgactcttacctccctctctcctactcctgctcgcatctgctatagtggaagccggagcaggaacaggttgaacagtctaccctcccttagcagggaactactcccaccctggagcctccgtagacctaaccatcttctccttacacctagcaggtgtctcctctatcttaggggccatcaatttcatcacaacaattatcaatataaaaccccctgccataacccaataccaaacgcccctcttcgtctgatccgtcctaatcacagcagtcctacttctcctatctctcccagtcctagctgctggcatcactatactactaacagaccgcaacctcaacaccaccttcttcgaccccgccggaggaggagaccccattctataccaacacctattctgatttttcggtcaccctgaagtttatattcttatcctaccaggcttcggaataatctcccatattgtaacttactactccggaaaaaaagaaccatttggatacataggtatggtctgagctatgatatcaattggcttcctagggtttatcgtgtgagcacaccatatatttacagtaggaatagacgtagacacacgagcatatttcacctccgctaccataatcatcgctatccccaccggcgtcaaagtatttagctgactcgccacactccacggaagcaatatgaaatgatctgctgcagtgctctgagccctaggattcatctttcttttcaccgtaggtggcctgactggcattgtattagcaaactcatcactagacatcgtactacacgacacgtactacgttgtagcccacttccactatgtcctatcaataggagctgtatttgccatcataggaggcttcattcactgatttcccctattctcaggctacaccctagaccaaacctacgccaaaatccatttcactatcatattcatcggcgtaaatctaactttcttcccacaacactttctcggcctatccggaatgccccgacgttactcggactaccccgatgcatacaccacatgaaacatcctatcatctgtaggctcattcatttctctaacagcagtaatattaataattttcatgatttgagaagccttcgcttcgaagcgaaaagtcctaatagtagaagaaccctccataaacctggagtgactatatggatgccccccaccctaccacacattcgaagaacccgtatacataaaatctagacaaaaaaggaaggaatcgaaccccccaaagctggtttcaagccaaccccatggcctccatgactttttcaaaaaggtattagaaaaaccatttcataactttgtcaaagttaaattataggctaaatcctatatatcttaatggcacatgcagcgcaagtaggtctacaagacgctacttcccctatcatagaagagcttatcacctttcatgatcacgccctcataatcattttccttatctgcttcctagtcctgtatgcccttttcctaacactcacaacaaaactaactaatactaacatctcagacgctcaggaaatagaaaccgtctgaactatcctgcccgccatcatcctagtcctcatcgccctcccatccctacgcatcctttacataacagacgaggtcaacgatccctcccttaccatcaaatcaattggccaccaatggtactgaacctacgagtacaccgactacggcggactaatcttcaactcctacatacttcccccattattcctagaaccaggcgacctgcgactccttgacgttgacaatcgagtagtactcccgattgaagcccccattcgtataataattacatcacaagacgtcttgcactcatgagctgtccccacattaggcttaaaaacagatgcaattcccggacgtctaaaccaaaccactttcaccgctacacgaccgggggtatactacggtcaatgctctgaaatctgtggagcaaaccacagtttcatgcccatcgtcctagaattaattcccctaaaaatctttgaaatagggcccgtatttaccctatagcaccccctctaccccctctagagcccactgtaaagctaacttagcattaaccttttaagttaaagattaagagaaccaacacctctttacagtgaaatgccccaactaaatactaccgtatggcccaccataattacccccatactccttacactattcctcatcacccaactaaaaatattaaacacaaactaccacctacctccctcaccaaagcccataaaaataaaaaattataacaaaccctgagaaccaaaatgaacgaaaatctgttcgcttcattcattgcccccacaatcctaggcctacccgccgcagtactgatcattctatttccccctctattgatccccacctccaaatatctcatcaacaaccgactaatcaccacccaacaatgactaatcaagctaacctcaaaacaaatgataaccatacacaacactaaaggacgaacctgatctcttatactagtatccttaatcatttttattgccacaactaacctcctcggactcctgcctcactcatttacaccaaccacccaactatctataaacctagccatggccatccccttatgagcgggcgcagtgattataggctttcgctctaagattaaaaatgccctagcccacttcttaccacaaggcacacctacaccccttatccccatactagttattatcgaaaccatcagcctactcattcaaccaatagccctggccgtacgcctaaccgctaacattactgcaggccacctactcatgcacctaattggaagcgccaccctagcaatatcaaccattaaccttccctctacacttatcatcttcacaattctaattctactgactatcctagaaatcgctgtcgccttaatccaagcctacgttttcacacttctagtaagcctctacctgcacgacaacacataatgacccaccaatcacatgcctatcatatagtaaaacccagcccatgacccctaacaggggccctctcagccctcctaatgacctccggcctagccatgtgatttcacttccactccataacgctcctcatactaggcctactaaccaacacactaaccatataccaatgatggcgcgatgtaacacgagaaagcacataccaaggccaccacacaccacctgtccaaaaaggccttcgatacgggataatcctatttattacctcagaagtttttttcttcgcaggatttttctgagccttttaccactccagcctagcccctaccccccaattaggagggcactggcccccaacaggcatcaccccgctaaatcccctagaagtcccactcctaaacacatccgtattactcgcatcaggagtatcaatcacctgagctcaccatagtctaatagaaaacaaccgaaaccaaataattcaagcactgcttattacaattttactgggtctctattttaccctcctacaagcctcagagtacttcgagtctcccttcaccatttccgacggcatctacggctcaacattttttgtagccacaggcttccacggacttcacgtcattattggctcaactttcctcactatctgcttcatccgccaactaatatttcactttacatccaaacatcactttggcttcgaagccgccgcctgatactggcattttgtagatgtggtttgactatttctgtatgtctccatctattgatgagggtcttactcttttagtataaatagtaccgttaacttccaattaactagttttgacaacattcaaaaaagagtaataaacttcgccttaattttaataatcaacaccctcctagccttactactaataattattacattttgactaccacaactcaacggctacatagaaaaatccaccccttacgagtgcggcttcgaccctatatcccccgcccgcgtccctttctccataaaattcttcttagtagctattaccttcttattatttgatctagaaattgccctccttttacccctaccatgagccctacaaacaactaacctgccactaatagttatgtcatccctcttattaatcatcatcctagccctaagtctggcctatgagtgactacaaaaaggattagactgaaccgaattggtatatagtttaaacaaaacgaatgatttcgactcattaaattatgataatcatatttaccaaatgcccctcatttacataaatattatactagcatttaccatctcacttctaggaatactagtatatcgctcacacctcatatcctccctactatgcctagaaggaataatactatcgctgttcattatagctactctcataaccctcaacacccactccctcttagccaatattgtgcctattgccatactagtctttgccgcctgcgaagcagcggtgggcctagccctactagtctcaatctccaacacatatggcctagactacgtacataacctaaacctactccaatgctaaaactaatcgtcccaacaattatattactaccactgacatgactttccaaaaaacacataatttgaatcaacacaaccacccacagcctaattattagcatcatccctctactattttttaaccaaatcaacaacaacctatttagctgttccccaaccttttcctccgaccccctaacaacccccctcctaatactaactacctgactcctacccctcacaatcatggcaagccaacgccacttatccagtgaaccactatcacgaaaaaaactctacctctctatactaatctccctacaaatctccttaattataacattcacagccacagaactaatcatattttatatcttcttcgaaaccacacttatccccaccttggctatcatcacccgatgaggcaaccagccagaacgcctgaacgcaggcacatacttcctattctacaccctagtaggctcccttcccctactcatcgcactaatttacactcacaacaccctaggctcactaaacattctactactcactctcactgcccaagaactatcaaactcctgagccaacaacttaatatgactagcttacacaatagcttttatagtaaagatacctctttacggactccacttatgactccctaaagcccatgtcgaagcccccatcgctgggtcaatagtacttgccgcagtactcttaaaactaggcggctatggtataatacgcctcacactcattctcaaccccctgacaaaacacatagcctaccccttccttgtactatccctatgaggcataattataacaagctccatctgcctacgacaaacagacctaaaatcgctcattgcatactcttcaatcagccacatagccctcgtagtaacagccattctcatccaaaccccctgaagcttcaccggcgcagtcattctcataatcgcccacgggcttacatcctcattactattctgcctagcaaactcaaactacgaacgcactcacagtcgcatcataatcctctctcaaggacttcaaactctactcccactaatagctttttgatgacttctagcaagcctcgctaacctcgccttaccccccactattaacctactgggagaactctctgtgctagtaaccacgttctcctgatcaaatatcactctcctacttacaggactcaacatactagtcacagccctatactccctctacatatttaccacaacacaatggggctcactcacccaccacattaacaacataaaaccctcattcacacgagaaaacaccctcatgttcatacacctatcccccattctcctcctatccctcaaccccgacatcattaccgggttttcctcttgtaaatatagtttaaccaaaacatcagattgtgaatctgacaacagaggcttacgaccccttatttaccgagaaagctcacaagaactgctaactcatgcccccatgtctaacaacatggctttctcaacttttaaaggataacagctatccattggtcttaggccccaaaaattttggtgcaactccaaataaaagtaataaccatgcacactactataaccaccctaaccctgacttccctaattccccccatccttaccaccctcgttaaccctaacaaaaaaaactcatacccccattatgtaaaatccattgtcgcatccacctttattatcagtctcttccccacaacaatattcatgtgcctagaccaagaagttattatctcgaactgacactgagccacaacccaaacaacccagctctccctaagcttcaaactagactacttctccataatattcatccctgtagcattgttcgttacatggtccatcatagaattctcactgtgatatataaactcagacccaaacattaatcagttcttcaaatatctactcatcttcctaattaccatactaatcttagttaccgctaacaacctattccaactgttcatcggctgagagggcgtaggaattatatccttcttgctcatcagttgatgatacgcccgagcagatgccaacacagcagccattcaagcaatcctatacaaccgtatcggcgatatcggtttcatcctcgccttagcatgatttatcctacactccaactcatgagacccacaacaaatagcccttctaaacgctaatccaagcctcaccccactactaggcctcctcctagcagcagcaggcaaatcagcccaattaggtctccacccctgactcccctcagccatagaaggccccaccccagtctcagccctactccactcaagcactatagttgtagcaggaatcttcttactcatccgcttccaccccctagcagaaaatagcccactaatccaaactctaacactatgcttaggcgctatcaccactctgttcgcagcagtctgcgcccttacacaaaatgacatcaaaaaaatcgtagccttctccacttcaagtcaactaggactcataatagttacaatcggcatcaaccaaccacacctagcattcctgcacatctgtacccacgccttcttcaaagccatactatttatgtgctccgggtccatcatccacaaccttaacaatgaacaagatattcgaaaaataggaggactactcaaaaccatacctctcacttcaacctccctcaccattggcagcctagcattagcaggaatacctttcctcacaggtttctactccaaagaccacatcatcgaaaccgcaaacatatcatacacaaacgcctgagccctatctattactctcatcgctacctccctgacaagcgcctatagcactcgaataattcttctcaccctaacaggtcaacctcgcttccccacccttactaacattaacgaaaataaccccaccctactaaaccccattaaacgcctggcagccggaagcctattcgcaggatttctcattactaacaacatttcccccgcatcccccttccaaacaacaatccccctctacctaaaactcacagccctcgctgtcactttcctaggacttctaacagccctagacctcaactacctaaccaacaaacttaaaataaaatccccactatgcacattttatttctccaacatactcggattctaccctagcatcacacaccgcacaatcccctatctaggccttcttacgagccaaaacctgcccctactcctcctagacctaacctgactagaaaagctattacctaaaacaatttcacagcaccaaatctccacctccatcatcacctcaacccaaaaaggcataattaaactttacttcctctctttcttcttcccactcatcctaaccctactcctaatcacataacctattcccccgagcaatctcaattacaatatatacaccaacaaacaatgttcaaccagtaactactactaatcaacgcccataatcatacaaagcccccgcaccaataggatcctcccgaatcaaccctgacccctctccttcataaattattcagcttcctacactattaaagtttaccacaaccaccaccccatcatactctttcacccacagcaccaatcctacctccatcgctaaccccactaaaacactcaccaagacctcaacccctgacccccatgcctcaggatactcctcaatagccatcgctgtagtatatccaaagacaaccatcattccccctaaataaattaaaaaaactattaaacccatataacctcccccaaaattcagaataataacacacccgaccacaccgctaacaatcaatactaaacccccataaataggagaaggcttagaagaaaaccccacaaaccccattactaaacccacactcaacagaaacaaagcatacatcattattctcgcacggactacaaccacgaccaatgatatgaaaaaccatcgttgtatttcaactacaagaacaccaatgaccccaatacgcaaaactaaccccctaataaaattaattaaccactcattcatcgacctccccaccccatccaacatctccgcatgatgaaacttcggctcactccttggcgcctgcctgatcctccaaatcaccacaggactattcctagccatgcactactcaccagacgcctcaaccgccttttcatcaatcgcccacatcactcgagacgtaaattatggctgaatcatccgctaccttcacgccaatggcgcctcaatattctttatctgcctcttcctacacatcgggcgaggcctatattacggatcatttctctactcagaaacctgaaacatcggcattatcctcctgcttgcaactatagcaacagccttcataggctatgtcctcccgtgaggccaaatatcattctgaggggccacagtaattacaaacttactatccgccatcccatacattgggacagacctagttcaatgaatctgaggaggctactcagtagacagtcccaccctcacacgattctttacctttcacttcatcttgcccttcattattgcagccctagcagcactccacctcctattcttgcacgaaacgggatcaaacaaccccctaggaatcacctcccattccgataaaatcaccttccacccttactacacaatcaaagacgccctcggcttacttctcttccttctctccttaatgacattaacactattctcaccagacctcctaggcgacccagacaattataccctagccaaccccttaaacacccctccccacatcaagcccgaatgatatttcctattcgcctacacaattctccgatccgtccctaacaaactaggaggcgtccttgccctattactatccatcctcatcctagcaataatccccatcctccatatatccaaacaacaaagcataatatttcgcccactaagccaatcactttattgactcctagccgcagacctcctcattctaacctgaatcggaggacaaccagtaagctacccttttaccatcattggacaagtagcatccgtactatacttcacaacaatcctaatcctaataccaactatctccctaattgaaaacaaaatactcaaatgggcctgtccttgtagtataaactaatacaccagtcttgtaaaccggagatgaaaacctttttccaaggacaaatcagagaaaaagtctttaactccaccattagcacccaaagctaagattctaatttaaactattctctgttctttcatggggaagcagatttgggtaccacccaagtattgactcacccatcaacaaccgctatgtatttcgtacattactgccagccaccatgaatattgtacggtaccataaatacttgaccacctgtagtacataaaaacccaatccacatcaaaaccccctccccatgcttacaagcaagtacagcaatcaaccctcaactatcacacatcaactgcaactccaaagccacccctcacccactaggataccaacaaacctacccacccttaacagtacatagtacataaagccatttaccgtacatagcacattacagtcaaatctcttctcgtccccatggatgacccccctcagataggggtcccttgaccaccatcctccgtgaaatcaatatcccgcacaagagtgctactctcctcgctccgggcccataacacttgggggtagctaaagtgaactgtatccgacatctggttcctacttcagggtcataaagcctaaatagcccacacgttccccttaaataagacatcacgatg

SEQ ID NO: 316 - DNA, 16569 bp, Homo sapiens mitochondrial
  3107: "n" refers to a nucleotide at position 3107 of the Cambridge Reference Sequence (CRS, Anderson et al. 1981 Nature 290:457-465), later determined to be absent from the human mtDNA sequence according to the revised CRS (rCRS, Andrews et al. 1999 Nature Genetics 23:147); "n" therefore represents a single nucleotide deletion at a position corresponding to nucleotide 3107 of SEQ ID NO:1 as provided herein.
gatcacaggtctatcaccctattaaccactcacgggagctctccatgcatttggtattttcgtctggggggtgtgcacgcgatagcattgcgagacgctggagccggagcaccctatgtcgcagtatctgtctttgattcctgcctcattctattatttatcgcacctacgttcaatattacaggcgaacatacttactaaagtgtgttaattaattaatgcttgtaggacataataataacaattgaatgtctgcacagccgctttccacacagacatcataacaaaaaatttccaccaaaccccccctcccccgccttctggccacagcacttaaacacatctctgccaaaccccaaaaacaaagaaccctaacaccagcctaaccagatttcaaattttatcttttggcggtatgcacttttaacagtcaccccccaactaacacattattttcccctcccactcccatactactaatctcatcaatacaacccccgcccatcctacccagcacacacacaccgctgctaaccccataccccgaaccaaccaaaccccaaagacaccccccacagtttatgtagcttacctcctcaaagcaatacactgaaaatgtttagacgggctcacatcaccccataaacaaataggtttggtcctagcctttctattagctcttagtaagattacacatgcaagcatccccattccagtgagttcaccctctaaatcaccacgatcaaaagggacaagcatcaagcacgcagcaatgcagctcaaaacgcttagcctagccacacccccacgggaaacagcagtgattaacctttagcaataaacgaaagtttaactaagctatactaaccccagggttggtcaatttcgtgccagccaccgcggtcacacgattaacccaagtcaatagaagccggcgtaaagagtgttttagatcacccctccccaataaagctaaaactcacctgagttgtaaaaaactccagttgacacaaaatagactacgaaagtggctttaacatatctgaacacacaatagctaagacccaaactgggattagataccccactatgcttagccctaaacctcaacagttaaatcaacaaaactgctcgccagaacactacgagccacagcttaaaactcaaaggacctggcggtgcttcatatccctctagaggagcctgttctgtaatcgataaaccccgatcaacctcaccacctcttgctcagcctatataccgccatcttcagcaaaccctgatgaaggctacaaagtaagcgcaagtacccacgtaaagacgttaggtcaaggtgtagcccatgaggtggcaagaaatgggctacattttctaccccagaaaactacgatagcccttatgaaacttaagggtcgaaggtggatttagcagtaaactgagagtagagtgcttagttgaacagggccctgaagcgcgtacacaccgcccgtcaccctcctcaagtatacttcaaaggacatttaactaaaacccctacgcatttatatagaggagacaagtcgtaacatggtaagtgtactggaaagtgcacttggacgaaccagagtgtagcttaacacaaagcacccaacttacacttaggagatttcaacttaacttgaccgctctgagctaaacctagccccaaacccactccaccttactaccagacaaccttagccaaaccatttacccaaataaagtataggcgatagaaattgaaacctggcgcaatagatatagtaccgcaagggaaagatgaaaaattataaccaagcataatatagcaaggactaacccctataccttctgcataatgaattaactagaaataactttgcaaggagagccaaagctaagacccccgaaaccagacgagctacctaagaacagctaaaagagcacacccgtctatgtagcaaaatagtgggaagatttataggtagaggcgacaaacctaccgagcctggtgatagctggttgtccaagatagaatcttagttcaactttaaatttgcccacagaaccctctaaatccccttgtaaatttaactgttagtccaaagaggaacagctctttggacactaggaaaaaaccttgtagagagagtaaaaaatttaacacccatagtaggcctaaaagcagccaccaattaagaaagcgttcaagctcaacacccactacctaaaaaatcccaaacatataactgaactcctcacacccaattggaccaatctatcaccctatagaagaactaatgttagtataagtaacatgaaaacattctcctccgcataagcctgcgtcagattaaaacactgaactgacaattaacagcccaatatctacaatcaaccaacaagtcattattaccctcactgtcaacccaacacaggcatgctcataaggaaaggttaaaaaaagtaaaaggaactcggcaaatcttaccccgcctgtttaccaaaaacatcacctctagcatcaccagtattagaggcaccgcctgcccagtgacacatgtttaacggccgcggtaccctaaccgtgcaaaggtagcataatcacttgttccttaaatagggacctgtatgaatggctccacgagggttcagctgtctcttacttttaaccagtgaaattgacctgcccgtgaagaggcgggcatgacacagcaagacgagaagaccctatggagctttaatttattaatgcaaacagtacctaacaaacccacaggtcctaaactaccaaacctgcattaaaaatttcggttggggcgacctcggagcagaacccaacctccgagcagtacatgctaagacttcaccagtcaaagcgaactactatactcaattgatccaataacttgaccaacggaacaagttaccctagggataacagcgcaatcctattctagagtccatatcaacaatagggtttacgacctcgatgttggatcaggacatcccgatggtgcagccgctattaaaggttcgtttgttcaacgattaaagtcctacgtgatctgagttcagaccggagtaatccaggtcggtttctatctacnttcaaattcctccctgtacgaaaggacaagagaaataaggcctacttcacaaagcgccttcccccgtaaatgatatcatctcaacttagcattatacccacacccacccaagaacagggtttgttaagatggcagagcccggtaatcgcataaaacttaaaactttacagtcagaggttcaattcctcttcttaacaacatacccatggccaacctcctactcctcattgtacccattctaatcgcaatggcattcctaatgcttaccgaacgaaaaattctaggctatatacaactacgcaaaggccccaacgttgtaggcccctacgggctactacaacccttcgctgacgccataaaactcttcaccaaagagcccctaaaacccgccacatctaccatcaccctctacatcaccgccccgaccttagctctcaccatcgctcttctactatgaacccccctccccatacccaaccccctggtcaacctcaacctaggcctcctatttattctagccacctctagcctagccgtttactcaatcctctgatcagggtgagcatcaaactcaaactacgccctgatcggcgcactacgagcagtagcccaaacaatctcatatgaagtcaccctagccatcattctactatcaacattactaataagtggctcctttaacctctccacccttatcacaacacaagaacacctctgattactcctgccatcatgacccttggccataatatgatttatctccacactagcagagaccaaccgaacccccttcgaccttgccgaaggggagtccgaactagtctcaggcttcaacatcgaatacgccgcaggccccttcgccctattcttcatagccgaatacacaaacattattataataaacaccctcaccactacaatcttcctaggaacaacatatgacgcactctcccctgaactctacacaacatattttgtcaccaagaccctacttctaacctccctgttcttatgaattcgaacagcatacccccgattccgctacgaccaactcatacacctcctatgaaaaaacttcctaccactcaccctagcattacttatatgatatgtctccatacccattacaatctccagcattccccctcaaacctaagaaatatgtctgataaaagagttactttgatagagtaaataataggagcttaaacccccttatttctaggactatgagaatcgaacccatccctgagaatccaaaattctccgtgccacctatcacaccccatcctaaagtaaggtcagctaaataagctatcgggcccataccccgaaaatgttggttatacccttcccgtactaattaatcccctggcccaacccgtcatctactctaccatctttgcaggcacactcatcacagcgctaagctcgcactgattttttacctgagtaggcctagaaataaacatgctagcttttattccagttctaaccaaaaaaataaaccctcgttccacagaagctgccatcaagtatttcctcacgcaagcaaccgcatccataatccttctaatagctatcctcttcaacaatatactctccggacaatgaaccataaccaatactaccaatcaatactcatcattaataatcataatggctatagcaataaaactaggaatagccccctttcacttctgagtcccagaggttacccaaggcacccctctgacatccggcctgcttcttctcacatgacaaaaactagcccccatctcaatcatataccaaatctctccctcactaaacgtaagccttctcctcactctctcaatcttatccatcatagcaggcagttgaggtggattaaaccaaacccagctacgcaaaatcttagcatactcctcaattacccacataggatgaataatagcagttctaccgtacaaccctaacataaccattcttaatttaactatttatattatcctaactactaccgcattcctactactcaacttaaactccagcaccacgaccctactactatctcgcacctgaaacaagctaacatgactaacacccttaattccatccaccctcctctccctaggaggcctgcccccgctaaccggctttttgcccaaatgggccattatcgaagaattcacaaaaaacaatagcctcatcatccccaccatcatagccaccatcaccctccttaacctctacttctacctacgcctaatctactccacctcaatcacactactccccatatctaacaacgtaaaaataaaatgacagtttgaacatacaaaacccaccccattcctccccacactcatcgcccttaccacgctactcctacctatctccccttttatactaataatcttatagaaatttaggttaaatacagaccaagagccttcaaagccctcagtaagttgcaatacttaatttctgtaacagctaaggactgcaaaaccccactctgcatcaactgaacgcaaatcagccactttaattaagctaagcccttgctagaccaatgggacttaaacccacaaacacttagttaacagctaagcaccctaatcaactggcttcaatctacttctcccgccgccgggaaaaaaggcgggagaagccccggcaggtttgaagctgcttcttcgaatttgcaattcaatatgaaaatcacctcggagctggtaaaaagaggcctaacccctgtctttagatttacagtccaatgcttcactcagccattttacctcacccccactgatgttcgccgaccgttgactattctctacaaaccacaaagacattggaacactatacctattattcggcgcatgagctggagtcctaggcacagctctaagcctccttattcgagccgagctgggccagccaggcaaccttctaggtaacgaccacatctacaacgttatcgtcacagcccatgcatttgtaataatcttcttcatagtaatacccatcataatcggaggctttggcaactgactagttcccctaataatcggtgcccccgatatggcgtttccccgcataaacaacataagcttctgactcttacctccctctctcctactcctgctcgcatctgctatagtggaggccggagcaggaacaggttgaacagtctaccctcccttagcagggaactactcccaccctggagcctccgtagacctaaccatcttctccttacacctagcaggtgtctcctctatcttaggggccatcaatttcatcacaacaattatcaatataaaaccccctgccataacccaataccaaacgcccctcttcgtctgatccgtcctaatcacagcagtcctacttctcctatctctcccagtcctagctgctggcatcactatactactaacagaccgcaacctcaacaccaccttcttcgaccccgccggaggaggagaccccattctataccaacacctattctgatttttcggtcaccctgaagtttatattcttatcctaccaggcttcggaataatctcccatattgtaacttactactccggaaaaaaagaaccatttggatacataggtatggtctgagctatgatatcaattggcttcctagggtttatcgtgtgagcacaccatatatttacagtaggaatagacgtagacacacgagcatatttcacctccgctaccataatcatcgctatccccaccggcgtcaaagtatttagctgactcgccacactccacggaagcaatatgaaatgatctgctgcagtgctctgagccctaggattcatctttcttttcaccgtaggtggcctgactggcattgtattagcaaactcatcactagacatcgtactacacgacacgtactacgttgtagctcacttccactatgtcctatcaataggagctgtatttgccatcataggaggcttcattcactgatttcccctattctcaggctacaccctagaccaaacctacgccaaaatccatttcactatcatattcatcggcgtaaatctaactttcttcccacaacactttctcggcctatccggaatgccccgacgttactcggactaccccgatgcatacaccacatgaaacatcctatcatctgtaggctcattcatttctctaacagcagtaatattaataattttcatgatttgagaagccttcgcttcgaagcgaaaagtcctaatagtagaagaaccctccataaacctggagtggctatatggatgccccccaccctaccacacattcgaagaacccgtatacataaaatctagacaaaaaaggaaggaatcgaaccccccaaagctggtttcaagccaaccccatggcctccatgactttttcaaaaaggtattagaaaaaccatttcataactttgtcaaagttaaattataggctaaatcctatatatcttaatggcacatgcagcgcaagtaggtctacaagacgctacttcccctatcatagaagagcttatcacctttcatgatcacgccctcataatcattttccttatctgcttcctagtcctgtatgcccttttcctaacactcacaacaaaactaactaatactaacatctcagacgctcaggaaatggaaaccgtctgaactatcctgcccgccatcatcctagtcctcatcgccctcccatccctacgcatcctttacataacagacgaggtcaacgatccctcccttaccatcaaatcaattggccaccaatggtactgaacctacgagtacaccgactacggcggactaatcttcaactcctacatacttcccccattattcctagaaccaggcgacctgcgactccttgacgttgacaatcgagtagtactcccgattgaagcccccattcgtataataattacatcacaagacgtcttgcactcatgagctgtccccacattaggcttaaaaacagatgcaattcccggacgtctaaaccaaaccactttcaccgctacacgaccgggggtatactacggtcaatgctctgaaatctgtggagcaaaccacagtttcatgcccatcgtcctagaattaattcccctaaaaatctttgaaatagggcccgtatttaccctatagcaccccctctaccccctctagagcccactgtaaagctaacttagcattaaccttttaagttaaagattaagagaaccaacacctctttacagtgaaatgccccaactaaatactaccgtatggcccaccataattacccccatactccttacactattcctcatcacccaactaaaaatattaaacacaaactaccacctacctccctcaccaaagcccataaaaataaaaaattataacaaaccctgagaaccaaaatgaacgaaaatctgttcgcttcattcattgcccccacaatcctaggcctacccgccgcagtactgatcattctatttccccctctattgatccccacctccaaatatctcatcaacaaccgactaatcaccacccaacaatgactaatcaaactaacctcaaaacaaatgataaccatacacaacactaaaggacgaacctgatctcttatactagtatccttaatcatttttattgccacaactaacctcctcggactcctgcctcactcatttacaccaaccacccaactatctataaacctagccatggccatccccttatgagcgggcgcagtgattataggctttcgctctaagattaaaaatgccctagcccacttcttaccacaaggcacacctacaccccttatccccatactagttattatcgaaaccatcagcctactcattcaaccaatagccctggccgtacgcctaaccgctaacattactgcaggccacctactcatgcacctaattggaagcgccaccctagcaatatcaaccattaaccttccctctacacttatcatcttcacaattctaattctactgactatcctagaaatcgctgtcgccttaatccaagcctacgttttcacacttctagtaagcctctacctgcacgacaacacataatgacccaccaatcacatgcctatcatatagtaaaacccagcccatgacccctaacaggggccctctcagccctcctaatgacctccggcctagccatgtgatttcacttccactccataacgctcctcatactaggcctactaaccaacacactaaccatataccaatgatggcgcgatgtaacacgagaaagcacataccaaggccaccacacaccacctgtccaaaaaggccttcgatacgggataatcctatttattacctcagaaatttttttcttcgcaggatttttctgagccttttaccactccagcctagcccctaccccccaattaggagggcactggcccccaacaggcatcaccccgctaaatcccctagaagtcccactcctaaacacatccgtattactcgcatcaggagtatcaatcacctgagctcaccatagtctaatagaaaacaaccgaaaccaaataattcaagcactgcttattacaattttactgggtctctattttaccctcctacaagcctcagagtacttcgagtctcccttcaccatttccgacggcatctacggctcaacattttttgtagccacaggcttccacggacttcacgtcattattggctcaactttcctcactatctgcttcatccgccaactaatatttcactttacatccaaacatcactttggcttcgaagccgccgcctgatactggcattttgtagatgtggtttgactatttctgtatgtctccatctattgatgagggtcttactcttttagtataaatagtaccgttaacttccaattaactagttttgacaacattcaaaaaagagtaataaacttcgccttaattttaataatcaacaccctcctagccttactactaataattattacattttgactaccacaactcaacggctacatagaaaaatccaccccttacgagtgcggcttcgaccctatatcccccgcccgcgtccctttctccataaaattcttcttagtagctattaccttcttattatttgatctagaaattgccctccttttacccctaccatgagccctacaaacaactaacctgccactaatagttatgtcatccctcttattaatcatcatcctagccctaagtctggcctatgagtgactacaaaaaggattagactgaaccgaattggtatatagtttaaacaaaacgaatgatttcgactcattaaattatgataatcatatttaccaaatgcccctcatttacataaatattatactagcatttaccatctcacttctaggaatactagtatatcgctcacacctcatatcctccctactatgcctagaaggaataatactatcgctgttcattatagctactctcataaccctcaacacccactccctcttagccaatattgtgcctattgccatactagtctttgccgcctgcgaagcagcggtgggcctagccctactagtctcaatctccaacacatatggcctagactacgtacataacctaaacctactccaatgctaaaactaatcgtcccaacaattatattactaccactgacatgactttccaaaaaacacataatttgaatcaacacaaccacccacagcctaattattagcatcatccctctactattttttaaccaaatcaacaacaacctatttagctgttccccaaccttctcctccgaccccctaacaacccccctcctaatactaactacctgactcctacccctcacaatcatggcaagccaacgccacttatccagtgaaccactatcacgaaaaaaactctacctctctatactaatctccctacaaatctccttaattataacattcacagccacagaactaatcatattttatatcttcttcgaaaccacacttatccccaccttggctatcatcacccgatgaggcaaccagccagaacgcctgaacgcaggcacatacttcctattctacaccctagtaggctcccttcccctactcatcgcactaatttacactcacaacaccctaggctcactaaacattctactactcactctcactgcccaagaactatcaaactcctgagccaacaacttaatatgactagcttacacaatagcttttatagtaaagatacctctttacggactccacttatgactccctaaagcccatgtcgaagcccccatcgctgggtcaatagtacttgccgcagtactcttgaaactaggcggctatggtataatacgcctcacactcattctcaaccccctgacaaaacacatagcctaccccttccttgtactatccctatgaggcataattataacaagctccatctgcctacgacaaacagacctaaaatcgctcattgcatactcttcaatcagccacatagccctcgtagtaacagccattctcatccaaaccccctgaagcttcaccggcgcagtcattctcataatcgcccacggacttacatcctcattactattctgcctagcaaactcaaactacgaacgcactcacagtcgcatcataatcctctctcaaggacttcaaactctactcccactaatagctttttgatgacttctagcaagcctcgctaacctcgccttaccccccactattaacctactgggagaactctctgtgctagtaaccacgttctcctgatcaaatatcactctcctacttacaggactcaacatactagtcacagccctatactccctctacatatttaccacaacacaatggggctcactcacccaccacattaacaacataaaaccctcattcacacgagaaaacatcctcatgttcatacacctatcccccattctcctcctatccctcaaccccgacatcattaccgggttttcctcttgtaaatatagtttaaccaaaacatcagattgtgaatctgacaacagaggcttacgaccccttatttaccgagaaagctcacaagaactgctaactcatgcccccatgtctaacaacatggctttctcaacttttaaaggataacagctatccattggtcttaggccccaagaattttggtgcaactccaaataaaagtaataaccatgcacactactataaccaccctaaccctaacttccctaattccccccatccttaccaccctcgttaaccctaacaaaaaaaactcatacccccattatgtaaaatccattgtcgcatccacctttattatcagtctcttccccacaacaatattcatgtgcctagaccaagaagttattatctcgaactgacactgagccacaacccaaacaacccagctctccctaagcttcaaactagactacttctccataatattcatccctgtagcattattcgttacatggtccatcatagaattctcactgtgatatataaactcagacccaaacattaatcagttcttcaaatatctactcatcttcctaattaccatactaatcttagttaccgctaacaacctattccaactgttcatcggctgagagggcgtaggaattatatccttcttgctcatcagttgatgatacgcccgagcagatgccaacacagcagccattcaagcaatcctatacaaccgtatcggcgatatcggtttcatcctcgccttagcatgatttatcctacactccaactcatgagacccacaacaaatagcccttctaaacgctaatccaagcctcaccccactactaggcctcctcctagcagcagcaggcaaatcagcccaattaggtctccacccctgactcccctcagccatagaaggccccaccccagtctcagccctactccactcaagcactatagttgtagcaggaatcttcttactcatccgcttccaccccctagcagaaaatagcccactaatccaaactctaacactatgcttaggcgctatcaccactctgttcgcagcagtctgcgcccttacacaaaatgacatcaaaaaaatcgtagccttctccacttcaagtcaactaggactcataatagttacaatcggcatcaaccaaccacacctagcattcctgcacatctgtacccacgccttcttcaaagccatactatttatgtgctccgggtccatcatccacaaccttaacaatgaacaagatattcgaaaaataggaggactactcaaaaccatacctctcacttcaacctccctcaccattggcagcctagcattagcaggaatacctttcctcacaggtttctactccaaagaccacatcatcgaaaccgcaaacatatcatacacaaacgcctgagccctatctattactctcatcgctacctccctgacaagcgcctatagcactcgaataatccttctcaccctaacaggtcaacctcgcttccccacccttactaacattaacgaaaataaccccaccctactaaaccccattaaacgcctggcagccggaagcctattcgcaggatttctcattactaacaacatttcccccgcatcccccttccaaacaacaatccccctctacctaaaactcacagccctcgctgtcactttcctaggacttctaacagccctagacctcaactacctaaccaacaaacttaaaataaaatccccactatgcacattttatttctccaacatactcggattctaccctagcatcacacaccgcacaatcccctatctaggccttcttacgagccaaaacctgcccctactcctcctagacctaacctgactagaaaagctattacctaaaacaatttcacagcaccaaatctccacctccatcatcacctcaacccaaaaaggcataattaaactttacttcctctctttcttcttcccactcatcctaaccctactcctaatcacataacctattcccccgagcaatctcaattacaatatacacaccaacaaacaatgttcaaccagtaactactactaatcaacgcccataatcatacaaagcccccgcaccaataggatcctcccgaatcaaccctgacccctctccttcataaattattcagcttcctacactattaaagtttaccacaaccaccaccccatcatactctttcacccacagcaccaatcctacctccatcgctaaccccactaaaacactcaccaagacctcaacccctgacccccatgcctcaggatactcctcaatagccatcgctgtagtatatccaaagacaaccatcattccccctaaataaattaaaaaaactattaaacccatataacctcccccaaaattcagaataataacacacccgaccacaccgctaacaatcaatactaaacccccataaataggagaaggcttagaagaaaaccccacaaaccccattactaaacccacactcaacagaaacaaagcatacatcattattctcgcacggactacaaccacgaccaatgatatgaaaaaccatcgttgtatttcaactacaagaacaccaatgaccccaatacgcaaaattaaccccctaataaaattaattaaccactcattcatcgacctccccaccccatccaacatctccgcatgatgaaacttcggctcactccttggcgcctgcctgatcctccaaatcaccacaggactattcctagccatgcactactcaccagacgcctcaaccgccttttcatcaatcgcccacatcactcgagacgtaaattatggctgaatcatccgctaccttcacgccaatggcgcctcaatattctttatctgcctcttcctacacatcgggcgaggcctatattacggatcatttctctactcagaaacctgaaacatcggcattatcctcctgcttgcaactatagcaacagccttcataggctatgtcctcccgtgaggccaaatatcattctgaggggccacagtaattacaaacttactatccgccatcccatacattgggacagacctagttcaatgaatctgaggaggctactcagtagacagtcccaccctcacacgattctttacctttcacttcatcttgcccttcattattgcagccctagcagcactccacctcctattcttgcacgaaacgggatcaaacaaccccctaggaatcacctcccattccgataaaatcaccttccacccttactacacaatcaaagacgccctcggcttacttctcttccttctctccttaatgacattaacactattctcaccagacctcctaggcgacccagacaattataccctagccaaccccttaaacacccctccccacatcaagcccgaatgatatttcctattcgcctacacaattctccgatccgtccctaacaaactaggaggcgtccttgccctattactatccatcctcatcctagcaataatccccatcctccatatatccaaacaacaaagcataatatttcgcccactaagccaatcactttattgactcctagccgcagacctcctcattctaacctgaatcggaggacaaccagtaagctacccttttaccatcattggacaagtagcatccgtactatacttcacaacaatcctaatcctaataccaactatctccctaattgaaaacaaaatactcaaatgggcctgtccttgtagtataaactaatacaccagtcttgtaaaccggagatgaaaacctttttccaaggacaaatcagagaaaaagtctttaactccaccattagcacccaaagctaagattctaatttaaactattctctgttctttcatggggaagcagatttgggtaccacccaagtattgactcacccatcaacaaccgctatgtatttcgtacattactgccagccaccatgaatattgtacggtaccataaatacttgaccacctgtagtacataaaaacccaatccacatcaaaaccccccccccatgcttacaagcaagtacagcaatcaaccctcaactatcacacatcaactgcaactccaaagccacccctcacccattaggataccaacaaacctacccacccttaacagtacatagtacataaagccatttaccgtacatagcacattacagtcaaatcccttctcgtccccatggatgacccccctcagataggggtcccttgaccaccatcctccgtgaaatcaatatcccgcacaagagtgctactctcctcgctccgggcccataacacttgggggtagctaaagtgaactgtatccgacatctggttcctacttcagggccataaagcctaaatagcccacacgttccccttaaataagacatcacgatg

SEQ ID NO: 317 - DNA, 16570 bp, Homo sapiens mitochondrial
  3108: "n" refers to a nucleotide at position 3107 of the Cambridge Reference Sequence (CRS, Anderson et al. 1981 Nature 290:457-465), later determined to be absent from the human mtDNA sequence according to the revised CRS (rCRS, Andrews et al. 1999 Nature Genetics 23:147); "n" therefore represents a single nucleotide deletion at a position corresponding to nucleotide 3107 of SEQ ID NO:1 as provided herein.
gatcacaggtctatcaccctattaaccactcacgggagctctccatgcatttggtattttcgtctggggggtatgcacgcgatagcattgcgagacgctggagccggagcaccctatgtcgcagtatctgtctttgattcctgcctcatcctattatttatcgcacctacgttcaatattacaggcgaacatacttactaaagtgtgttaattaattaatgcttgtaggacataataataacaattgaatgtctgcacagccgctttccacacagacatcataacaaaaaatttccaccaaaccccccctcccccgccttctggccacagcacttaaacacatctctgccaaaccccaaaaacaaagaaccctaacaccagcctaaccagatttcaaattttatcttttggcggtatgcacttttaacagtcaccccccaactaacacattattttcccctcccactcccatactactaatctcatcaatacaacccccgcccatcctacccagcacacacacaccgctgctaaccccataccccgaaccaaccaaaccccaaagacaccccccacagtttatgtagcttacctcctcaaagcaatacactgaaaatgtttagacgggctcacatcaccccataaacaaataggtttggtcctagcctttctattagctcttagtaagattacacatgcaagcatccccgttccagtgagttcaccctctaaatcaccacgatcaaaagggacaagcatcaagcacgcagcaatgcagctcaaaacgcttagcctagccacacccccacgggaaacagcagtgattaacctttagcaataaacgaaagtttaactaagctatactaaccccagggttggtcaatttcgtgccagccaccgcggtcacacgattaacccaagtcaatagaagccggcgtaaagagtgttttagatcaccccctccccaataaagctaaaactcacctgagttgtaaaaaactccagttgacacaaaatagactacgaaagtggctttaacatatctgaacacacaatagctaagacccaaactgggattagataccccactatgcttagccctaaacctcaacagttaaatcaacaaaactgctcgccagaacactacgagccacagcttaaaactcaaaggacctggcggtgcttcatatccctctagaggagcctgttctgtaatcgataaaccccgatcaacctcaccacctcttgctcagcctatataccgccatcttcagcaaaccctgatgaaggctacaaagtaagcgcaagtacccacgtaaagacgttaggtcaaggtgtagcccatgaggtggcaagaaatgggctacattttctaccccagaaaactacgatagcccttatgaaacttaagggtcgaaggtggatttagcagtaaactgagagtagagtgcttagttgaacagggccctgaagcgcgtacacaccgcccgtcaccctcctcaagtatacttcaaaggacatttaactaaaacccctacgcatttatatagaggagacaagtcgtaacatggtaagtgtactggaaagtgcacttggacgaaccagagtgtagcttaacacaaagcacccaacttacacttaggagatttcaacttaacttgaccgctctgagctaaacctagccccaaacccactccaccttactaccagacaaccttagccaaaccatttacccaaataaagtataggcgatagaaattgaaacctggcgcaatagatatagtaccgcaagggaaagatgaaaaattataaccaagcataatatagcaaggactaacccctataccttctgcataatgaattaactagaaataactttgcaaggagagccaaagctaagacccccgaaaccagacgagctacctaagaacagctaaaagagcacacccgtctatgtagcaaaatagtgggaagatttataggtagaggcgacaaacctaccgagcctggtgatagctggttgtccaagatagaatcttagttcaactttaaatttgcccacagaaccctctaaatccccttgtaaatttaactgttagtccaaagaggaacagctctttggacactaggaaaaaaccttgtagagagagtaaaaaatttaacacccatagtaggcctaaaagcagccaccaattaagaaagcgttcaagctcaacacccactacctaaaaaatcccaaacatataactgaactcctcacacccaattggaccaatctatcaccctatagaagaactaatgttagtataagtaacatgaaaacattctcctccgcataagcctgcgtcagattaaaacactgaactgacaattaacagcccaatatctacaatcaaccaacaagtcattattaccctcactgtcaacccaacacaggcatgctcataaggaaaggttaaaaaaagtaaaaggaactcggcaaatcttaccccgcctgtttaccaaaaacatcacctctagcatcaccagtattagaggcaccgcctgcccagtgacacatgtttaacggccgcggtaccctaaccgtgcaaaggtagcataatcacttgttccttaaatagggacctgtatgaatggctccacgagggttcagctgtctcttacttttaaccagtgaaattgacctgcccgtgaagaggcgggcataacacagcaagacgagaagaccctatggagctttaatttattaatgcaaacagtacctaacaaacccacaggtcctaaactaccaaacctgcattaaaaatttcggttggggcgacctcggagcagaacccaacctccgagcagtacatgctaagacttcaccagtcaaagcgaactactatactcaattgatccaataacttgaccaacggaacaagttaccctagggataacagcgcaatcctattctagagtccatatcaacaatagggtttacgacctcgatgttggatcaggacatcccgatggtgcagccgctattaaaggttcgtttgttcaacgattaaagtcctacgtgatctgagttcagaccggagtaatccaggtcggtttctatctacnttcaaattcctccctgtacgaaaggacaagagaaataaggcctacttcacaaagcgccttcccccgtaaatgatatcatctcaacttagtattatacccacacccacccaagaacagggtttgttaagatggcagagcccggtaatcgcataaaacttaaaactttacagtcagaggttcaattcctcttcttaacaacatacccatggccaacctcctactcctcattgtacccattctaatcgcaatggcattcctaatgcttaccgaacgaaaaattctaggctatatacaactacgcaaaggccccaacgttgtaggcccctacgggctactacaacccttcgctgacgccataaaactcttcaccaaagagcccctaaaacccgccacatctaccatcaccctctacatcaccgccccgaccttagctctcaccatcgctcttctactatgaacccccctccccatacccaaccccctggtcaacctcaacctaggcctcctatttattctagccacctctagcctagccgtttactcaatcctctgatcagggtgagcatcaaactcaaactacgccctgatcggcgcactgcgagcagtagcccaaacaatctcatatgaagtcaccctagccatcattctactatcaacattactaataagtggctcctttaacctctccacccttatcacaacacaagaacacctctgattactcctgccatcatgacccttggccataatatgatttatctccacactagcagagaccaaccgaacccccttcgaccttgccgaaggggagtccgaactagtctcaggcttcaacatcgaatacgccgcaggccccttcgccctattcttcatagccgaatacacaaacattattataataaacaccctcaccactacaatcttcctaggaacaacatatgacgcactctcccctgaactctacacaacatattttgtcaccaagaccctacttctaacctccctgttcttatgaattcgaacagcatacccccgattccgctacgaccaactcatacacctcctatgaaaaaacttcctaccactcaccctagcattacttatatgatatgtctccatacccattacaatctccagcattccccctcaaacctaagaaatatgtctgataaaagagttactttgatagagtaaataataggagcttaaacccccttatttctaggactatgagaatcgaacccatccctgagaatccaaaattctccgtgccacctatcacaccccatcctaaagtaaggtcagctaaataagctatcgggcccataccccgaaaatgttggttatacccttcccgtactaattaatcccctggcccaacccgtcatctactctaccatctttgcaggcacactcatcacagcgctaagctcgcactgattttttacctgagtaggcctagaaataaacatgctagcttttattccagttctaaccaaaaaaataaaccctcgttccacagaagctgccatcaagtatttcctcacgcaagcaaccgcatccataatccttctaatagctatcctcttcaacaatatactctccggacaatgaaccataaccaatactaccaatcaatactcatcattaataatcataatggctatagcaataaaactaggaatagccccctttcacttctgagtcccagaggttacccaaggcacccctctgacatccggcctgcttcttctcacatgacaaaaactagcccccatctcaatcatataccaaatctctccctcactaaacgtaagccttctcctcactctctcaatcttatccatcatagcaggcagttgaggtggattaaaccaaacccagctacgcaaaatcttagcatactcctcaattacccacataggatgaataatagcagttctaccgtacaaccctaacataaccattcttaatttaactatttatattatcctaactactaccgcattcctactactcaacttaaactccagcaccacgaccctactactatctcgcacctgaaacaagctaacatgactaacacccttaattccatccaccctcctctccctaggaggcctgcccccgctaaccggctttttgcccaaatgggccattatcgaagaattcacaaaaaacaatagcctcatcatccccaccatcatagccaccatcaccctccttaacctctacttctacctacgcctaatctactccacctcaatcacactactccccatatctaacaacgtaaaaataaaatgacagtttgaacatacaaaacccaccccattcctccccacactcatcgcccttaccacgctactcctacctatctccccttttatactaataatcttatagaaatttaggttaaatacagaccaagagccttcaaagccctcagtaagttgcaatacttaatttctgtaacagctaaggactgcaaaaccccactctgcatcaactgaacgcaaatcagccactttaattaagctaagcccttactagaccaatgggacttaaacccacaaacacttagttaacagctaagcaccctaatcaactggcttcaatctacttctcccgccgccgggaaaaaaggcgggagaagccccggcaggtttgaagctgcttcttcgaatttgcaattcaatatgaaaatcacctcggagctggtaaaaagaggcctaacccctgtctttagatttacagtccaatgcttcactcagccattttacctcacccccactgatgttcgccgaccgttgactattctctacaaaccacaaagacattggaacactatacctattattcggcgcatgagctggagtcctaggcacagctctaagcctccttattcgagccgagctgggccagccaggcaaccttctaggtaacgaccacatctacaacgttatcgtcacagcccatgcatttgtaataatcttcttcatagtaatacccatcataatcggaggctttggcaactgactagttcccctaataatcggtgcccccgatatggcgtttccccgcataaacaacataagcttctgactcttacctccctctctcctactcctgctcgcatctgctatagtggaggccggagcaggaacaggttgaacagtctaccctcccttagcagggaactactcccaccctggagcctccgtagacctaaccatcttctccttacacctagcaggtgtctcctctatcttaggggccatcaatttcatcacaacaattatcaatataaaaccccctgccataacccaataccaaacgcccctcttcgtctgatccgtcctaatcacagcagtcctacttctcctatctctcccagtcctagctgctggcatcactatactactaacagaccgcaacctcaacaccaccttcttcgaccccgccggaggaggagaccccattctataccaacacctattctgatttttcggtcaccctgaagtttatattcttatcctaccaggcttcggaataatctcccatattgtaacttactactccggaaaaaaagaaccatttggatacataggtatggtctgagctatgatatcaattggcttcctagggtttatcgtgtgagcacaccatatatttacagtaggaatagacgtagacacacgagcatatttcacctccgctaccataatcatcgctatccccaccggcgtcaaagtatttagctgactcgccacactccacggaagcaatatgaaatgatctgctgcagtgctctgagccctaggattcatctttcttttcaccgtaggtggcctgactggcattgtattagcaaactcatcactagacatcgtactacacgacacgtactacgttgtagcccacttccactatgtcctatcaataggagctgtatttgccatcataggaggcttcattcactgatttcccctattctcaggctacaccctagaccaaacctacgccaaaatccatttcactatcatattcatcggcgtaaatctaactttcttcccacaacactttctcggcctatccggaatgccccgacgttactcggactaccccgatgcatacaccacatgaaacatcctatcatctgtaggctcattcatttctctaacagcagtaatattaataattttcatgatttgagaagccttcgcttcgaagcgaaaagtcctaatagtagaagaaccctccataaacctggagtgactatatggatgccccccaccctaccacacattcgaagaacccgtatacataaaatctagacaaaaaaggaaggaatcgaaccccccaaagctggtttcaagccaaccccatggcctccatgactttttcaaaaaggtattagaaaaaccatttcataactttgtcaaagttaaattataggctaaatcctatatatcttaatggcacatgcagcgcaagtaggtctacaagacgctacttcccctatcatagaagagcttatcacctttcatgatcacgccctcataatcattttccttatctgcttcctagtcctgtatgcccttttcctaacactcacaacaaaactaactaatactaacatctcagacgctcaggaaatagaaaccgtctgaactatcctgcccgccatcatcctagtcctcatcgccctcccatccctacgcatcctttacataacagacgaggtcaacgatccctcccttaccatcaaatcaattggccaccaatggtactgaacctacgagtacaccgactacggcggactaatcttcaactcctacatacttcccccattattcctagaaccaggcgacctgcgactccttgacgttgacaatcgagtagtactcccgattgaagcccccattcgtataataattacatcacaagacgtcttgcactcatgagctgtccccacattaggcttaaaaacagatgcaattcccggacgtctaaaccaaaccactttcaccgctacacgaccgggggtatactacggtcaatgctctgaaatctgtggagcaaaccacagtttcatgcccatcgtcctagaattaattcccctaaaaatctttgaaatagggcccgtatttaccctatagcaccccctctaccccctctagagcccactgtaaagctaacttagcattaaccttttaagttaaagattaagagaaccaacacctctttacagtgaaatgccccaactaaatactaccgtatggcccaccataattacccccatactccttacactattcctcatcacccaactaaaaatattaaacacaaactaccacctacctccctcaccaaagcccataaaaataaaaaattataacaaaccctgagaaccaaaatgaacgaaaatctgttcgcttcattcattgcccccacaatcctaggcctacccgccgcagtactgatcattctatttccccctctattgatccccacctccaaatatctcatcaacaaccgactaatcaccacccaacaatgactaatcaaactaacctcaaaacaaatgataaccatacacaacactaaaggacgaacctgatctcttatactagtatccttaatcatttttattgccacaactaacctcctcggactcctgcctcactcatttacaccaaccacccaactatctataaacctagccatggccatccccttatgagcgggcgcagtgattataggctttcgctctaagattaaaaatgccctagcccacttcttaccacaaggcacacctacaccccttatccccatactagttattatcgaaaccatcagcctactcattcaaccaatagccctggccgtacgcctaaccgctaacattactgcaggccacctactcatgcacctaattggaagcgccaccctagcaatatcaaccattaaccttccctctacacttatcatcttcacaattctaattctactgactatcctagaaatcgctgtcgccttaatccaagcctacgttttcacacttctagtaagcctctacctgcacgacaacacataatgacccaccaatcacatgcctatcatatagtaaaacccagcccatgacccctaacaggggccctctcagccctcctaatgacctccggcctagccatgtgatttcacttccactccataacgctcctcatactaggcctactaaccaacacactaaccatataccaatgatggcgcgatgtaacacgagaaagcacataccaaggccaccacacaccacctgtccaaaaaggccttcgatacgggataatcctatttattacctcagaagtttttttcttcgcaggatttttctgagccttttaccactccagcctagcccctaccccccaattaggagggcactggcccccaacaggcatcaccccgctaaatcccctagaagtcccactcctaaacacatccgtattactcgcatcaggagtatcaatcacctgagctcaccatagtctaatagaaaacaaccgaaaccaaataattcaagcactgcttattacaattttactgggtctctattttaccctcctacaagcctcagagtacttcgagtctcccttcaccatttccgacggcatctacggctcaacattttttgtagccacaggcttccacggacttcacgtcattattggctcaactttcctcactatctgcttcatccgccaactaatatttcactttacatccaaacatcactttggcttcgaagccgccgcctgatactggcattttgtagatgtggtttgactatttctgtatgtctccatctattgatgagggtcttactcttttagtataaatagtaccgttaacttccaattaactagttttgacaacattcaaaaaagagtaataaacttcgccttaattttaataatcaacaccctcctagccttactactaataattattacattttgactaccacaactcaacggctacatagaaaaatccaccccttacgagtgcggcttcgaccctatatcccccgcccgcgtccctttctccataaaattcttcttagtagctattaccttcttattatttgatctagaaattgccctccttttacccctaccatgagccctacaaacaactaacctgccactaatagttatgtcatccctcttattaatcatcatcctagccctaagtctggcctatgagtgactacaaaaaggattagactgaaccgaattggtatatagtttaaacaaaacgaatgatttcgactcattaaattatgataatcatatttaccaaatgcccctcatttacataaatattatactagcatttaccatctcacttctaggaatactagtatatcgctcacacctcatatcctccctactatgcctagaaggaataatactatcgctgttcattatagctactctcataaccctcaacacccactccctcttagccaatattgtgcctattgccatactagtctttgccgcctgcgaagcagcggtgggcctagccctactagtctcaatctccaacacatatggcctagactacgtacataacctaaacctactccaatgctaaaactaatcgtcccaacaattatattactaccactgacatgactttccaaaaaacacataatttgaatcaacacaaccacccacagcctaattattagcatcatccctctactattttttaaccaaatcaacaacaacctatttagctgttccccaaccttttcctccgaccccctaacaacccccctcctaatactaactacctgactcctacccctcacaatcatggcaagccaacgccacttatccagtgaaccactatcacgaaaaaaactctacctctctatactaatctccctacaaatctccttaattataacattcacagccacagaactaatcatattttatatcttcttcgaaaccacacttatccccaccttggctatcatcacccgatgaggcaaccagccagaacgcctgaacgcaggcacatacttcctattctacaccctagtaggctcccttcccctactcatcgcactaatttacactcacaacaccctaggctcactaaacattctactactcactctcactgcccaagaactatcaaactcctgagccaacaacttaatatgactagcttacacaatagcttttatagtaaagatacctctttacggactccacttatgactccctaaagcccatgtcgaagcccccatcgctgggtcaatagtacttgccgcagtactcttaaaactaggcggctatggtataatacgcctcacactcattctcaaccccctgacaaaacacatagcctaccccttccttgtactatccctatgaggcataattataacaagctccatctgcctacgacaaacagacctaaaatcgctcattgcatactcttcaatcagccacatagccctcgtagtaacagccattctcatccaaaccccctgaagcttcaccggcgcagtcattctcataatcgcccacgggcttacatcctcattactattctgcctagcaaactcaaactacgaacgcactcacagtcgcatcataatcctctctcaaggacttcaaactctactcccactaatagctttttgatgacttctagcaagcctcgctaacctcgccttaccccccactattaacctactgggagaactctctgtgctagtaaccacgttctcctgatcaaatatcactctcctacttacaggactcaacatactagtcacagccctatactccctctacatatttaccacaacacaatggggctcactcacccaccacattaacaacataaaaccctcattcacacgagaaaacaccctcatgttcatacacctatcccccattctcctcctatccctcaaccccgacatcattaccgggttttcctcttgtaaatatagtttaaccaaaacatcagattgtgaatctgacaacagaggcttacgaccccttatttaccgagaaagctcacaagaactgctaactcatgcccccatgtctaacaacatggctttctcaacttttaaaggataacagctatccattggtcttaggccccaaaaattttggtgcaactccaaataaaagtaataaccatgcacactactataaccaccctaaccctgacttccctaattccccccatccttaccaccctcgttaaccctaacaaaaaaaactcatacccccattatgtaaaatccattgtcgcatccacctttattatcagtctcttccccacaacaatattcatgtgcctagaccaagaagttattatctcgaactgacactgagccacaacccaaacaacccagctctccctaagcttcaaactagactacttctccataatattcatccctgtagcattgttcgttacatggtccatcatagaattctcactgtgatatataaactcagacccaaacattaatcagttcttcaaatatctactcatcttcctaattaccatactaatcttagttaccgctaacaacctattccaactgttcatcggctgagagggcgtaggaattatatccttcttgctcatcagttgatgatacgcccgagcagatgccaacacagcagccattcaagcaatcctatacaaccgtatcggcgatatcggtttcatcctcgccttagcatgatttatcctacactccaactcatgagacccacaacaaatagcccttctaaacgctaatccaagcctcaccccactactaggcctcctcctagcagcagcaggcaaatcagcccaattaggtctccacccctgactcccctcagccatagaaggccccaccccagtctcagccctactccactcaagcactatagttgtagcaggaatcttcttactcatccgcttccaccccctagcagaaaatagcccactaatccaaactctaacactatgcttaggcgctatcaccactctgttcgcagcagtctgcgcccttacacaaaatgacatcaaaaaaatcgtagccttctccacttcaagtcaactaggactcataatagttacaatcggcatcaaccaaccacacctagcattcctgcacatctgtacccacgccttcttcaaagccatactatttatgtgctccgggtccatcatccacaaccttaacaatgaacaagatattcgaaaaataggaggactactcaaaaccatacctctcacttcaacctccctcaccattggcagcctagcattagcaggaatacctttcctcacaggtttctactccaaagaccacatcatcgaaaccgcaaacatatcatacacaaacgcctgagccctatctattactctcatcgctacctccctgacaagcgcctatagcactcgaataattcttctcaccctaacaggtcaacctcgcttccccacccttactaacattaacgaaaataaccccaccctactaaaccccattaaacgcctggcagccggaagcctattcgcaggatttctcattactaacaacatttcccccgcatcccccttccaaacaacaatccccctctacctaaaactcacagccctcgctgtcactttcctaggacttctaacagccctagacctcaactacctaaccaacaaacttaaaataaaatccccactatgcacattttatttctccaacatactcggattctaccctagcatcacacaccgcacaatcccctatctaggccttcttacgagccaaaacctgcccctactcctcctagacctaacctgactagaaaagctattacctaaaacaatttcacagcaccaaatctccacctccatcatcacctcaacccaaaaaggcataattaaactttacttcctctctttcttcttcccactcatcctaaccctactcctaatcacataacctattcccccgagcaatctcaattacaatatatacaccaacaaacaatgttcaaccagtaactactactaatcaacgcccataatcatacaaagcccccgcaccaataggatcctcccgaatcaaccctgacccctctccttcataaattattcagcttcctacactattaaagtttaccacaaccaccaccccatcatactctttcacccacagcaccaatcctacctccatcgctaaccccactaaaacactcaccaagacctcaacccctgacccccatgcctcaggatactcctcaatagccatcgctgtagtatatccaaagacaaccatcattccccctaaataaattaaaaaaactattaaacccatataacctcccccaaaattcagaataataacacacccgaccacaccgctaacaatcaatactaaacccccataaataggagaaggcttagaagaaaaccccacaaaccccattactaaacccacactcaacagaaacaaagcatacatcattattctcgcacggactacaaccacgaccaatgatatgaaaaaccatcgttgtatttcaactacaagaacaccaatgaccccaatacgcaaaactaaccccctaataaaattaattaaccactcattcatcgacctccccaccccatccaacatctccgcatgatgaaacttcggctcactccttggcgcctgcctgatcctccaaatcaccacaggactattcctagccatgcactactcaccagacgcctcaaccgccttttcatcaatcgcccacatcactcgagacgtaaattatggctgaatcatccgctaccttcacgccaatggcgcctcaatattctttatctgcctcttcctacacatcgggcgaggcctatattacggatcatttctctactcagaaacctgaaacatcggcattatcctcctgcttgcaactatagcaacagccttcataggctatgtcctcccgtgaggccaaatatcattctgaggggccacagtaattacaaacttactatccgccatcccatacattgggacagacctagttcaatgaatctgaggaggctactcagtagacagtcccaccctcacacgattctttacctttcacttcatcttgcccttcattattgcagccctagcagcactccacctcctattcttgcacgaaacgggatcaaacaaccccctaggaatcacctcccattccgataaaatcaccttccacccttactacacaatcaaagacgccctcggcttacttctcttccttctctccttaataacattaacactattctcaccagacctcctaggcgacccagacaattataccctagccaaccccttaaacacccctccccacatcaagcccgaatgatatttcctattcgcctacacaattctccgatccgtccctaacaaactaggaggcgtccttgccctattactatccatcctcatcctagcaataatccccatcctccatatatccaaacaacaaagcataatatttcgcccactaagccaatcactttattgactcctagccgcagacctcctcattctaacctgaatcggaggacaaccagtaagctacccttttaccatcattggacaagtagcatccgtactatacttcacaacaatcctaatcctaataccaactatctccctaattgaaaacaaaatactcaaatgggcctgtccttgtagtataaactaatacaccagtcttgtaaaccggagatgaaaacctttttccaaggacaaatcagagaaaaagtctttaactccaccattagcacccaaagctaagattctaatttaaactattctctgttctttcatggggaagcagatttgggtaccacccaagtattgactcacccatcaacaaccgctatgtatttcgtacattactgccagccaccatgaatattgtacggtaccataaatacttgaccacctgtagtacataaaaacccaatccacatcaaaaccccctccccatgcttacaagcaagtacagcaatcaaccctcaactatcacacatcaactgcaactccaaagccacccctcacccactaggataccaacaaacctacccacccttaacagtacatagtacataaagccatttaccgtacatagcacattacagtcaaatcccttctcgtccccatggatgacccccctcagataggggtcccttgaccaccatcctccgtgaaatcaatatcccgcacaagagtgctactctcctcgctccgggcccataacacttgggggtagctaaagtgaactgtatccgacatctggttcctacttcagggccataaagcctaaatagcccacacgttccccttaaataagacatcacgatg

SEQ ID NO: 318 - DNA, 16570 bp, Homo sapiens mitochondrial
  3108: "n" refers to a nucleotide at position 3107 of the Cambridge Reference Sequence (CRS, Anderson et al. 1981 Nature 290:457-465), later determined to be absent from the human mtDNA sequence according to the revised CRS (rCRS, Andrews et al. 1999 Nature Genetics 23:147); "n" therefore represents a single nucleotide deletion at a position corresponding to nucleotide 3107 of SEQ ID NO:1 as provided herein.
gatcacaggtctatcaccctattaaccactcacgggagctctccatgcatttggtattttcgtctggggggtgtgcacgcgatagcattgcgagacgctggagccggagcaccctatgtcgcagtatctgtctttgattcctgcctcatcctattatttatcgcacctacgttcaatattacagacgaacatacttactaaagtgtgttaattaattaatgcttgtaagacataataataacaattgaatgtctgcacagccgctttccacacagacatcataacaaaaaattttcaccaaaccccccctcccccgccttctggccacagcacttaaacacatctctgccaaaccccaaaaacaaagaaccctaacaccagcctaaccagatttcaaattttatcttttggcggtatgcacttttaacagtcaccccccaactaacacattattttcccctctcactcccatactactaatctcatcaacacaacccccgcccatcctacccagcacacacacaccgctgctaaccccataccccgaaccaaccaaaccccaaagacaccccccacagtttatgtagcttacctcctcaaagcaatacactgaaaatgtttagacgggctcacatcaccccataaacaaataggtttggtcctagcctttctattagctcttagtaagattacacatgcaagcatccccgttccagtgagttcaccctctaaatcaccacgatcaaaagggacaagcatcaagcacgcagcaatgcagctcaaaacgcttagcctagccacacccccacgggaaacagcagtgattaacctttagcaataaacgaaagtttaactaagctatactaaccccagggttggtcaatttcgtgccagccaccgcggtcacacgattaacccaagtcaatagaagccggcgtaaagagtgttttagatcaccccctccccaataaagctaaaactcacctgagttgtaaaaaactccagttgacacaaaatagactacgaaagtggctttaacatatctgaacacacaatagctaagacccaaactgggattagataccccactatgcttagccctaaacctcaacagttaaatcaacaaaactgctcgccagaacactacgagccacagcttaaaactcaaaggacctggcggtgcttcatatccctctagaggagcctgttctgtaatcgataaaccccgatcaacctcaccacctcttgctcagcctatataccgccatcttcagcaaaccctgatgaaggctacaaagtaagcgcaagtacccacgtaaagacgttaggtcaaggtgtagcccatgaggtggcaagaaatgggctacattttctaccccagaaaactacgatagcccttatgaaacttaagggtcgaaggtggatttagcagtaaactgagagtagagtgcttagttgaacagggccctgaagcgcgtacacaccgcccgtcaccctcctcaagtatacttcaaaggacatttaactaaaacccctacgcatttatatagaggagacaagtcgtaacatggtaagtgtactggaaagtgcacttggacgaaccagagtgtagcttaacacaaagcacccaacttacacttaggagatttcaacttaacttgaccgctctgagctaaacctagccccaaacccactccaccttactaccagacaaccttagccaaaccatttacccaaataaagtataggcgatagaaattgaaacctggcgcaatagatatagtaccgcaagggaaagatgaaaaattataaccaagcataatatagcaaggactaacccctataccttctgcataatgaattaactagaaataactttgcaaggagagccaaagctaagacccccgaaaccagacgagctacctaagaacagctaaaagagcacacccgtctatgtagcaaaatagtgggaagatttataggtagaggcgacaaacctaccgagcctggtgatagctggttgtccaagatagaatcttagttcaactttaaatttgcccacagaaccctctaaatccccttgtaaatttaactgttagtccaaagaggaacagctctttggacactaggaaaaaaccttgtagagagagtaaaaaatttaacacccatagtaggcctaaaagcagccaccaattaagaaagcgttcaagctcaacacccactacctaaaaaatcccaaacatataactgaactcctcacacccaattggaccaatctatcaccctatagaagaactaatgttagtataagtaacatgaaaacattctcctccgcataagcctgcgtcagattaaaacactgaactgacaattaacagcccaatatctacaatcaaccaacaagtcattattaccctcactgtcaacccaacacaggcatgctcataaggaaaggttaaaaaaagtaaaaggaactcggcaaatcttaccccgcctgtttaccaaaaacatcacctctagcatcaccagtattagaggcaccgcctgcccagtgacacatgtttaacggccgcggtaccctaaccgtgcaaaggtagcataatcacttgttccttaaatagggacctgtatgaatggctccacgagggttcagctgtctcttacttttaaccagtgaaattgacctgcccgtgaagaggcgggcatgacacagcaagacgagaagaccctatggagctttaatttattaatgcaaacagtacctaacaaacccacaggtcctaaactaccaaacctgcattaaaaatttcggttggggcgacctcggagcagaacccaacctccgagcagtacatgctaagacttcaccagtcaaagcgaactactatactcaattgatccaataacttgaccaacggaacaagttaccctagggataacagcgcaatcctattctagagtccatatcaacaatagggtttacgacctcgatgttggatcaggacatcccaatggtgcagccgctattaaaggttcgtttgttcaacgattaaagtcctacgtgatctgagttcagaccggagtaatccaggtcggtttctatctacnttcaaattcctccctgtacgaaaggacaagagaaataaggcctacttcacaaagcgccttcccccgtaaatgatatcatctcaacttagtattatacccacacccacccaagaacagggtttgttaagatggcagagcccggtaatcgcataaaacttaaaactttacagtcagaggttcaattcctcttcttaacaacatacccatggccaacctcctactcctcattgtacccattctaatcgcaatggcattcctaatgcttaccgaacgaaaaattctaggctatatacaactacgcaaaggccccaacgttgtaggcccctacgggctactacaacccttcgctgacgccataaaactcttcaccaaagagcccctaaaacccgccacatctaccatcaccctctacatcaccgccccgaccttagctctcaccatcgctcttctactatgaacccccctccccatacccaaccccctggtcaacctcaacctaggcctcctatttattctagccacctctagcctagccgtttactcaatcctctgatcagggtgagcatcaaactcaaactacgccctgatcggcgcactgcgagcagtagcccaaacaatctcatatgaagtcaccctagccatcattctactatcaacattactaataagtggctcctttaacctctccacccttatcacaacacaagaacacctctgattactcctgccatcatgacccttggccataatatgatttatctccacactagcagagaccaaccgaacccccttcgaccttgccgaaggggagtccgaactagtctcaggcttcaacatcgaatacgccgcaggccccttcgccctattcttcatagccgaatacacaaacattattataataaacaccctcaccactacaatcttcctaggaacaacatatgacgcactctcccctgaactctacacaacatattttgtcaccaagaccctacttctaacctccctgttcttatgaattcgaacagcatacccccgattccgctacgaccaactcatacacctcctatgaaaaaacttcctaccactcaccctagcattacttatatgacatgtctccatacccattacaatctccagcattccccctcaaacctaagaaatatgtctgataaaagagttactttgatagagtaaataataggagcttaaacccccttatttctaggactatgagaatcgaacccatccctgagaatccaaaattctccgtgccacctatcacaccccatcctaaagtaaggtcagctaaataagctatcgggcccataccccgaaaatgttggttatacccttcccgtactaattaatcccctggcccaacccgtcatctactctaccatctttgcaggcacactcatcacagcgctaagctcgcactgattttttacctgagtaggcctagaaataaacatgctagcttttattccagttctaaccaaaaaaataaaccctcgttccacagaagctgccatcaagtatttcctcacgcaagcaaccgcatccataatccttctaatagctatcctcttcaacaatatactctccggacaatgaaccataaccaatactaccaatcaatactcatcattaataatcataatggctatagcaataaaactaggaatagccccctttcacttctgagtcccagaggttacccaaggcacccctctgacatccggcctgcttcttctcacatgacaaaaactagcccccatctcaatcatataccaaatctctccctcactaaacgtaagccttctcctcactctctcaatcttatccatcatagcaggcagttgaggtggattaaaccaaacccagctacgcaaaatcttagcatactcctcaattacccacataggatgaataatagcagttctaccgtacaaccctaacataaccattcttaatttaactatttatattatcctaactactaccgcattcctactactcaacttaaactccagcaccacgaccctactactatctcgcacctgaaacaagctaacatgactaacacccttaattccatccaccctcctctccctaggaggcctgcccccgctaaccggctttttgcccaaatgggccattatcgaagaattcacaaaaaacaatagcctcatcatccccaccatcatagccaccatcaccctccttaacctctacttctacctacgcctaatctactccacctcaatcacactactccccatatctaacaacgtaaaaataaaatgacagtttgaacatacaaaacccaccccattcctccccacactcatcgcccttaccacgctactcctacctatctccccttttatactaataatcttatagaaatttaggttaaatacagaccaagagccttcaaagccctcagtaagttgcaatacttaatttctgtaacagctaaggactgcaaaaccccactctgcatcaactgaacgcaaatcagccactttaattaagctaagcccttactagaccaatgggacttaaacccacaaacacttagttaacagctaagcaccctaatcaactggcttcaatctacttctcccgccgccgggaaaaaaggcgggagaagccccggcaggtttgaagctgcttcttcgaatttgcaattcaatatgaaaatcacctcggagctggtaaaaagaggcctaacccctgtctttagatttacagtccaatgcttcactcagccattttacctcacccccactgatgttcgccgaccgttgactattctctacaaaccacaaagacattggaacactatacctattattcggcgcatgagctggagtcctaggcacagctctaagcctccttattcgagccgagctgggccagccaggcaaccttctaggtaacgaccacatctacaacgttatcgtcacagcccatgcatttgtaataatcttcttcatagtaatacccatcataatcggaggctttggcaactgactagttcccctaataatcggtgcccccgatatggcgtttccccgcataaacaacataagcttctgactcttacctccctctctcctactcctgctcgcatctgctatagtggaggccggagcaggaacaggttgaacagtctaccctcccttagcagggaactactcccaccctggagcctccgtagacctaaccatcttctccttacacctagcaggtgtctcctctatcttaggggccatcaatttcatcacaacaattatcaatataaaaccccctgccataacccaataccaaacgcccctcttcgtctgatccgtcctaatcacagcagtcctacttctcctatctctcccagtcctagctgctggcatcactatactactaacagaccgcaacctcaacaccaccttcttcgaccccgccggaggaggagaccccattctataccaacacctattctgatttttcggtcaccctgaagtttatattcttatcctaccaggcttcggaataatctcccatattgtaacttactactccggaaaaaaagaaccatttggatacataggtatggtctgagctatgatatcaattggcttcctagggtttatcgtgtgagcacaccatatatttacagtaggaatagacgtagacacacgagcatatttcacctccgctaccataatcatcgctatccccaccggcgtcaaagtatttagctgactcgccacactccacggaagcaatatgaaatgatctgctgcagtgctctgagccctaggattcatctttcttttcaccgtaggtggcctgactggcattgtattagcaaactcatcactagacatcgtactacacgacacgtactacgttgtagctcacttccactatgtcctatcaataggagctgtatttgccatcataggaggcttcattcactgatttcccctattctcaggctacaccctagaccaaacctacgccaaaatccatttcactatcatattcatcggcgtaaatctaactttcttcccacaacactttctcggcctatccggaatgccccgacgttactcggactaccccgatgcatacaccacatgaaacatcctatcatctgtaggctcattcatttctctaacagcagtaatattaataattttcatgatttgagaagccttcgcttcgaagcgaaaagtcctaatagtagaagaaccctccataaacctggagtgactatatggatgccccccaccctaccacacattcgaagaacccgtatacataaaatctagacaaaaaaggaaggaatcgaaccccccaaagctggtttcaagccaaccccatggcctccatgactttttcaaaaaggtattagaaaaaccatttcataactttgtcaaagttaaattataggctaaatcctatatatcttaatggcacatgcagcgcaagtaggtctacaagacgctacttcccctatcatagaagagcttatcacctttcatgatcacgccctcataatcattttccttatctgcttcctagtcctgtatgcccttttcctaacactcacaacaaaactaactaatactaacatctcagacgctcaggaaatagaaaccgtctgaactatcctgcccgccatcatcctagtcctcatcgccctcccatccctacgcatcctttacataacagacgaggtcaacgatccctcccttaccatcaaatcaattggccaccaatggtactgaacctacgagtacaccgactacggcggactaatcttcaactcctacatacttcccccattattcctagaaccaggcgacctgcgactccttgacgttgacaatcgagtagtactcccgattgaagcccccattcgtataataattacatcacaagacgtcttgcactcatgagctgtccccacattaggcttaaaaacagatgcaattcccggacgtctaaaccaaaccactttcaccgctacacgaccgggggtatactacggtcaatgctctgaaatctgtggagcaaaccacagtttcatgcccatcgtcctagaattaattcccctaaaaatctttgaaatagggcccgtatttaccctatagcaccccctctaccccctctagagcccactgtaaagctaacttagcattaaccttttaagttaaagattaagagaaccaacacctctttacagtgaaatgccccaactaaatactaccgtatggcccaccataattacccccatactccttacactattcctcatcacccaactaaaaatattaaacacaaactaccacctacctccctcaccaaagcccataaaaataaaaaattataacaaaccctgagaaccaaaatgaacgaaaatctgttcgcttcattcattgcccccacaatcctaggcctacccgccgcagtactgatcattctatttccccctctattgatccccacctccaaatatctcatcaacaaccgactaatcaccacccaacaatgactaatcaaactaacctcaaaacaaatgataaccatacacaacactaaaggacgaacctgatctcttatactagtatccttaatcatttttattgccacaactaacctcctcggactcctgcctcactcatttacaccaaccacccaactatctataaacctagccatggccatccccttatgagcgggcgcagtgattataggctttcgctctaagattaaaaatgccctagcccacttcttaccacaaggcacacctacaccccttatccccatactagttattatcgaaaccatcagcctactcattcaaccaatagccctggccgtacgcctaaccgctaacattactgcaggccacctactcatgcacctaattggaagcgccaccctagcaatatcaaccattaaccttccctctacacttatcatcttcacaattctaattctactgactatcctagaaatcgctgtcgccttaatccaagcctacgttttcacacttctagtaagcctctacctgcacgacaacacataatgacccaccaatcacatgcctatcatatagtaaaacccagcccatgacccctaacaggggccctctcagccctcctaatgacctccggcctagccatgtgatttcacttccactccataacgctcctcatactaggcctactaaccaacacactaaccatataccaatgatggcgcgatgtaacacgagaaagcacataccaaggccaccacacaccacctgtccaaaaaggccttcgatacgggataatcctatttattacctcagaagtttttttcttcgcaggatttttctgagccttttaccactccagcctagcccctaccccccaattaggagggcactggcccccaacaggcatcaccccgctaaatcccctagaagtcccactcctaaacacatccgtattactcgcatcaggagtatcaatcacctgagctcaccatagtctaatagaaaacaaccgaaaccaaataattcaagcactgcttattacaattttactgggtctctattttaccctcctacaagcctcagagtacttcgagtctcccttcaccatttccgacggcatctacggctcaacattttttgtagccacaggcttccacggacttcacgtcattattggctcaactttcctcactatctgcttcatccgccaactaatatttcactttacatccaaacatcactttggcttcgaagccgccgcctgatactggcattttgtagatgtggtttgactatttctgtatgtctccatctattgatgagggtcttactcttttagtataaatagtaccgttaacttccaattaactagttttgacaacattcaaaaaagagtaataaacttcgccttaattttaataaccaacaccctcctagccttactactaataattattacattttgactaccacaactcaacggctacatagaaaaatccaccccttacgagtgcggcttcgaccctatatcccccgcccgcgtccctttctccataaaattcttcttagtagctattaccttcttattatttgatctagaaattgccctccttttacccctaccatgagccctacaaacaactaacctgccactaatagttatgtcatccctcttattaatcatcatcctagccctaagtctggcctatgagtgactacaaaaaggattagactgaaccgaattggtatatagtttaaacaaaacgaatgatttcgactcattaaattatgataatcatatttaccaaatgcccctcatttacataaatattatactagcatttaccatctcacttctaggaatactagtatatcgctcacacctcatatcctccctactatgcctagaaggaataatactatcgctgttcattatagctactctcataaccctcaacacccactccctcttagccaatattgtgcctattgccatactagtctttgccgcctgcgaagcagcggtgggcctagccctactagtctcaatctccaacacatatggcctagactacgtacataacctaaacctactccaatgctaaaactaatcgtcccaacaattatattactaccactgacatgactttccaaaaaacacataatttgaatcaacacaaccacccacagcctaattattagcatcatccctctactattttttaaccaaatcaacaacaacctatttagctgttccccaaccttttcctccgaccccctaacaacccccctcctaatactaactacctgactcctacccctcacaatcatggcaagccaacgccacttatccagtgaaccactatcacgaaaaaaactctacctctctatactaatctccctacaaatctccttaattataacattcacagccacagaactaatcatattttatatcttcttcgaaaccacacttatccccaccttggctatcatcacccgatgaggcaaccagccagaacgcctgaacgcaggcacatacttcctattctacaccctagtaggctcccttcccctactcatcgcactgatttacactcacaacaccctaggctcactaaacattctactactcactctcactgcccaagaactatcaaactcctgagccaacaacttaatatgactagcttacacaatagcttttatagtaaagatacctctttacggactccacttatgactccctaaagcccatgtcgaagcccccatcgctgggtcaatagtacttgccgcagtactcttaaaactaggcggctatggtataatacgcctcacactcattctcaaccccctgacaaaacacatagcctaccccttccttgtactatccctatgaggcataattataacaagctccatctgcctacgacaaacagacctaaaatcgctcattgcatactcttcaatcagccacatagccctcgtagtaacagccattctcatccaaaccccctgaagcttcaccggcgcagtcattctcataatcgcccacggacttacatcctcattactattctgcctagcaaactcaaactacgaacgcactcacagtcgcatcataatcctctctcaaggacttcaaactctactcccactaatagctttttgatgacttctagcaagcctcgctaacctcgccttaccccccactattaacctactgggagaactctctgtgctagtaaccacgttctcctgatcaaatatcactctcctacttacaggactcaacatactagtcacagccctatactccctctacatatttaccacaacacaatggggctcactcacccaccacattaacaacataaaaccctcattcacacgagaaaacaccctcatgttcatacacctatcccccattctcctcctatccctcaaccccgacatcattaccgggttttcctcttgtaaatatagtttaaccaaaacatcagattgtgaatctgacaacagaggcttacgaccccttatttaccgagaaagctcacaagaactgctaactcatgcccccatgtctaacaacatggctttctcaacttttaaaggataacagctatccattggtcttaggccccaaaaattttggtgcaactccaaataaaagtaataaccatgcacactactataaccaccctaaccctgacttccctaattccccccatccttaccaccctcgttaaccctaacaaaaaaaactcatacccccattatgtaaaatccattgtcgcatccacctttattatcagtctcttccccacaacaatattcatgtgcctagaccaagaagttattatctcgaactgacactgagccacaacccaaacaacccagctctccctaagcttcaaactagactacttctccataatattcatccctgtggcattgttcgttacatggtccatcatagaattctcactgtgatatataaactcagacccaaacattaatcagttcttcaaatatctactcatcttcctaattaccatactaatcttagttaccgctaacaacctattccaactgttcatcggctgagagggcgtaggaattatatccttcttgctcatcagttgatgatacgcccgagcagatgccaacacagcagccattcaagcaatcctatacaaccgtatcggcgatatcggtttcatcctcgccttagcatgatttatcctacactccaactcatgagacccacaacaaatagcccttctaaacgctaatccaagcctcaccccactactaggcctcctcctagcagcagcaggcaaatcagcccaattaggtctccacccctgactcccctcagccatagaaggccccaccccagtctcagccctactccactcaagcactatagttgtagcaggaatcttcttactcatccgcttccaccccctagcagaaaatagcccactaatccaaactctaacactatgcttaggcgctatcaccactctgttcgcagcagtctgcgcccttacacaaaatgacatcaaaaaaatcgtagccttctccacttcaagtcaactaggactcataatagttacaatcggcatcaaccaaccacacctagcattcctgcacatctgtacccacgccttcttcaaagccatactatttatgtgctccgggtccatcatccacaaccttaacaatgaacaagatattcgaaaaataggaggactactcaaaaccatacctctcacttcaacctccctcaccattggcagcctagcattagcaggaatacctttcctcacaggtttctactccaaagaccacatcatcgaaaccgcaaacatatcatacacaaacgcctgagccctatctattactctcatcgctacctccctgacaagcgcctatagcactcgaataattcttctcaccctaacaggtcaacctcgcttccccacccttactaacattaacgaaaataaccccaccctactaaaccccattaaacgcctgacagccggaagcctattcgcaggatttctcattactaacaacatttcccccgcatcccccttccaaacaacaatccccctctacctaaaactcacagccctcgctgtcactttcctaggacttctaacagccctagacctcaactacctaaccaacaaacttaaaataaaatccccactatgcacattttatttctccaacatactcggattctaccctagcatcacacaccgcacaatcccctatctaggccttcttacgagccaaaacctgcccctactcctcctagacctaacctgactagaaaagctattacctaaaacaatttcacagcaccaaatctccacctccatcatcacctcaacccaaaaaggcataattaaactttacttcctctctttcttcttcccactcatcctaaccctactcctaatcacataacctattcccccgagcaatctcaattacaatatatacaccaacaaacaatgttcaaccagtaactactactaatcaacgcccataatcatacaaagcccccgcaccaataggatcctcccgaatcaaccctgacccctctccttcataaattattcagcttcctacactattaaagtttaccacaaccaccaccccatcatactctttcacccacagcaccaatcctacctccatcgctaaccccactaaaacactcaccaagacctcaacccctgacccccatgcctcaggatactcctcaatagccatcgctgtagtatatccaaagacaaccatcattccccctaaataaattaaaaaaactattaaacccatataacctcccccaaaattcagaataataacacacccgaccacaccgctaacaatcaatactaaacccccataaataggagaaggcttagaagaaaaccccacaaaccccattactaaacccacactcaacagaaacaaagcatacatcattattctcgcacggactacaaccacgaccaatgatatgaaaaaccatcgttgtatttcaactacaagaacaccaatgaccccaatacgcaaaattaaccccctaataaaattaattaaccactcactcatcgacctccccaccccatccaacatctccgcatgatgaaacttcggctcactccttggcgcctgcctgatcctccaaatcaccacaggactattcctagccatgcactactcaccagacgcctcaaccgccttttcatcaatcgcccacatcactcgagacgtaaattatggctgaatcatccgctaccttcacgccaatggcgcctcaatattctttatctgcctcttcctacacatcgggcgaggcctatattacggatcatttctctactcagaaacctgaaacatcggcattatcctcctgcttgcaactatagcaacagccttcataggctatgtcctcccgtgaggccaaatatcattctgaggggccacagtaattacaaacttactatccgccatcccatacattgggacagacctagttcaatgaatctgaggaggctactcagtagacagtcccaccctcacacgattctttacctttcacttcatcttgcccttcattattgcagccctagcagcactccacctcctattcttgcacgaaacgggatcaaacaaccccctaggaatcacctcccattccgataaaatcaccttccacccttactacacaatcaaagacgccctcggcttacttctcttcattctctccttaatgacattaacactattctcaccagacctcctaggcgacccagacaattataccctagccaaccccttaaacacccctccccacatcaagcccgaatgatatttcctattcgcctacacaattctccgatccgtccctaacaaactaggaggcgtccttgccctattactatccatcctcatcctagcaataatccccatcctccatatatccaaacaacaaagcataatatttcgcccactaagccaatcactttattgactcctagccgcagacctcctcattctaacctgaatcggaggacaaccagtaagctacccttttaccatcattggacaagtagcatccgtactatacttcacaacaatcctaatcctaataccaactatctccctaattgaaaacaaaatactcaaatgggcctgtccttgtagtataaactaatacaccagtcttgtaaaccggagatgaaaacctttttccaaggacaaatcagagaaaaagtctttaactccaccattagcacccaaagctaagattctaatttaaactattctctgttctttcatggggaagcagatttgggtaccacccaagtattgacttacccatcaacaaccgctatgtatttcgtacattactgccagccaccatgaatattgcacggtaccataaatacttgaccacctgtagtacataaaaacccaatccacatcaaaaccccctccccatgcttacaagcaagtacagcaatcaaccctcaactatcacacatcaactgcaactccaaagccacccctcacccactaggataccaacaaacctacccacccttaacagtacatagtacataaaaccatttaccgtacatagcacattacagtcaaatcccttctcgtccccatggatgacccccctcagataggggtcccttgaccaccatcctccgtgaaatcaatatcccgcacaagagtgctactctcctcgctccgggcccataacacttgggggtagctaaagtgaactgtatccgacatctggttcctacttcagggtcataaagcctaaatagcccacacgttccccttaaataagacatcacgatg

SEQ ID NO: 319 - DNA, 16570 bp, Homo sapiens mitochondrial
  3108: "n" refers to a nucleotide at position 3107 of the Cambridge Reference Sequence (CRS, Anderson et al. 1981 Nature 290:457-465), later determined to be absent from the human mtDNA sequence according to the revised CRS (rCRS, Andrews et al. 1999 Nature Genetics 23:147); "n" therefore represents a single nucleotide deletion at a position corresponding to nucleotide 3107 of SEQ ID NO:1 as provided herein.
gatcacaggtctatcaccctattaaccactcacgggagctctccatgcatttggtattttcgtctggggggtgtgcacgcgatagcattgcgagacgctggagccggagcaccctatgtcgcagtatctgtctttgattcctgcctcatcccattatttatcgcacctacgttcaatattacaggcgaacatacttactaaagtgtgttaattaattaatgcttgtaggacataataataacaattgaatgtctgcacagccgctttccacacagacatcataacaaaaaatttccaccaaaccccccctcccccgccttctggccacagcacttaaacacatctctgccaaaccccaaaaacaaagaaccctaacaccagcctaaccagatttcaaattttatcttttggcggtatgcacttttaacagtcaccccccaactaacacattattttcccctcccactcccatactactaatctcatcaatacaacccccgcccatcctacccagcacacacacaccgctgctaaccccataccccgaaccaaccaaaccccaaagacaccccccacagtttatgtagcttacctcctcaaagcaatacactgaaaatgtttagacgggctcacatcaccccataaacaaataggtttggtcctagcctttctattagctcttagtaagattacacatgcaagcatccccattccagtgagttcaccctctaaatcaccacgatcaaaagggacaagcatcaagcacgcagcaatgcagctcaaaacgcttagcctagccacacccccacgggaaacagcagtgattaacctttagcaataaacgaaagtttaactaagctatactaaccccagggttggtcaatttcgtgccagccaccgcggtcacacgattaacccaagtcaatagaaaccggcgtaaagagtgttttagatcaccccctccccaataaagctaaaactcacctgagttgtaaaaaactccagttgacacaaaatagactacgaaagtggctttaacatatctgaacacacaatagctaagacccaaactgggattagataccccactatgcttagccctaaacctcaacagttaaatcaacaaaactgctcgccagaacactacgagccacagcttaaaactcaaaggacctggcggtgcttcatatccctctagaggagcctgttctgtaatcgataaaccccgatcaacctcaccacctcttgctcagcctatataccgccatcttcagcaaaccctgatgaaggctacaaagtaagcgcaagtacccacgtaaagacgttaggtcaaggtgtagcccatgaggtggcaagaaatgggctacattttctaccccagaaaactacgatagcccttatgaaacttaagggtcgaaggtggatttagcagtaaactgagagtagagtgcttagttgaacagggccctgaagcgcgtacacaccgcccgtcaccctcctcaagtatacttcaaaggacatttaactaaaacccctacgcatttatatagaggagacaagtcgtaacatggtaagtgtactggaaagtgcacttggacgaaccagagtgtagcttaacacaaagcacccaacttacacttaggagatttcaacttaacttgaccgctctgagctaaacctagccccaaacccactccaccttactaccagacaaccttagccaaaccatttacccaaataaagtataggcgatagaaattgaaacctggcgcaatagatatagtaccgcaagggaaagatgaaaaattataaccaagcataatatagcaaggactaacccctataccttctgcataatgaattaactagaaataactttgcaaggagaaccaaagctaagacccccgaaaccagacgagctacctaagaacagctaaaagagcacacccgtctatgtagcaaaatagtgggaagatttataggtagaggcgacaaacctaccgagcctggtgatagctggttgtccaagatagaatcttagttcaactttaaatttgcccacagaaccctctaaatccccttgtaaatttaactgttagtccaaagaggaacagctctttggacactaggaaaaaaccttgtagagagagtaaaaaatttaacacccatagtaggcctaaaagcagccaccaattaagaaagcgttcaagctcaacacccactacctaaaaaatcccaaacatataactgaactcctcacacccaattggaccaatctatcaccctatagaagaactaatgttagtataagtaacatgaaaacattctcctccgcataagcctgcgtcagattaaaacactgaactgacaattaacagcccaatatctacaatcaaccaacaagtcattattaccctcactgtcaacccaacacaggcatgctcataaggaaaggttaaaaaaagtaaaaggaactcggcaaatcttaccccgcctgtttaccaaaaacatcacctctagcatcaccagtattagaggcaccgcctgcccagtgacacatgtttaacggccgcggtaccctaaccgtgcaaaggtagcataatcacttgttccttaaatagggacctgtatgaatggctccacgagggttcagctgtctcttacttttaaccagtgaaattgacctgcccgtgaagaggcgggcatgacacagcaagacgagaagaccctatggagctttaatttattaatgcaaacagtacctaacaaacccacaggtcctaaactaccaaacctgcattaaaaatttcggttggggcgacctcggagcagaacccaacctccgagcagtacatgctaagacttcaccagtcaaagcgaactactatactcaattgatccaataacttgaccaacggaacaagttaccctagggataacagcgcaatcctattctagagtccatatcaacaatagggtttacgacctcgatgttggatcaggacatcccgatggtgcagccgctattaaaggttcgtttgttcaacgattaaagtcctacgtgatctgagttcagaccggagtaatccaggtcggtttctatctacnttcaaattcctccctgtacgaaaggacaagagaaataaggcctacttcacaaagcgccttcccccgtaaatgatatcatctcaacttagtattatacccacacccacccaagaacagggtttgttaagatggcagagcccggtaatcgcataaaacttaaaactttacagtcagaggttcaattcctcttcttaacaacatacccatggccaacctcctactcctcattgtacccattctaatcgcaatggcattcctaatgcttaccgaacgaaaaattctaggctatatacaactacgcaaaggccccaacgttgtaggcccctacgggctactacaacccttcgctgacgccataaaactcttcaccaaagagcccctaaaacccgccacatctaccatcaccctctacatcaccgccccgaccttagctctcaccatcgctcttctactatgaacccccctccccatacccaaccccctggtcaacctcaacctaggcctcctatttattctagccacctctagcctagccgtttactcaatcctctgatcagggtgagcatcaaactcaaactacgccctgatcggcgcactgcgagcagtagcccaaacaatctcatatgaagtcaccctagccatcattctactatcaacattactaataagtggctcctttaacctctccacccttatcacaacacaagaacacctctgattactcctgccatcatgacccttggccataatatgatttatctccacactagcagagaccaaccgaacccccttcgaccttgccgaaggggagtccgaactagtctcaggcttcaacatcgaatacgccgcaggccccttcgccctattcttcatagccgaatacacaaacattattataataaacaccctcaccactacaatcttcctaggaacaacatatgacgcactctcccctgaactctacacaacatattttgtcaccaagaccctacttctaacctccctgttcttatgaattcgaacagcatacccccgattccgctacgaccaactcatacacctcctatgaaaaaacttcctaccactcaccctagcattacttatatgacatgtctccatacccattacaatctccagcattccccctcaaacctaagaaatatgtctgataaaagagttactttgatagagtaaataataggagcttaaacccccttatttctaggactatgagaatcgaacccatccctgagaatccaaaattctccgtgccacctatcacaccccatcctaaagtaaggtcagctaaataagctatcgggcccataccccgaaaatgttggttatacccttcccgtactaattaatcccctggcccaacccgtcatctactctaccatctttgcaggcacactcatcacagcgctaagctcgcactgattttttacctgagtaggcctagaaataaacatgctagcttttattccagttctaaccaaaaaaataaaccctcgttccacagaagctgccatcaagtatttcctcacgcaagcaaccgcatccataatccttctaatagctatcctcttcaacaatatactctccggacaatgaaccataaccaatactaccaatcaatactcatcattaataatcataatggctatagcaataaaactaggaatagccccctttcacttctgagtcccagaggttacccaaggcacccctctgacatccggcctgcttcttctcacatgacaaaaactagcccccatctcaatcatataccaaatctctccctcactagacgtaagccttctcctcactctctcaatcttatccatcatagcaggcagttgaggtggattaaaccaaacccagctacgcaaaatcttagcatactcctcaattacccacataggatgaataatagcagttctaccgtacaaccctaacataaccattcttaatttaactatttatattatcctaactactaccgcattcctactactcaacttaaactccagcaccacaaccctactactatctcgcacctgaaacaagctaacatgactaacacccttaattccatccaccctcctctccctaggaggcctgcccccgctaaccggctttttgcccaaatgggccattatcgaagaattcacaaaaaacaatagcctcatcatccccaccatcatagccaccatcaccctccttaacctctacttctacctacgcctaatctactccacctcaatcacactactccccatatctaacaacgtaaaaataaaatgacagtttgaacatacaaaacccaccccattcctccccacactcatcgcccttaccacgctactcctacctatctccccttttatactaataatcttatagaaatttaggttaaatacagaccaagagccttcaaagccctcagtaagttgcaatacttaatttctgtaacagctaaggactgcaaaaccccactctgcatcaactgaacgcaaatcagccactttaattaagctaagcccttactagaccaatgggacttaaacccacaaacacttagttaacagctaagcaccctaatcaactggcttcaatctacttctcccgccgccgggaaaaaaggcgggagaagccccggcaggtttgaagctgcttcttcgaatttgcaattcaatatgaaaatcacctcggagctggtaaaaagaggcctaacccctgtctttagatttacagtccaatgcttcactcagccattttacctcacccccactgatgttcgccgaccgttgactattctctacaaaccacaaagacattggaacactatacctattattcggcgcatgagctggagtcctaggcacagctctaagcctccttattcgagccgagctgggccagccaggcaaccttctaggtaacgaccacatctacaacgttatcgtcacagcccatgcatttgtaataatcttcttcatagtaatacccatcataatcggaggctttggcaactgactagttcccctaataatcggtgcccccgatatggcgtttccccgcataaacaacataagcttctgactcttacctccctctctcctactcctgctcgcatctgctatagtggaggccggagcaggaacaggttgaacagtctaccctcccttagcagggaactactcccaccctggagcctccgtagacctaaccatcttctccttacacctagcaggtgtctcctctatcttaggggccatcaatttcatcacaacaattatcaatataaaaccccctgccataacccaataccaaacgcccctcttcgtctgatccgtcctaatcacagcagtcctacttctcctatctctcccagtcctagctgctggcatcactatactactaacagaccgcaacctcaacaccaccttcttcgaccccgccggaggaggagaccccattctataccaacacctattctgatttttcggtcaccctgaagtttatattcttatcctaccaggcttcggaataatctcccatattgtaacttactactccggaaaaaaagaaccatttggatacataggtatggtctgagctatgatatcaattggcttcctagggtttatcgtgtgagcacaccatatatttacagtaggaatagacgtagacacacgagcatatttcacctccgctaccataatcatcgctatccccaccggcgtcaaagtatttagctgactcgccacactccacggaagcaatatgaaatgatctgctgcagtgctctgagccctaggattcatctttcttttcaccgtaggtggcctgactggcattgtattagcaaactcatcactagacatcgtactacacgacacgtactacgttgtagctcacttccactatgtcctatcaataggagctgtatttgccatcataggaggcttcattcactgatttcccctattctcaggctacaccctagaccaaacctacgccaaaatccatttcactatcatattcatcggcgtaaatctaactttcttcccacaacactttctcggcctatccggaatgccccgacgttactcggactaccccgatgcatacaccacatgaaacatcctatcatctgtaggctcattcatttctctaacagcagtaatattaataattttcatgatttgagaagccttcgcttcgaagcgaaaagtcctaatagtagaagaaccctccataaacctggagtgactatatggatgccccccaccctaccacacattcgaagaacccgtatacataaaatctagacaaaaaaggaaggaatcgaaccccccaaagctggtttcaagccaaccccatggcctccatgactttttcaaaaaggtattagaaaaaccatttcataactttgtcaaagttaaattataggctaaatcctatatatcttaatggcacatgcagcgcaagtaggtctacaagacgctacttcccctatcatagaagagcttatcacctttcatgatcacgccctcataatcattttccttatctgcttcctagtcctgtatgcccttttcctaacactcacaacaaaactaactaatactaacatctcagacgctcaggaaatagaaaccgtctgaactatcctgcccgccatcatcctagtcctcatcgccctcccatccctacgcatcctttacataacagacgaggtcaacgatccctcccttaccatcaaatcaattggccaccaatggtactgaacctacgagtacaccgactacggcggactaatcttcaactcctacatacttcccccattattcctagaaccaggcgacctgcgactccttgacgttgacaatcgagtagtactcccgattgaagcccccattcgtataataattacatcacaagacgtcttgcactcatgagctgtccccacattaggcttaaaaacagatgcaattcccggacgtctaaaccaaaccactttcaccgctacacgaccgggggtatactacggtcaatgctctgaaatctgtggagcaaaccacagtttcatgcccatcgtcctagaattaattcccctaaaaatctttgaaatagggcccgtatttaccctatagcaccccctctaccccctctagagcccactgtaaagctaacttagcattaaccttttaagttaaagattaagagaaccaacacctctttacagtgaaatgccccaactaaatactaccgtatggcccaccataattacccccatactccttacactattcctcatcacccaactaaaaatattaaacacaaactaccacctacctccctcaccaaagcccataaaaataaaaaattataacaaaccctgagaaccaaaatgaacgaaaatctgttcgcttcattcattgcccccacaatcctaggcctacccgccgcagtactgatcattctatttccccctctattgatccccacctccaaatatctcatcaacaaccgactaatcaccacccaacaatgactaatcaaactaacctcaaaacaaataataaccatacacaacactaaaggacgaacctgatctcttatactagtatccttaatcatttttattgccacaactaacctcctcggactcctgcctcactcatttacaccaaccacccaactatctataaacctagccatggccatccccttatgagcgggcgcagtgattataggctttcgctctaagattaaaaatgccctagcccacttcttaccacaaggcacacctacaccccttatccccatactagttattatcgaaaccatcagcctactcattcaaccaatagccctggccgtacgcctaaccgctaacattactgcaggccacctactcatgcacctaattggaagcgccaccctagcaatatcaaccattaaccttccctctacacttatcatcttcacaattctaattctactgactatcctagaaatcgctgtcgccttaatccaagcctacgttttcacacttctagtaagcctctacctgcacgacaacacataatgacccaccaatcacatgcctatcatatagtaaaacccagcccatgacccctaacaggggccctctcagccctcctaatgacctccggcctagccatgtgatttcacttccactccataacgctcctcatactaggcctactaaccaacacactaaccatataccaatgatggcgcgatgtaacacgagaaagcacataccaaggccaccacacaccacctgtccaaaaaggccttcgatacgggataatcctatttattacctcagaagtttttttcttcgcaggatttttctgagccttttaccactccagcctagcccctaccccccaattaggagggcactggcccccaacaggcatcaccccgctaaatcccctagaagtcccactcctaaacacatccgtattactcgcatcaggagtatcaatcacctgagctcaccatagtctaatagaaaacaaccgaaaccaaataattcaagcactgcttattacaattttactgggtctctattttaccctcctacaagcctcagagtacttcgagtctcccttcaccatttccgacggcatctacggctcaacattttttgtagccacaggcttccacggacttcacgtcattattggctcaactttcctcactatctgcttcatccgccaactaatatttcactttacatccaaacatcactttggcttcgaagccgccgcctgatactggcattttgtagatgtggtttgactatttctgtatgtctccatctattgatgagggtcttactcttttagtataaatagtaccgttaacttccaattaactagttttgacaacattcaaaaaagagtaataaacttcgccttaattttaataatcaacaccctcctagccttactactaataattattacattttgactaccacaactcaacggctacatagaaaaatccaccccttacgagtgcggcttcgaccctatatcccccgcccgcgtccctttctccataaaattcttcttagtagctattaccttcttattatttgatctagaaattgccctccttttacccctaccatgagccctacaaacaactaacctgccactaatagttatgtcatccctcttattaatcatcatcctagccctaagtctggcctatgagtgactacaaaaaggattagactgaaccgaattggtatatagtttaaacaaaacgaatgatttcgactcattaaattatgataatcatatctaccaaatgcccctcatttacataaatattatactagcatttaccatctcacttctaggaatactagtatatcgctcacacctcatatcctccctactatgcctagaaggaataatactatcgctgttcattatagctactctcataaccctcaacacccactccctcttagccaatattgtgcctattgccatactagtctttgccgcctgcgaagcagcggtgggcctagccctactagtctcaatctccaacacatatggcctagactacgtacataacctaaacctactccaatgctaaaactaatcgtcccaacaattatattactaccactgacatgactttccaaaaaacacataatttgaatcaacacaaccacccacagcctaattattagcatcatccctctactattttttaaccaaatcaacaacaacctatttagctgttccccaaccttttcctccgaccccctaacaacccccctcctaatactaactacctgactcctacccctcacaatcatggcaagccaacgccacttatccagtgaaccactatcacgaaaaaaactctacctctctatactaatctccctacaaatctccttaattataacattcacagccacagaactaatcatattttatatcttcttcgaaaccacacttatccccaccttggctatcatcacccgatgaggcaaccagccagaacgcctgaacgcaggcacatacttcctattctacaccctagtaggctcccttcccctactcatcgcactgatttacactcacaacaccctaggctcactaaacattctactactcactctcactgcccaagaactatcaaactcctgagccaacaacttaatatgactagcttacacaatagcttttatagtaaagatacctctttacggactccacttatgactccctaaagcccatgtcgaagcccccatcgctgggtcaatagtacttgccgcagtactcttaaaactaggcggctatggtataatacgcctcacactcattctcaaccccctgacaaaacacatagcctaccccttccttgtactatccctatgaggcataattataacaagctccatctgcctacgacaaacagacctaaaatcgctcattgcatactcttcaatcagccacatagccctcgtagtaacagccattctcatccaaaccccctgaagcttcaccggcgcagtcattctcataatcgcccacggacttacatcctcattactattctgcctagcaaactcaaactacgaacgcactcacagtcgcatcataatcctctctcaaggacttcaaactctgctcccactaatagctttttgatgacttctagcaagcctcgctaacctcgccttaccccccactattaacctactgggagaactctctgtgctagtaaccacgttctcctgatcaaatatcactctcctacttacaggactcaacatactagtcacagccctatactccctctacatatttaccacaacacaatggggctcactcacccaccacattaacaacataaaaccctcattcacacgagaaaacaccctcatgttcatacacctatcccccattctcctcctatccctcaaccccgacatcattaccgggttttcctcttgtaaatatagtttaaccaaaacatcagattgtgaatctgacaacagaggcttacgaccccttatttaccgagaaagctcacaagaactgctaactcatgcccccatgtctaacaacatggctttctcaacttttaaaggataacagctatccattggtcttaggccccaaaaattttggtgcaactccaaataaaagtaataaccatgcacactactataaccaccctaaccctgacttccctaattccccccatccttaccaccctcgttaaccctaacaaaaaaaactcatacccccattatgtaaaatccattgtcgcatccacctttattatcagtctcttccccacaacaatattcatgtgcctagaccaagaagttattatctcgaactgacactgagccacaacccaaacaacccagctctccctaagcttcaaactagactacttctccataatattcatccctgtagcattgttcgttacatggtccatcatagaattctcactgtgatatataaactcagacccaaacattaatcagttcttcaaatatctactcatcttcctaattaccatactaatcttagttaccgctaacaacctattccaactgttcatcggctgagagggcgtaggaattatatccttcttgctcatcagttgatgatacgcccgagcagatgccaacacagcagccattcaagcaatcctatacaaccgtatcggcgatatcggtttcatcctcgccttagcatgatttatcctacactccaactcatgagacccacaacaaatagcccttctaaacgctaatccaagcctcaccccactactaggcctcctcctagcagcagcaggcaaatcagcccaattaggtctccacccctgactcccctcagccatagaaggccccaccccagtctcagccctactccactcaagcactatagttgtagcaggaatcttcttactcatccgcttccaccccctagcagaaaatagcccactaatccaaactctaacactatgcttaggcgctatcaccactctgttcgcagcagtctgcgcccttacacaaaatgacatcaaaaaaatcgtagccttctccacttcaagtcaactaggactcataatagttacaatcggcatcaaccaaccacacctagcattcctgcacatctgtacccacgccttcttcaaagccatactatttatgtgctccggatccatcatccacaaccttaacaatgaacaagatattcgaaaaataggaggactactcaaaaccatacctctcacttcaacctccctcaccattggcagcctagcattagcaggaatacctttcctcacaggtttctactccaaagaccacatcatcgaaaccgcaaacatatcatacacaaacgcctgagccctatctattactctcatcgctacctccctgacaagcgcctatagcactcgaataattcttctcaccctaacaggtcaacctcgcttccccacccttactaacattaacgaaaataaccccaccctactaaaccccattaaacgcctggcagccggaagcctattcgcaggatttctcattactaacaacatttcccccgcatcccccttccaaacaacaatccccctctacctaaaactcacagccctcgctgtcactttcctaggacttctaacagccctagacctcaactacctaaccaacaaacttaaaataaaatccccactatgcacattttatttctccaacatactcggattctaccctagcatcacacaccgcacaatcccctatctaggccttcttacgagccaaaacctgcccctactcctcctagacctaacctgactagaaaagctattacctaaaacaatttcacagcaccaaatctccacctccatcatcacctcaacccaaaaaggcataattaaactttacttcctctctttcttcttcccactcatcctaaccctactcctaatcacataacctattcccccgagcaatctcaattacaatatatacaccaacaaacaatgttcaaccagtaactactactaatcaacgcccatagtcatacaaagcccccgcaccaataggatcctcccgaatcaaccctgacccctctccttcataaattattcagcttcctacactattaaagtttaccacaaccaccaccccatcatactctttcacccacagcaccaatcctacctccatcgctaaccccactaaaacactcaccaagacctcaacccctgacccccatgcctcaggatactcctcaatagccatcgctgtagtatatccaaagacaaccatcattccccctaaataaattaaaaaaactattaaacccatataacctcccccaaaattcagaataataacacacccgaccacaccgctaacaatcaatactaaacccccataaataggagaaggcttagaagaaaaccccacaaaccccattactaaacccacactcaacagaaacaaagcatacatcattattctcgcacggactacaaccacgaccaatgatatgaaaaaccatcgttgtatttcaactacaagaacaccaatgaccccaatacgcaaaattaaccccctaataaaattaattaaccactcattcatcgacctccccaccccatccaacatctccgcatgatgaaacttcggctcactccttggcgcctgcctgatcctccaaatcaccacaggactattcctagccatacactactcaccagacgcctcaaccgccttttcatcaatcgcccacatcactcgagacgtaaattatggctgaatcatccgctaccttcacgccaatggcgcctcaatattctttatctgcctcttcctacacatcgggcgaggcctatattacggatcatttctctactcagaaacctgaaacatcggcattatcctcctgcttgcaactatagcaacagccttcataggctatgtcctcccgtgaggccaaatatcattctgaggggccacagtaattacaaacttactatccgccatcccatacattgggacagacctagttcaatgaatctgaggaggctactcagtagacagtcccaccctcacacgattctttacctttcacttcatcttgcccttcattattgcagccctagcagcactccacctcctattcttgcacgaaacgggatcaaacaaccccctaggaatcacctcccattccgataaaatcaccttccacccttactacacaatcaaagacgccctcggcttacttctcttcattctctccttaatgacattaacactattctcaccagacctcctaggcgacccagacaattataccctagccaaccccttaaacacccctccccacatcaagcccgaatgatatttcctattcgcctacacaattctccgatccgtccctaacaagctaggaggcgtccttgccctattactatccatcctcatcctagcaataatccccatcctccatatatccaaacaacaaagcataatatttcgcccactaagccaatcactttattgactcctagccgcagacctcctcattctaacctgaatcggaggacaaccagtaagctacccttttaccatcattggacaagtagcatccgtactatacttcacaacaatcctaatcctaataccaactatctccctaattgaaaacaaaatactcaaatgggcctgtccttgtagtataaactaatacaccagtcttgtaaaccgaagatgaaaacctttttccaaggacaaatcagagaaaaagtctttaactccaccattagcacccaaagctaagattctaatttaaactattctctgttctttcatggggaagcagatttgggtaccacccaagtattgactcacccatcaacaaccgctatgtatttcgtacattactgccagccaccatgaatattgcacggtaccataaatacttgaccacctgtagtacataaaaacccaatccacatcaaaaccccctccccatgcttacaagcaagtacagcaatcaaccctcaactatcacacatcaactgcaactccaaagccacccctcacccactaggataccaacaaacctacccatctttaacagcacatagtacataaagccatttaccgtacatagcacattacagtcaaatcccttctcgtccccatggatgacccccctcagataggggtcccttgaccaccatcctccgtgaaatcaatatcccgcacaagagtgctactctcctcgctccgggcccataacacttgggggtagctaaagtgaactgtatccgacatctggttcctacttcagggccataaagcctaaatagcccacacgttccccttaaataagacatcacgatg

SEQ ID NO: 320 - DNA, 16571 bp, Homo sapiens mitochondrial
  3109: "n" refers to a nucleotide at position 3107 of the Cambridge Reference Sequence (CRS, Anderson et al. 1981 Nature 290:457-465), later determined to be absent from the human mtDNA sequence according to the revised CRS (rCRS, Andrews et al. 1999 Nature Genetics 23:147); "n" therefore represents a single nucleotide deletion at a position corresponding to nucleotide 3107 of SEQ ID NO:1 as provided herein.
gatcacaggtctatcaccctattaaccactcacgggagctctccatgcatttggtattttcgtctggggggtatgcacgcgatagcattgcgagacgctggagccggagcaccctatgtcgcagtatctgtctttgattcctgcctcatcccattatttatcgcacctacgttcaatattacaggcgaacatacttactaaagtgtgttaattaattaatgcttgtaggacataataataacaattgaatgtctgcacagccgctttccacacagacatcataacaaaaaatttccaccaaaccccccctcccccccgcttctggccacagcacttaaacacatctctgccaaaccccaaaaacaaagaaccctaacaccagcctaaccagatttcaaattttatcttttggcggtatgcacttttaacagtcaccccccaactaacacattattttcccctcccactcccatactactaatctcatcaatacaacccccgcccatcctacccagcacacacacaccgctgctaaccccataccccgaaccaaccaaaccccaaagacaccccccacagtttatgtagcttacctcctcaaagcaatacactgaaaatgtttagacgggctcacatcaccccataaacaaataggtttggtcctagcctttctattagctcttagtaagattacacatgcaagcatccccgttccagtgagttcaccctctaaatcaccacgatcaaaagggacaagcatcaagcacgcagcaatgcagctcaaaacgcttagcctagccacacccccacgggaaacagcagtgattaacctttagcaataaacgaaagtttaactaagctatactaaccccagggttggtcaatttcgtgccagccaccgcggtcacacgattaacccaagtcaatagaagccggcgtaaagagtgttttagatcaccccctccccaataaagctaaaactcacctgagttgtaaaaaactccagttgacacaaaatagactacgaaagtggctttaacatatctgaacacacaatagctaagacccaaactgggattagataccccactatgcttagccctaaacctcaacagttaaatcaacaaaactgctcgccagaacactacgagccacagcttaaaactcaaaggacctggcggtgcttcatatccctctagaggagcctgttctgtaatcgataaaccccgatcaacctcaccacctcttgctcagcctatataccgccatcttcagcaaaccctgatgaaggctacaaagtaagcgcaagtacccacgtaaagacgttaggtcaaggtgtagcccatgaggtggcaagaaatgggctacattttctaccccagaaaactacgatagcccttatgaaacttaagggtcgaaggtggatttagcagtaaactgagagtagagtgcttagttgaacagggccctgaagcgcgtacacaccgcccgtcaccctcctcaagtatacttcaaaggacatttaactaaaacccctacgcatttatatagaggagacaagtcgtaacatggtaagtgtactggaaagtgcacttggacgaaccagagtgtagcttaacacaaagcacccaacttacacttaggagatttcaacttaacttgaccgctctgagctaaacctagccccaaacccactccaccttactaccagacaaccttagccaaaccatttacccaaataaagtataggcgatagaaattgaaacctggcgcaatagatatagtaccgcaagggaaagatgaaaaattataaccaagcataatatagcaaggactaacccctataccttctgcataatgaattaactagaaataactttgcaaggagagccaaagctaagacccccgaaaccagacgagctacctaagaacagctaaaagagcacacccgtctatgtagcaaaatagtgggaagatttataggtagaggcgacaaacctaccgagcctggtgatagctggttgtccaagatagaatcttagttcaactttaaatttgcccacagaaccctctaaatccccttgtaaatttaactgttagtccaaagaggaacagctctttggacactaggaaaaaaccttgtagagagagtaaaaaatttaacacccatagtaggcctaaaagcagccaccaattaagaaagcgttcaagctcaacacccactacctaaaaaatcccaaacatataactgaactcctcacacccaattggaccaatctatcaccctatagaagaactaatgttagtataagtaacatgaaaacattctcctccgcataagcctgcgtcagattaaaacactgaactgacaattaacagcccaatatctacaatcaaccaacaagtcattattaccctcactgtcaacccaacacaggcatgctcataaggaaaggttaaaaaaagtaaaaggaactcggcaaatcttaccccgcctgtttaccaaaaacatcacctctagcatcaccagtattagaggcaccgcctgcccagtgacacatgtttaacggccgcggtaccctaaccgtgcaaaggtagcataatcacttgttccttaaatagggacctgtatgaatggctccacgagggttcagctgtctcttacttttaaccagtgaaattgacctgcccgtgaagaggcgggcataacacagcaagacgagaagaccctatggagctttaatttattaatgcaaacagtacctaacaaacccacaggtcctaaactaccaaacctgcattaaaaatttcggttggggcgacctcggagcagaacccaacctccgagcagtacatgctaagacttcaccagtcaaagcgaactactatactcaattgatccaataacttgaccaacggaacaagttaccctagggataacagcgcaatcctattctagagtccatatcaacaatagggtttacgacctcgatgttggatcaggacatcccgatggtgcagccgctattaaaggttcgtttgttcaacgattaaagtcctacgtgatctgagttcagaccggagtaatccaggtcggtttctatctacnttcaaattcctccctgtacgaaaggacaagagaaataaggcctacttcacaaagcgccttcccccgtaaatgatatcatctcaacttagtattatacccacacccacccaagaacagggtttgttaagatggcagagcccggtaatcgcataaaacttaaaactttacagtcagaggttcaattcctcttcttaacaacatacccatggccaacctcctactcctcattgtacccattctaatcgcaatggcattcctaatgcttaccgaacgaaaaattctaggctatatacaactacgcaaaggccccaacgttgtaggcccctacgggctactacaacccttcgctgacgccataaaactcttcaccaaagagcccctaaaacccgccacatctaccatcaccctctacatcaccgccccgaccttagctctcaccatcgctcttctactatgaacccccctccccatacccaaccccctggtcaacctcaacctaggcctcctatttattctagccacctctagcctagccgtttactcaatcctctgatcagggtgagcatcaaactcaaactacgccctgatcggcgcactgcgagcagtagcccaaacaatctcatatgaagtcaccctagccatcattctactatcaacattactaataagtggctcctttaacctctccacccttatcacaacacaagaacacctctgattactcctgccatcatgacccttggccataatatgatttatctccacactagcagagaccaaccgaacccccttcgaccttgccgaaggggagtccgaactagtctcaggcttcaacatcgaatacgccgcaggccccttcgccctattcttcatagccgaatacacaaacattattataataaacaccctcaccactacaatcttcctaggaacaacatatgacgcactctcccctgaactctacacaacatattttgtcaccaagaccctacttctaacctccctgttcttatgaattcgaacagcatacccccgattccgctacgaccaactcatacacctcctatgaaaaaacttcctaccactcaccctagcattacttatatgatatgtctccatacccattacaatctccagcattccccctcaaacctaagaaatatgtctgataaaagagttactttgatagagtaaataataggagcttaaacccccttatttctaggactatgagaatcgaacccatccctgagaatccaaaattctccgtgccacctatcacaccccatcctaaagtaaggtcagctaaataagctatcgggcccataccccgaaaatgttggttatacccttcccgtactaattaatcccctggcccaacccgtcatctactctaccatctttgcaggcacactcatcacagcgctaagctcgcactgattttttacctgagtaggcctagaaataaacatgctagcttttattccagttctaaccaaaaaaataaaccctcgttccacagaagctgccatcaagtatttcctcacgcaagcaaccgcatccataatccttctaatagctatcctcttcaacaatatactctccggacaatgaaccataaccaatactaccaatcaatactcatcattaataatcataatggctatagcaataaaactaggaatggccccctttcacttctgagtcccagaggttacccaaggcacccctctgacatccggcctgcttcttctcacatgacaaaaactagcccccatctcaatcatataccaaatctctccctcactaaacgtaagccttctcctcactctctcaatcttatccatcatagcaggcagttgaggtggattaaaccaaacccagctacgcaaaatcttagcatactcctcaattacccacataggatgaataatagcagttctaccgtacaaccctaacataaccattcttaatttaactatttatattatcctaactactaccgcattcctactactcaacttaaactccagcaccacgaccctactactatctcgcacctgaaacaagctaacatgactaacacccttaattccatccaccctcctctccctaggaggcctgcccccgctaaccggctttttgcccaaatgggccattatcgaagaattcacaaaaaacaatagcctcatcatccccaccatcatagccaccatcaccctccttaacctctacttctatctacgcctaatctactccacctcaatcacactactccccatatctaacaacgtaaaaataaaatgacagtttgaacatacaaaacccaccccattcctccccacactcatcgcccttaccacgctactcctacctatctccccttttatactaataatcttatagaaatttaggttaaatacagaccaagagccttcaaagccctcagtaagttgcaatacttaatttctgtaacagctaaggactgcaaaaccccactctgcatcaactgaacgcaaatcagccactttaattaagctaagcccttactagaccaatgggacttaaacccacaaacacttagttaacagctaagcaccctaatcaactggcttcaatctacttctcccgccgccgggaaaaaaggcgggagaagccccggcaggtttgaagctgcttcttcgaatttgcaattcaatatgaaaatcacctcggagctggtaaaaagaggcctaacccctgtctttagatttacagtccaatgcttcactcagccattttacctcacccccactgatgttcgccgaccgttgactattctctacaaaccacaaagacattggaacactatacctattattcggcgcatgagctggagtcctaggcacagctctaagcctccttattcgagccgagctgggccagccaggcaaccttctaggtaacgaccacatctacaacgttatcgtcacagcccatgcatttgtaataatcttcttcatagtaatacccatcataatcggaggctttggcaactgactagttcccctaataatcggtgcccccgatatggcgtttccccgcataaacaacataagcttctgactcttacctccctctctcctactcctgctcgcatctgctatagtggaggccggagcaggaacaggttgaacagtctaccctcccttagcagggaactactcccaccctggagcctccgtagacctaaccatcttctccttacacctagcaggtgtctcctctatcttaggggccatcaatttcatcacaacaattatcaatataaaaccccctgccataacccaataccaaacgcccctcttcgtctgatccgtcctaatcacagcagtcctacttctcctatctctcccagtcctagctgctggcatcactatactactaacagaccgcaacctcaacaccaccttcttcgaccccgccggaggaggagaccccattctataccaacacctattctgatttttcggtcaccctgaagtttatattcttatcctaccaggcttcggaataatctcccatattgtaacttactactccggaaaaaaagaaccatttggatacataggtatggtctgagctatgatatcaattggcttcctagggtttatcgtgtgagcacaccatatatttacagtaggaatagacgtagacacacgagcatatttcacctccgctaccataatcatcgctatccccaccggcgtcaaagtatttagctgactcgccacactccacggaagcaatatgaaatgatctgctgcagtgctctgagccctaggattcatctttcttttcaccgtaggtggcctgactggcattgtattagcaaactcatcactagacatcgtactacacgacacgtactacgttgtagcccacttccactatgtcctatcaataggagctgtatttgccatcataggaggcttcattcactgatttcccctattctcaggctacaccctagaccaaacctacgccaaaatccatttcactatcatattcatcggcgtaaatctaactttcttcccacaacactttctcggcctatccggaatgccccgacgttactcggactaccccgatgcatacaccacatgaaacatcctatcatctgtaggctcattcatttctctaacagcagtaatattaataattttcatgatttgagaagccttcgcttcgaagcgaaaagtcctaatagtagaagaaccctccataaacctggagtgactatatggatgccccccaccctaccacacattcgaagaacccgtatacataaaatctagacaaaaaaggaaggaatcgaaccccccaaagctggtttcaagccaaccccatggcctccatgactttttcaaaaaggtattagaaaaaccatttcataactttgtcaaagttaaattataggctaaatcctatatatcttaatggcacatgcagcgcaagtaggtctacaagacgctacttcccctatcatagaagagcttatcacctttcatgatcacgccctcataatcattttccttatctgcttcctagtcctgtatgcccttttcctaacactcacaacaaaactaactaatactaacatctcagacgctcaggaaatagaaaccgtctgaactatcctgcccgccatcatcctagtcctcatcgccctcccatccctacgcatcctttacataacagacgaggtcaacgatccctcccttaccatcaaatcaattggccaccaatggtactgaacctacgagtacaccgactacggcggactaatcttcaactcctacatacttcccccattattcctagaaccaggcgacctgcgactccttgacgttgacaatcgagtagtactcccgattgaagcccccattcgtataataattacatcacaagacgtcttgcactcatgagctgtccccacattaggcttaaaaacagatgcaattcccggacgtctaaaccaaaccactttcaccgctacacgaccgggggtatactacggtcaatgctctgaaatctgtggagcaaaccacagtttcatgcccatcgtcctagaattaattcccctaaaaatctttgaaatagggcccgtatttaccctatagcaccccctctaccccctctagagcccactgtaaagctaacttagcattaaccttttaagttaaagattaagagaaccaacacctctttacagtgaaatgccccaactaaatactaccgtatggcccaccataattacccccatactccttacactattcctcatcacccaactaaaaatattaaacacaaactaccacctacctccctcaccaaagcccataaaaataaaaaattataacaaaccctgagaaccaaaatgaacgaaaatctgttcgcttcattcattgcccccacaatcctaggcctacccgccgcagtactgatcattctatttccccctctattgatccccacctccaaatatctcatcaacaaccgactaatcaccacccaacaatgactaatcaaactaacctcaaaacaaatgataaccatacacaacactaaaggacgaacctgatctcttatactagtatccttaatcatttttattgccacaactaacctcctcggactcctgcctcactcatttacaccaaccacccaactatctataaacctagccatggccatccccttatgagcgggcgcagtgattataggctttcgctctaagattaaaaatgccctagcccacttcttaccacaaggcacacctacaccccttatccccatactagttattatcgaaaccatcagcctactcattcaaccaatagccctggccgtacgcctaaccgctaacattactgcaggccacctactcatgcacctaattggaagcgccaccctagcaatatcaaccattaaccttccctctacacttatcatcttcacaattctaattctactgactatcctagaaatcgctgtcgccttaatccaagcctacgttttcacacttctagtaagcctctacctgcacgacaacacataatgacccaccaatcacatgcctatcatatagtaaaacccagcccatgacccctaacaggggccctctcagccctcctaatgacctccggcctagccatgtgatttcacttccactccataacgctcctcatactaggcctactaaccaacacactaaccatataccaatgatggcgcgatgtaacacgagaaagcacataccaaggccaccacacaccacctgtccaaaaaggccttcgatacgggataatcctatttattacctcagaagtttttttcttcgcaggatttttctgagccttttaccactccagcctagcccctaccccccaattaggagggcactggcccccaacaggcatcaccccgctaaatcccctagaagtcccactcctaaacacatccgtattactcgcatcaggagtatcaatcacctgagctcaccatagtctaatagaaaacaaccgaaaccaaataattcaagcactgcttattacaattttactgggtctctattttaccctcctacaagcctcagagtacttcgagtctcccttcaccatttccgacggcatctacggctcaacattttttgtagccacaggcttccacggacttcacgtcattattggctcaactttcctcactatctgcttcatccgccaactaatatttcactttacatccaaacatcactttggcttcgaagccgccgcctgatactggcattttgtagatgtggtttgactatttctgtatgtctccatctattgatgagggtcttactcttttagtataaatagtaccgttaacttccaattaactagttttgacaacattcaaaaaagagtaataaacttcgccttaattttaataatcaacaccctcctagccttactactaataattattacattttgactaccacaactcaacggctacatagaaaaatccaccccttacgagtgcggcttcgaccctatatcccccgcccgcgtccctttctccataaaattcttcttagtagctattaccttcttattatttgatctagaaattgccctccttttacccctaccatgagccctacaaacaactaacctgccactaatagttatgtcatccctcttattaatcatcatcctagccctaagtctggcctatgagtgactacaaaaaggattagactgaaccgaattggtatatagtttaaacaaaacgaatgatttcgactcattaaattatgataatcatatttaccaaatgcccctcatttacataaatattatactagcatttaccatctcacttctaggaatactagtatatcgctcacacctcatatcctccctactatgcctagaaggaataatactatcgctgttcattatagctactctcataaccctcaacacccactccctcttagccaatattgtgcctattgccatactagtctttgccgcctgcgaagcagcggtgggcctagccctactagtctcaatctccaacacatatggcctagactacgtacataacctaaacctactccaatgctaaaactaatcgtcccaacaattatattactaccactgacatgactttccaaaaaacacataatttgaatcaacacaaccacccacagcctaattattagcatcatccctctactattttttaaccaaatcaacaacaacctatttagctgttccccaaccttttcctccgaccccctaacaacccccctcctaatactaactacctgactcctacccctcacaatcatggcaagccaacgccacttatccagtgaaccactatcacgaaaaaaactctacctctctatactaatctccctacaaatctccttaattataacattcacagccacagaactaatcatattttatatcttcttcgaaaccacacttatccccaccttggctatcatcacccgatgaggcaaccagccagaacgcctgaacgcaggcacatacttcctattctacaccctagtaggctcccttcccctactcatcgcactaatttacactcacaacaccctaggctcactaaacattctactactcactctcactgcccaagaactatcaaactcctgagccaacaacttaatatgactagcttacacaatagcttttatagtaaagatacctctttacggactccacttatgactccctaaagcccatgtcgaagcccccatcgctgggtcaatagtacttgccgcagtactcttaaaactaggcggctatggtataatacgcctcacactcattctcaaccccctgacaaaacacatagcctaccccttccttgtactatccctatgaggcataattataacaagctccatctgcctacgacaaacagacctaaaatcgctcattgcatactcttcaatcagccacatagccctcgtagtaacagccattctcatccaaaccccctgaagcttcaccggcgcagtcattctcataatcgcccacgggcttacatcctcattactattctgcctagcaaactcaaactacgaacgcactcacagtcgcatcataatcctctctcaaggacttcaaactctactcccactaatagctttttgatgacttctagcaagcctcgctaacctcgccttaccccccactattaacctactgggagaactctctgtgctagtaaccacgttctcctgatcaaatatcactctcctacttacaggactcaacatactagtcacagccctatactccctctacatatttaccacaacacaatggggctcactcacccaccacattaacaacataaaaccctcattcacacgagaaaacaccctcatgttcatacacctatcccccattctcctcctatccctcaaccccgacatcattaccgggttttcctcttgtaaatatagtttaaccaaaacatcagattgtgaatctgacaacagaggcttacgaccccttatttaccgagaaagctcacaagaactgctaactcatgcccccatgtctaacaacatggctttctcaacttttaaaggataacagctatccattggtcttaggccccaaaaattttggtgcaactccaaataaaagtaataaccatgcacactactataaccaccctaaccctgacttccctaattccccccatccttaccaccctcgttaaccctaacaaaaaaaactcatacccccattatgtaaaatccattgtcgcatccacctttattatcagtctcttccccacaacaatattcatgtgcctagaccaagaagttattatctcgaactgacactgagccacaacccaaacaacccagctctccctaagcttcaaactagactacttctccataatattcatccctgtagcattgttcgttacatggtccatcatagaattctcactgtgatatataaactcagacccaaacattaatcagttcttcaaatatctactcatcttcctaattaccatactaatcttagttaccgctaacaacctattccaactgttcatcggctgagagggcgtaggaattatatccttcttgctcatcagttgatgatacgcccgagcagatgccaacacagcagccattcaagcaatcctatacaaccgtatcggcgatatcggtttcatcctcgccttagcatgatttatcctacactccaactcatgagacccacaacaaatagcccttctaaacgctaatccaagcctcaccccactactaggcctcctcctagcagcagcaggcaaatcagcccaattaggtctccacccctgactcccctcagccatagaaggccccaccccagtctcagccctactccactcaagcactatagttgtagcaggaatcttcttactcatccgcttccaccccctagcagaaaatagcccactaatccaaactctaacactatgcttaggcgctatcaccactctgttcgcagcagtctgcgcccttacacaaaatgacatcaaaaaaatcgtagccttctccacttcaagtcaactaggactcataatagttacaatcggcatcaaccaaccacacctagcattcctgcacatctgtacccacgccttcttcaaagccatactatttatgtgctccgggtccatcatccacaaccttaacaatgaacaagatattcgaaaaataggaggactactcaaaaccatacctctcacttcaacctccctcaccattggcagcctagcattagcaggaatacctttcctcacaggtttctactccaaagaccacatcatcgaaaccgcaaacatatcatacacaaacgcctgagccctatctattactctcatcgctacctccctgacaagcgcctatagcactcgaataattcttctcaccctaacaggtcaacctcgcttccccacccttactaacattaacgaaaataaccccaccctactaaaccccattaaacgcctggcagccggaagcctattcgcaggatttctcattactaacaacatttcccccgcatcccccttccaaacaacaatccccctctacctaaaactcacagccctcgctgtcactttcctaggacttctaacagccctagacctcaactacctaaccaacaaacttaaaataaaatccccactatgcacattttatttctccaacatactcggattctaccctagcatcacacaccgcacaatcccctatctaggccttcttacgagccaaaacctgcccctactcctcctagacctaacctgactagaaaagctattacctaaaacaatttcacagcaccaaatctccacctccatcatcacctcaacccaaaaaggcataattaaactttacttcctctctttcttcttcccactcatcctaaccctactcctaatcacataacctattcccccgagcaatctcaattacaatatatacaccaacaaacaatgttcaaccagtaactactactaatcaacgcccataatcatacaaagcccccgcaccaataggatcctcccgaatcaaccctgacccctctccttcataaattattcagcttcctacactattaaagtttaccacaaccaccaccccatcatactctttcacccacagcaccaatcctacctccatcgctaaccccactaaaacactcaccaagacctcaacccctgacccccatgcctcaggatactcctcaatagccatcgctgtagtatatccaaagacaaccatcattccccctaaataaattaaaaaaactattaaacccatataacctcccccaaaattcagaataataacacacccgaccacaccgctaacaatcaatactaaacccccataaataggagaaggcttagaagaaaaccccacaaaccccattactaaacccacactcaacagaaacaaagcatacatcattattctcgcacggactacaaccacgaccaatgatatgaaaaaccatcgttgtatttcaactacaagaacaccaatgaccccaatacgcaaaactaaccccctaataaaattaattaaccactcattcatcgacctccccaccccatccaacatctccgcatgatgaaacttcggctcactccttggcgcctgcctgatcctccaaatcaccacaggactattcctagccatgcactactcaccagacgcctcaaccgccttttcatcaatcgcccacatcactcgagacgtaaattatggctgaatcatccgctaccttcacgccaatggcgcctcaatattctttatctgcctcttcctacacatcgggcgaggcctatattacggatcatttctctactcagaaacctgaaacatcggcattatcctcctgcttgcaactatagcaacagccttcataggctatgtcctcccgtgaggccaaatatcattctgaggggccacagtaattacaaacttactatccgccatcccatacattgggacagacctagttcaatgaatctgaggaggctactcagtagacagtcccaccctcacacgattctttacctttcacttcatcttgcccttcattattgcagccctagcagcactccacctcctattcttgcacgaaacgggatcaaacaaccccctaggaatcacctcccattccgataaaatcaccttccacccttactacacaatcaaagacgccctcggcttacttctcttccttctctccttaatgacattaacactattctcaccagacctcctaggcgacccagacaattataccctagccaaccccttaaacacccctccccacatcaagcccgaatgatatttcctattcgcctacacaattctccgatccgtccctaacaaactaggaggcgtccttgccctattactatccatcctcatcctagcaataatccccatcctccatatatccaaacaacaaagcataatatttcgcccactaagccaatcactttattgactcctagccgcagacctcctcattctaacctgaatcggaggacaaccagtaagctacccttttaccatcattggacaagtagcatccgtactatacttcacaacaatcctaatcctaataccaactatctccctaattgaaaacaaaatactcaaatgggcctgtccttgtagtataaactaatacaccagtcttgtaaaccggagatgaaaacctttttccaaggacaaatcagagaaaaagtctttaactccaccattagcacccaaagctaagattctaatttaaactattctctgttctttcatggggaagcagatttgggtaccacccaagtattgactcacccatcaacaaccgctatgtatttcgtacattactgccagccaccatgaatattgtacggtaccataaatacttgaccacctgtagtacataaaaacccaatccacatcaaaaccccctccctatgcttacaagcaagtacagcaatcaaccctcaactatcacacatcaactgcaactccaaagccacccctcacccactaggataccaacaaacctacccacccttaacagtacatagtacataaagccatttaccgtacatagcacattacagtcaaatcccttctcgtccccatggatgacccccctcagataggggtcccttgaccaccatcctccgtgaaatcaatatcccgcacaagagtgctactctcctcgctccgggcccataacacttgggggtagctaaagtgaactgtatccgacatctggttcctacttcagggccataaagcctaaatagcccacacgttccccttaaataagacatcacgatg

SEQ ID NO: 321 - DNA, 16573 bp, Homo sapiens mitochondrial
  3111: "n" refers to a nucleotide at position 3107 of the Cambridge Reference Sequence (CRS, Anderson et al. 1981 Nature 290:457-465), later determined to be absent from the human mtDNA sequence according to the revised CRS (rCRS, Andrews et al. 1999 Nature Genetics 23:147); "n" therefore represents a single nucleotide deletion at a position corresponding to nucleotide 3107 of SEQ ID NO:1 as provided herein.
gatcacaggtctatcaccctattaaccactcacgggagctctccatgcatttggtattttcgtctggggggtgtgcacgcgatagcattgcgagacgctggagccggagcaccctatgtcgcagtatctgtctttgattcctgccccatcctattatttatcgcacctacgttcaatattacaggcgaacatacttactaaagtgtgttaattaattaatgcttgtaggacataataataacaattgaatgtctgcacagccgctttccacacagacatcataacaaaaaatttccaccaaaccccccctcccccccgcttctggccacagcacttaaacacatctctgccaaaccccaaaaacaaagaaccctaacaccagcctaaccagatttcaaattttatcttttggcggtatgcacttttaacagtcaccccccaactaacacattattttcccctcccactcccatactactaatctcatcaatacaacccccgcccatcctacccagcacacacacaccacgctgctaaccccataccccgaaccaaccaaaccccaaagacaccccccacagtttatgtagcttacctcctcaaagcaatacactgaaaatgtttagacgggctcacatcaccccataaacaaataggtttggtcctagcctttctattagctcttagtaagattacacatgcaagcatccccgttccagtgagttcaccctctaaatcaccacgatcaaaagggacaagcatcaagcacgcagcaatgcagctcaaaacgcttagcctagccacacccccacgggaaacagcagtgattaacctttagcaataaacgaaagtttaactaagctatactaaccccagggttggtcaatttcgtgccagccaccgcggtcacacgattaacccaagtcaatagaagccggcgtaaagagtgttttagatcaccccctccccaataaagctaaaactcacctgagttgtaaaaaactccagttgacacaaaatagactacgaaagtggctttaacatatctgaacacacaatagctaagacccaaactgggattagataccccactatgcttagccctaaacctcaacagttaaatcaacaaaactgctcgccagaacactacgagccacagcttaaaactcaaaggacctggcggtgcttcatatccctctagaggagcctgttctgtaatcgataaaccccgatcaacctcaccacctcttgctcagcctatataccgccatcttcagcaaaccctgatgaaggctacaaagtaagcgcaagtacccacgtaaagacgttaggtcaaggtgtagcccatgaggtggcaagaaatgggctacattttctaccccagaaaactacgatagcccttatgaaacttaagggtcgaaggtggatttagcagtaaactgagagtagagtgcttagttgaacagggccctgaagcgcgtacacaccgcccgtcaccctcctcaagtatacttcaaaggacatttaactaaaacccctacgcatttatatagaggagacaagtcgtaacatggtaagtgtactggaaagtgcacttggacgaaccagagtgtagcttaacacaaagcacccaacttacacttaggagatttcaacttaacttgaccgctctgagctaaacctagccccaaacccactccaccttactaccagacaaccttagccaaaccatttacccaaataaagtataggcgatagaaattgaaacctggcgcaatagatatagtaccgcaagggaaagatgaaaaattatagccaagcataatatagcaaggactaacccctataccttctgcataatgaattaactagaaataactttgcaaggagagccaaagctaagacccccgaaaccagacgagctacctaagaacagctaaaagagcacacccgtctatgtagcaaaatagtgggaagatttataggtagaggcgacaaacctaccgagcctggtgatagctggttgtccaagatagaatcttagttcaactttaaatttgcccacagaaccctctaaatccccttgtaaatttaactgttagtccaaagaggaacagctctttggacactaggaaaaaaccttgtagagagagtaaaaaatttaacacccatagtaggcctaaaagcagccaccaattaagaaagcgttcaagctcaacatccactacctaaaaaatcccaaacatataactgaactcctcacacccaattggaccaatctatcaccctatagaagaactaatgttagtataagtaacatgaaaacattctcctccgcataagcctgcgtcagattaaaacactgaactgacaattaacagcccaatatctacaatcaaccaacaagtcattattaccctcactgtcaacccaacacaggcatgctcataaggaaaggttaaaaaaagtaaaaggaactcggcaaatcttaccccgcctgtttaccaaaaacatcacctctagcatcaccagtattagaggcaccgcctgcccagtgacacatgtttaacggccgcggtaccctaaccgtgcaaaggtagcataatcacttgttccttaaatagggacctgtatgaatggctccacgagggttcagctgtctcttacttttaaccagtgaaattgacctgcccgtgaagaggcgggcatgacacagcaagacgagaagaccctatggagctttaatttattaatgcaaacagtacctaacaaacccacaggtcctaaactaccaaacctgcattaaaaatttcggttggggcgacctcggagcagaacccaacctccgagcagtacatgctaagacttcaccagtcaaagcgaactactatactcaattgatccaataacttgaccaacggaacaagttaccctagggataacagcgcaatcctattctagagtccatatcaacaatagggtttacgacctcgatgttggatcaggacatcccgatggtgcagccgctattaaaggttcgtttgttcaacgattaaagtcctacgtgatctgagttcagaccggagtaatccaggtcggtttctatctacnttcaaattcctccctgtacgaaaggacaagagaaataaggcctacttcacaaagcgccttcccccgtaaatgatatcatctcaacttagtattatacccacacccacccaagaacagggtttgttaagatggcagagcccggtaatcgcataaaacttaaaactttacagtcagaggttcaattcctcttcttaacaacatacccatggccaacctcctactcctcattgtacccattctaatcgcaatggcattcctaatgcttaccgaacgaaaaattctaggctatatacaactacgcaaaggccccaacgttgtaggcccctacgggctactacaacccttcgctgacgccataaaactcttcaccaaggagcccctaaaacccgccacatctaccatcaccctctacatcaccgccccgaccttagctctcaccatcgctcttctactatgaacccccctccccatacccaaccccctggtcaacctcaacctaggcctcctatttattctagccacctctagcctagccgtttactcaatcctctgatcagggtgagcatcaaactcaaactacgccctgatcggcgcactgcgagcagtagcccaaacaatctcatatgaagtcaccctagccatcattctactatcaacattactaataagtggctcctttaacctctccacccttatcacaacacaagaacacctctgattactcctgccatcatgacccttggccataatatgatttatctccacactagcagagaccaaccgaacccccttcgaccttgccgaaggggagtccgaactagtctcaggcttcaacatcgaatacgccgcaggccccttcgccctattcttcatagccgaatacacaaacattattataataaacaccctcaccactacaatcttcctaggaacaacatatgacgcactctcccctgaactctacacaacatattttgtcaccaagaccctacttctaacctccctgttcttatgaattcgaacagcatacccccgattccgctacgaccaactcatacacctcctatgaaaaaacttcctaccactcaccctagcattacttatatgatatgtctccatacccattacaatctccagcattccccctcaaacctaagaaatatgtctgataaaagagttactttgatagagtaaataataggagcttaaacccccttatttctaggactatgagaatcgaacccatccctgagaatccaaaattctccgtgccacctatcacaccccatcctaaagtaaggtcagctaaataagctatcgggcccataccccgaaaatgttggttatacccttcccgtactaattaatcccctggcccaacccgtcatctactctaccatctttgcaggcacactcatcacagcgctaagctcgcactgattttttacctgagtaggcctagaaataaacatgctagcttttattccagttctaaccaaaaaaataaaccctcgttccacagaagctgccatcaagtatttcctcacgcaagcaaccgcatccataatccttctaatagctatcctcttcaacaatatactctccggacaatgaaccataaccaatactaccaatcaatactcatcattaataatcataatggctatagcaataaaactaggaatagccccctttcacttctgagtcccagaggttacccaaggcacccctctgacatccggcctgcttcttctcacatgacaaaaactagcccccatctcaatcatataccaaatctctccctcactaaacgtaagccttctcctcactctctcaatcttatccatcatagcaggcagttgaggtggattaaaccaaacccagctacgcaaaatcttagcatactcctcaattacccacataggatgaataatagcagttctaccgtacaaccctaacataaccattcttaatttaactatttatattatcctaactactaccgcattcctactactcaacttaaactccagcaccacgaccctactactatctcgcacctgaaacaagctaacatgactaacacccttaattccatccaccctcctctccctaggaggcctacccccgctaaccggctttttgcccaaatgggccattatcgaagaattcacaaaaaacaatagcctcatcatccccaccatcatagccaccatcaccctccttaacctctacttctacctacgcctaatctactccacctcaatcacactactccccatatctaacaacgtaaaaataaaatgacagtttgaacatacaaaacccaccccattcctccccacactcatcgcccttaccacgctactcctacctatctccccttttatactaataatcttatagaaatttaggttaaatacagaccaagagccttcaaagccctcagtaagttgcaatacttaatttctgtaacagctaaggactgcaaaaccccactctgcatcaactgaacgcaaatcagccactttaattaagctaagcccttactagaccaatgggacttaaacccacaaacacttagttaacagctaagcaccctaatcaactggcttcaatctacttctcccgccgccgggaaaaaaggcgggagaagccccggcaggtttgaagctgcttcttcgaatttgcaattcaatatgaaaatcacctcggagctggtaaaaagaggcctaacccctgtctttagatttacagtccaatgcttcactcagccattttacctcacccccactgatgttcgccgaccgttgactattctctacaaaccacaaagacattggaacactatacctattattcggcgcatgagctggagtcctaggcacagctctaagcctccttattcgagccgagctgggccagccaggcaaccttctaggtaacgaccacatctacaacgttatcgtcacagcccatgcatttgtaataatcttcttcatagtaatacccatcataatcggaggctttggcaactgactagttcccctaataatcggtgcccccgatatggcgtttccccgcataaacaacataagcttctgactcttacctccctctctcctactcctgctcgcatctgctatagtggaggccggagcaggaacaggttgaacagtctaccctcccttagcagggaactactcccaccctggagcctccgtagacctaaccatcttctccttacacctagcaggtgtctcctctatcttaggggccatcaatttcatcacaacaattatcaatataaaaccccctgccataacccaataccaaacgcccctcttcgtctgatccgtcctaatcacagcagtcctacttctcctatctctcccagtcctagctgctggcatcactatactactaacagaccgcaacctcaacaccaccttcttcgaccccgccggaggaggagaccccattctataccaacacctattctgatttttcggtcaccctgaagtttatattcttatcctaccaggcttcggaataatctcccatattgtaacttactactccggaaaaaaagaaccatttggatacataggtatggtctgagctatgatatcaattggcttcctagggtttatcgtgtgagcacaccatatatttacagtaggaatagacgtagacacacgagcatatttcacctccgctaccataatcatcgctatccccaccggcgtcaaagtatttagctgactcgccacactccacggaagcaatatgaaatgatctgctgcagtgctctgagccctaggattcatctttcttttcaccgtaggtggcctgactggcattgtattagcaaactcatcactagacatcgtactacacgacacgtactacgttgtagctcacttccactatgtcctatcaataggagctgtatttgccatcataggaggcttcattcactgatttcccctattctcaggctacaccctagaccaaacctacgccaaaatccatttcactatcatattcatcggcgtaaatctaactttcttcccacaacactttctcggcctatccggaatgccccgacgttactcggactaccccgatgcatacaccacatgaaacatcctatcatctgtaggctcattcatttctctaacagcagtaatattaataattttcatgatttgagaagccttcgcttcgaagcgaaaagtcctaatagtagaagaaccctccataaacctggagtgactatatggatgccccccaccctaccacacattcgaagaacccgtatacataaaatctagacaaaaaaggaaggaatcgaaccccccaaagctggtttcaagccaaccccatggcctccatgactttttcaaaaaggtattagaaaaaccatttcataactttgtcaaagttaaattataggctaaatcctatatatcttaatggcacatgcagcgcaagtaggtctacaagacgctacttcccctatcatagaagagcttatcacctttcatgatcacgccctcataatcattttccttatctgcttcctagtcctgtatgcccttttcctaacactcacaacaaaactaactaatactaacatctcagacgctcaggaaatagaaaccgtctgaactatcctgcccgccatcatcctagtcctcatcgccctcccatccctacgcatcctttacataacagacgaggtcaacgatccctcccttaccatcaaatcaattggccaccaatggtactgaacctacgagtacaccgactacggcggactaatcttcaactcctacatacttcccccattattcctagaaccaggcgacctgcgactccttgacgttgacaatcgagtagtactcccgattgaagcccccattcgtataataattacatcacaagacgtcttgcactcatgagctgtccccacattaggcttaaaaacagatgcaattcccggacgtctaaaccaaaccactttcaccgctacacgaccgggggtatactacggtcaatgctctgaaatctgtggagcaaaccacagtttcatgcccatcgtcctagaattaattcccctaaaaatctttgaaatagggcccgtatttaccctatagcaccccctctaccccctctagagcccactgtaaagctaacttagcattaaccttttaagttaaagattaagagaaccaacacctctttacagtgaaatgccccaactaaatactaccgtatggcccaccataattacccccatactccttacactattcctcatcacccaactaaaaatattaaacacaaactaccacctacctccctcaccaaagcccataaaaataaaaaattataacaaaccctgagaaccaaaatgaacgaaaatctgttcgcttcattcattgcccccacaatcctaggcctacccgccgcagtactgatcattctatttccccctctattgatccccacctccaaatatctcatcaacaaccgactaatcaccacccaacaatgactaatcaaactaacctcaaaacaaatgataaccatacacaacactaaaggacgaacctgatctcttatactagtatccttaatcatttttattgccacaactaacctcctcggactcctgcctcactcatttacaccaaccacccaactatctataaacctagccatggccatccccttatgagcgggcgcagtgattataggctttcgctctaagattaaaaatgccctagcccacttcttaccacaaggcacacctacaccccttatccccatactagttattatcgaaaccatcagcctactcattcaaccaatagccctggccgtacgcctaaccgctaacattactgcaggccacctactcatgcacctaattggaagcaccaccctagcaatatcaaccattaaccttccctctacacttatcatcttcacaattctaattctactgactatcctagaaatcgctgtcgccttaatccaagcctacgttttcacacttctagtaagcctctacctgcacgacaacacataatgacccaccaatcacatgcctatcatatagtaaaacccagcccatgacccctaacaggggccctctcagccctcctaatgacctccggcctagccatgtgatttcacttccactccataacgctcctcatactaggcctactaaccaacacactaaccatataccaatgatggcgcgatgtaacacgagaaagcacataccaaggccaccacacaccacctgtccaaaaaggccttcgatacgggataatcctatttattacctcagaagtttttttcttcgcaggatttttctgagccttttaccactccagcctagcccctaccccccaattaggagggcactggcccccaacaggcatcaccccgctaaatcccctagaagtcccactcctaaacacatccgtattactcgcatcaggagtatcaatcacctgagctcaccatagtctaatagaaaacaaccgaaaccaaataattcaagcactgctcattacaattttactgggcctctattttaccctcctacaagcctcagagtacttcgagtctcccttcaccatttccgacggcatctacggctcaacattttttgtagccacaggcttccacggacttcacgtcattattggctcaactttcctcactatctgcttcatccgccaactaatatttcactttacatccaaacatcactttggcttcgaagccgccgcctgatactggcattttgtagatgtggtttgactatttctgtatgtctccatctattgatgagggtcttactcttttagtataaatagtaccgttaacttccaattaactagttttgacaacattcaaaaaagagtaataaacttcgccttaattttaataatcaacaccctcctagccttactactaataattattacattttgactaccacaactcaacggctacatagaaaaatccaccccttacgagtgcggcttcgaccctatatcccccgcccgcgtccctttctccataaaattcttcttagtagctattaccttcttattatttgatctagaaattgccctccttttacccctaccatgagccctacaaacaactaacctgccactaatagttatgtcatccctcttattaatcatcatcctagccctaagtctggcctatgagtgactacaaaaaggattagactgaaccgaattggtatatagtttaaacaaaacgaatgatttcgactcattaaattatgataatcatatttaccaaatgcccctcatttacataaatattatactagcatttaccatctcacttctaggaatactagtatatcgctcacacctcatgtcctccctactatgcctagaaggaataatactatcgctgttcattatagctactctcataaccctcaacacccactccctcttagccaatattgtgcctattgccatactagtctttgccgcctgcgaagcagcggtgggcctagccctactagtctcaatctccaacacatatggcctagactacgtacataacctaaacctactccaatgctaaaactaatcgtcccaacaattatattactaccactgacatgactttccaaaaaacacataatttgaatcaacacaaccacccacagcctaattattagcatcatccctctactattttttaaccaaatcaacaacaacctatttagctgttccccaaccttttcctccgaccccctaacaacccccctcctaatactaactacctgactcctacccctcacaatcatggcaagccaacgccacttatccagtgaaccactatcacgaaaaaaactctacctctctatactaatctccctacaaatctccttaattataacattcacagccacagaactaatcatattttatatcttcttcgaaaccacacttatccccaccttggctatcatcacccgatgaggcaaccagccagaacgcctgaacgcaggcacatacttcctattctacaccctagtaggctcccttcccctactcatcgcactaatttacactcacaacaccctaggctcactaaacattctactactcaccctcactgcccaagaactatcaaactcctgagccaacaacttaatatgactagcttacacaatagcttttatagtaaagatacctctttacggactccacttatgactccctaaagcccatgtcgaagcccccatcgctgggtcaatagtacttgccgcagtactcttgaaactaggcggctatggtataatacgcctcacactcattctcaaccccctgacaaaacacatagcctaccccttccttgtactatccctatgaggcataattataacaagctccatctgcctacgacaaacagacctaaaatcgctcattgcatactcttcaatcagccacatagccctcgtagtaacagccattctcatccaaaccccctgaagcttcaccggcgcagtcattctcataatcgcccacggacttacatcctcattactattctgcctagcaaactcaaactacgaacgcactcacagtcgcatcataatcctctctcaaggacttcaaactctactcccactaatagctttttgatgacttctagcaagcctcgccaacctcgccttaccacccactattaacctactgggagaactctctgtgctagtaaccacgttctcctgatcaaatatcactctcctacttacaggactcaacatactagtcacagccctatactccctctacatatttaccacaacacaatggggctcactcacccaccacattaacaacataaaaccctcattcacacgagaaaacaccctcatgttcatacacctatcccccattctcctcctatccctcaaccccgacatcattaccgggttttcctcttgtaaatatagtttaaccaaaacatcagattgtgaatctgacaacagaggcttacgaccccttatttaccgagaaagctcacaagaactgctaactcatgcccccatgtctaacaacatggctttctcaacttttaaaggataacagctatccattggtcttaggccccaagaattttggtgcaactccaaataaaagtaataaccatgcacactactataaccaccctaaccctaacttccctaattccccccatccttaccaccctcgttaaccctaacaaaaaaaactcatacccccattatgtaaaatccattgtcgcatccacctttattatcagtctcttccccacaacaatattcatgtgcctagaccaagaagttattatctcgaactgacactgagccacaacccaaacaacccagctctccctaagcttcaaactagactacttctccataatattcatccctgtagcattgttcgttacatggtccatcatagaattctcactgtgatatataaactcagacccaaacattaatcagttcttcaaatatctactcatcttcctaattaccatactaatcttagttaccgctaacaacctattccaactgttcatcggctgagagggcgtaggaattatatccttcttgctcatcagttgatgatacgcccgagcagatgccaacacagcagccattcaagcaatcctatacaaccgtatcggcgatatcggtttcatcctcgccttagcatgatttatcctacactccaactcatgagacccacaacaaatagcccttctaaacgctaatccaagcctcaccccactactaggcctcctcctagcagcagcaggcaaatcagcccaattaggtctccacccctgactcccctcagccatagaaggccccaccccagtctcagccctactccactcaagcactatagttgtagcaggaatcttcttactcatccgcttccaccccctaacagaaaatagcccactaatccaaactctaacactatgcttaggcgctatcaccactctgttcgcagcagtctgcgcccttacacaaaatgacatcaaaaaaatcgtagccttctccacttcaagtcaactaggactcataatagttacaatcggcatcaaccaaccacacctagcattcctgcacatctgtacccacgccttcttcaaagccatactatttatgtgctccgggtccatcatccacaaccttaacaatgaacaagatattcgaaaaataggaggactactcaaaaccatacctctcacttcaacctccctcaccattggcagcctagcattagcaggaatacctttcctcacaggtttctactccaaagaccacatcatcgaaaccgcaaacatatcatacacaaacgcctgagccctatctattactctcatcgctacctccctgacaagcgcctatagcactcgaataattcttctcaccctaacaggtcaacctcgcttccccacccttactaacattaacgaaaataaccccaccctactaaaccccattaaacgcctggcagccggaagcctattcgcaggatttctcattactaacaacatttcccccgcatcccccttccaaacaacaatccccctctacctaaaactcacagccctcgctgtcactttcctaggacttctaacagccctagacctcaactacctaaccaacaaacttaaaataaaatccccactatgcacattttatttctccaacatactcggattctaccctagcatcacacaccgcacaatcccctatctaggccttcttacgagccaaaacctgcccctactcctcctagacctaacctgactagaaaagctattacctaaaacaatttcgcagcaccaaatctccacctccatcatcacctcaacccaaaaaggcataattaaactttacttcctctctttcttcttcccactcatcctaaccctactcctaatcacataacctattcccccgagcaatttcaattacaatatatacaccaacaaacaatgttcaaccagtaactactactaatcaacgcccataatcatacaaagcccccgcaccaataggatcctcccgaatcaaccctgacccctctccttcataaattattcagcttcctacactattaaagtttaccacaaccaccaccccatcatactctttcacccacagcaccaatcctacctccatcgctaaccccactaaaacactcaccaagacctcaacccctgacccccatgcctcaggatactcctcaatagccatcgctgtagtatatccaaagacaaccatcattccccctaaataaattaaaaaaactattaaacccatataacctcccccaaaattcagaataataacacacccgaccacaccgctaacaatcaatactaaacccccataaataggagaaggcttagaagaaaaccccacaaaccccattactaaacccacactcaacagaaacaaagcatacatcattattctcgcacggactacaaccacgaccaatgatatgaaaaaccatcgttgtatttcaactacaagaacaccaatgaccccaatacgcaaaattaaccccctaataaaattaattaaccactcactcatcgacctccccaccccatccaacatctccgcatgatgaaacttcggctcactccttggcgcctgcctgatcctccaaatcaccacaggactattcctagccatgcactactcaccagacgcctcaaccgccttttcatcaatcgcccacatcactcgagacgtaaattatggctgaatcatccgctaccttcacgccaatggcgcctcaatattctttatctgcctcttcctacacatcgggcgaggcctatattacggatcatttctctactcagaaacctgaaacatcggcattatcctcctgcttgcaactatagcaacagccttcataggctatgtcctcccgtgaggccaaatatcattctgaggggccacagtaattacaaacttactatccgccatcccatacattgggacagacctagttcaatgaatctgaggaggctactcagtagacagtcccaccctcacacgattctttacctttcacttcatcttgcccttcattattgcagccctagcagcactccacctcctattcttgcacgaaacgggatcaaacaaccccctaggaatcacctcccattccgataaaatcaccttccacccttactacacaatcaaagacgccctcggcttacttctcttccttctctccttaatgacattaacactattctcaccagacctcctaggcgacccagacaattataccctagccaaccccttaaacacccctccccacatcaagcccgaatgatatttcctattcgcctacacaattctccgatccgtccctaacaaactaggaggcgtccttgccctattactatccatcctcatcctagcaataatccccatcctccatatatccaaacaacaaagcataatatttcgcccactaagccaatcactttattgactcctagccgcagacctcctcattctaacctgaatcggaggacaaccagtaagctacccttttaccatcattggacaagtagcatccgtactatacttcacaacaatcctaatcctaataccaactatctccctaattgaaaacaaaatactcaaatgggcctgtccttgtagtataaactaatacaccagtcttgtaaaccggagatgaaaacctttttccaaggacaaatcagagaaaaagtctttaactccaccattagcacccaaagctaagattctaatttaaactattctctgttctttcatggggaagcagatttgggtaccacccaagtattgactcacccatcaacaaccgctatgtatttcgtacattactgccagccaccatgaatattgtacggtaccataaatacttgaccacctgtagtacataaaaacccaatccacatcaaaaccccctccccatgcttacaagcaagtacagcaatcaacccccaactatcacacatcaactgcaactccaaagccacccctcacccactaggataccaacaaacctacccacccttaacagtacatagcacataaagccatttaccgtacatagcacattacagtcaaatcccttctcgtccccatggatgacccccctcagataggggtcccttgaccaccatcctccgtgaaatcaatatcccgcacaagagtgctactctcctcgctccgggcccataacacttgggggtagctaaagtgaactgtatccgacatctggttcctacttcagggccataaagcctaaatagcccacacgttccccttaaataagacatcacgatg

SEQ ID NO: 322 - DNA, 16571 bp, Homo sapiens mitochondrial
  3109: "n" refers to a nucleotide at position 3107 of the Cambridge Reference Sequence (CRS, Anderson et al. 1981 Nature 290:457-465), later determined to be absent from the human mtDNA sequence according to the revised CRS (rCRS, Andrews et al. 1999 Nature Genetics 23:147); "n" therefore represents a single nucleotide deletion at a position corresponding to nucleotide 3107 of SEQ ID NO:1 as provided herein.
gatcacaggtctatcaccctattaaccactcacgggagctctccatgcatttggtattttcgtctggggggtatgcacgcgatagcattgcgagacgctggagccggagcaccctatgtcgcagtatctgtctttgattcctgcctcatcctattatttatcgcacctacgttcaatattacaggcgaacatacctactaaagtgtgttaattaattaatgcttgtaggacataataataacaattgaatgtctgcacagccgctttccacacagacatcataacaaaaaatttccaccaaaccccccctcccccccgcttctggccacagcacttaaacacatctctgccaaaccccaaaaacaaagaaccctaacaccagcctaaccagatttcaaattttatcttttggcggtatgcacttttaacagtcaccccccaactaacacattattttcccctcccactcccatactactaatctcatcaatacaacccccgcccatcctacccagcacacacacaccgctgctaaccccataccccgaaccaaccaaaccccaaagacaccccccacagtttatgtagcttacctcctcaaagcaatacactgaaaatgtttagacgggctcacatcaccccataaacaaataggtttggtcctagcctttctattagctcttagtaagattacacatgcaagcatccccgttccagtgagttcaccctctaaatcaccacgatcaaaagggacaagcatcaagcacgcagcaatgcagctcaaaacgcttagcctagccacacccccacgggaaacagcagtgattaacctttagcaataaacgaaagtttaactaagctatactaaccccagggttggtcaatttcgtgccagccaccgcggtcacacgattaacccaagtcaatagaagccggcgtaaagagtgttttagatcacccccgccccaataaagctaaaactcgcctgagttgtaaaaaactccagttgacacaaaatagactacgaaagtggctttaacatatctgaacacacaatagctaagacccaaactgggattagataccccactatgcttagccctaaacctcaacagttaaatcaacaaaactgctcgccagaacactacgagccacagcttaaaactcaaaggacctggcggtgcttcatatccctctagaggagcctgttctgtaatcgataaaccccgatcaacctcaccacctcttgctcagcctatataccgccatcttcagcaaaccctgatgaaggctacaaagtaagcgcaagtacccacgtaaagacgttaggtcaaggtgtagcccatgaggtggcaagaaatgggctacattttctaccccagaaaactacgatagcccttatgaaacttaagggtcgaaggtggatttagcagtaaactgagagtagagtgcttagttgaacagggccctgaagcgcgtacacaccgcccgtcaccctcctcaagtatacttcaaaggacatttaactaaaacccctacgcatttatatagaggagacaagtcgtaacatggtaagtgtactggaaagtgcacttggacgaaccagagtgtagcttaacacaaagcacccaacttacacttaggagatttcaacttaacttgaccgctctgagctaaacctagccccaaacccactccaccttactaccagacaaccttagccaaaccatttacccaaataaagtataggcgatagaaattgaaacctggcgcaatagatatagtaccgcaagggaaagatgaaaaattataaccaagcataatatagcaaggactaacccctataccttctgcataatgaattaactagaaataactttgcaaggagagccaaagctaagacccccgaaaccagacgagctacctaagaacagctaaaagagcacacccgtctatgtagcaaaatagtgggaagatttataggtagaggcgacaaacctaccgagcctggtgatagctggttgtccaagatagaatcttagttcaactttaaatttgcccacagaaccctctaaatccccttgtaaatttaactgttagtccaaagaggaacagctctttggacactaggaaaaaaccttgtagagagagtaaaaaatttaacacccatagtaggcctaaaagcagccaccaattaagaaagcgttcaagctcaacacccactacctaaaaaatcccaaacatataactgaactcctcacacccaattggaccaatctatcaccctatagaagaactaatgttagtataagtaacatgaaaacattctcctccgcataagcctgcgtcagattaaaacactgaactgacaattaacagcccaatatctacaatcaaccaacaagtcattattaccctcactgtcaacccaacacaggcatgctcataaggaaaggttaaaaaaagtaaaaggaactcggcaaatcttaccccgcctgtttaccaaaaacatcacctctagcatcaccagtattagaggcaccgcctgcccagtgacacatgtttaacggccgcggtaccctaaccgtgcaaaggtagcataatcacttgttccttaaatagggacctgtatgaatggctccacgagggttcagctgtctcttacttttaaccagtgaaattgacctgcccgtgaagaggcgggcataacacagcaagacgagaagaccctatggagctttaatttattaatgcaaacagtacctaacaaacccacaggtcctaaactaccaaacctgcattaaaaatttcggttggggcgacctcggagcagaacccaacctccgagcagtacatgctaagacttcaccagtcaaagcgaactactatactcaattgatccaataacttgaccaacggaacaagttaccctagggataacagcgcaatcctattctagagtccatatcaacaatagggtttacgacctcgatgttggatcaggacatcccgatggtgcagccgctattaaaggttcgtttgttcaacgattaaagtcctacgtgatctgagttcagaccggagtaatccaggtcggtttctatctacnttcaaattcctccctgtacgaaaggacaagagaaataaggcctacttcacaaagcgccttcccccgtaaatgatatcatctcaacttagtattatacccacacccacccaagaacagggtttgttaagatggcagagcccggtaatcgcataaaacttaaaactttacagtcagaggttcaattcctcttcttaacaacatacccatggccaacctcctactcctcattgtacccattctaatcgcaatggcattcctaatgcttaccgaacgaaaaattctaggctatatacaactacgcaaaggccccaacgttgtaggcccctacgggctactacaacccttcgctgacgccataaaactcttcaccaaagagcccctaaaacccgccacatctaccatcaccctctacatcaccgccccgaccttagctctcaccatcgctcttctactatgaacccccctccccatacccaaccccctggtcaacctcaacctaggcctcctatttattctagccacctctagcctagccgtttactcaatcctctgatcagggtgagcatcaaactcaaactacgccctgatcggcgcactgcgagcagtagcccaaacaatctcatatgaagtcaccctagccatcattctactatcaacattactaataagtggctcctttaacctctccacccttatcacaacacaagaacacctctgattactcctgccatcatgacccttggccataatatgatttatctccacactagcagagaccaaccgaacccccttcgaccttgccgaaggggagtccgaactagtctcaggcttcaacatcgaatacgccgcaggccccttcgccctattcttcatagccgaatacacaaacattattataataaacaccctcaccactacaatcttcctaggaacaacatatgacgcactctcccctgaactctacacaacatattttgtcaccaagaccctacttctaacctccctgttcttatgaattcgaacagcatacccccgattccgctacgaccaactcatacacctcctatgaaaaaacttcctaccactcaccctagcattacttatatgatatgtctccatacccattacaatctccagcattccccctcaaacctaagaaatatgtctgataaaagagttactttgatagagtaaataataggagcttaaacccccttatttctaggactatgagaatcgaacccatccctgagaatccaaaattctccgtgccacctatcacaccccatcctaaagtaaggtcagctaaataagctatcgggcccataccccgaaaatgttggttatacccttcccgtactaattaatcccctggcccaacccgtcatctactctaccatctttgcaggcacactcatcacagcgctaagctcgcactgattttttacctgagtaggcctagaaataaacatgctagcttttattccagttctaaccaaaaaaataaaccctcgttccacagaagctgccatcaagtatttcctcacgcaagcaaccgcatccataatccttctaatagctatcctcttcaacaatatactctccggacaatgaaccataaccaatactaccaatcaatactcatcattaataatcataatggctatagcaataaaactaggaatagccccctttcacttctgagtcccagaggttacccaaggcacccctctgacatccggcctgcttcttctcacatgacaaaaactagcccccatctcaatcatataccaaatctctccctcactaaacgtaagccttctcctcactctctcaatcttatccatcatagcaggcagttgaggtggattaaaccaaacccagctacgcaaaatcttagcatactcctcaattacccacataggatgaataatagcagttctaccgtacaaccctaacataaccattcttaatttaactatttatattatcctaactactaccgcattcctactactcaacttaaactccagcaccacgaccctactactatctcgcacctgaaacaagctaacatgactaacacccttaattccatccaccctcctctccctaggaggcctgcccccgctaaccggctttttgcccaaatgggccattatcgaagaattcacaaaaaacaatagcctcatcatccccaccatcatagccaccatcaccctccttaacctctacttctacctacgcctaatctactccacctcaatcacactactccccatatctaacaacgtaaaaataaaatgacagtttgaacatacaaaacccaccccattcctccccacactcatcgcccttaccacgctactcctacctatctccccttttatactaataatcttatagaaatttaggttaaatacagaccaagagccttcaaagccctcagtaagttgcaatacttaatttctgtaacagctaaggactgcaaaaccccactctgcatcaactgaacgcaaatcagccactttaattaagctaagcccttactagaccaatgggacttaaacccacaaacacttagttaacagctaagcaccctaatcaactggcttcaatctacttctcccgccgccgggaaaaaaggcgggagaagccccggcaggtttgaagctgcttcttcgaatttgcaattcaatatgaaaatcacctcggagctggtaaaaagaggcctaacccctgtctttagatttacagtccaatgcttcactcagccattttacctcacccccactgatgttcgccgaccgttgactattctctacaaaccacaaagacattggaacactatacctattattcggcgcatgagctggagtcctaggcacagctctaagcctccttattcgagccgagctgggccagccaggcaaccttctaggtaacgaccacatctacaacgttatcgtcacagcccatgcatttgtaataatcttcttcatagtaatacccatcataatcggaggctttggcaactgactagttcccctaataatcggtgcccccgatatggcgtttccccgcataaacaacataagcttctgactcttacctccctctctcctactcctgctcgcatctgctatagtggaggccggagcaggaacaggttgaacagtctaccctcccttagcagggaactactcccaccctggagcctccgtagacctaaccatcttctccttacacctagcaggtgtctcctctatcttaggggccatcaatttcatcacaacaattatcaatataaaaccccctgccataacccaataccaaacgcccctcttcgtctgatccgtcctaatcacagcagtcctacttctcctatctctcccagtcctagctgctggcatcactatactactaacagaccgcaacctcaacaccaccttcttcgaccccgccggaggaggagaccccattctataccaacacctattctgatttttcggtcaccctgaagtttatattcttatcctaccaggcttcggaataatctcccatattgtaacttactactccggaaaaaaagaaccatttggatacataggtatggtctgagctatgatatcaattggcttcctagggtttatcgtgtgagcacaccatatatttacagtaggaatagacgtagacacacgagcatatttcacctccgctaccataatcatcgctatccccaccggcgtcaaagtatttagctgactcgccacactccacggaagcaatatgaaatgatctgctgcagtgctctgagccctaggattcatctttcttttcaccgtaggtggcctgactggcattgtattagcaaactcatcactagacatcgtactacacgacacgtactacgttgtagcccacttccactatgtcctatcaataggagctgtatttgccatcataggaggcttcattcactgatttcccctattctcaggctacaccctagaccaaacctacgccaaaatccatttcactatcatattcatcggcgtaaatctaactttcttcccacaacactttctcggcctatccggaatgccccgacgttactcggactaccccgatgcatacaccacatgaaacatcctatcatctgtaggctcattcatttctctaacagcagtaatattaataattttcatgatttgagaagccttcgcttcgaagcgaaaagtcctaatagtagaagaaccctccataaacctggagtgactatatggatgccccccaccctaccacacattcgaagaacccgtatacataaaatctagacaaaaaaggaaggaatcgaaccccccaaagctggtttcaagccaaccccatggcctccatgactttttcaaaaaggtattagaaaaaccatttcataactttgtcaaagttaaattataggctaaatcctatatatcttaatggcacatgcagcgcaagtaggtctacaagacgctacttcccctatcatagaagagcttatcacctttcatgatcacgccctcataatcattttccttatctgcttcctagtcctgtatgcccttttcctaacactcacaacaaaactaactaatactaacatctcagacgctcaggaaatagaaaccgtctgaactatcctgcccgccatcatcctagtcctcatcgccctcccatccctacgcatcctttacataacagacgaggtcaacgatccctcccttaccatcaaatcaattggccaccaatggtactgaacctacgagtacaccgactacggcggactaatcttcaactcctacatacttcccccattattcctagaaccaggcgacctgcgactccttgacgttgacaatcgagtagtactcccgattgaagcccccattcgtataataattacatcacaagacgtcttgcactcatgagctgtccccacattaggcttaaaaacagatgcaattcccggacgtctaaaccaaaccactttcaccgctacacgaccgggggtatactacggtcaatgctctgaaatctgtggagcaaaccacagtttcatgcccatcgtcctagaattaattcccctaaaaatctttgaaatagggcccgtatttaccctatagcaccccctctaccccctctagagcccactgtaaagctaacttagcattaaccttttaagttaaagattaagagaaccaacacctctttacagtgaaatgccccaactaaatactaccgtatggcccaccataattacccccatactccttacactattcctcatcacccaactaaaaacattaaacacaaactaccacctacctccctcaccaaagcccataaaaataaaaaattataacaaaccctgagaaccaaaatgaacgaaaatctgttcgcttcattcattgcccccacaatcctaggcctacccgccgcagtactgatcattctatttccccctctattgatccccacctccaaatatctcatcaacaaccgactaatcaccacccaacaatgactaatcaaactaacctcaaaacaaatgataaccatacacaacactaaaggacgaacctgatctcttatactagtatccttaatcatttttattgccacaactaacctcctcggactcctgcctcactcatttacaccaaccacccaactatctataaacctagccatggccatccccttatgagcgggcgcagtgattataggctttcgctctaagattaaaaatgctctagcccacttcttaccacaaggcacacctacaccccttatccccatactagttattatcgaaaccatcagcctactcattcaaccaatagccctggccgtacgcctaaccgctaacattactgcaggccacctactcatgcacctaattggaagcgccaccctagcaatatcaaccattaaccttccctctacacttatcatcttcacaattctaattctactgactatcctagaaatcgctgtcgccttaatccaagcctacgttttcacacttctagtaagcctctacctgcacgacaacacataatgacccaccaatcacatgcctatcatatagtaaaacccagcccatgacccctaacaggggccctctcagccctcctaatgacctccggcctagccatgtgatttcacttccactccataacgctcctcatactaggcctactaaccaacacactaaccatataccaatgatggcgcgatgtaacacgagaaagcacataccaaggccaccacacaccacctgtccaaaaaggccttcgatacgggataatcctatttattacctcagaagtttttttcttcgcaggatttttctgagccttttaccactccagcctagcccctaccccccaattaggagggcactggcccccaacaggcatcaccccgctaaatcccctagaagtcccactcctaaacacatccgtattactcgcatcaggagtatcaatcacctgagctcaccatagtctaatagaaaacaaccgaaaccaaataattcaagcactgcttattacaattttactgggtctctattttaccctcctacaagcctcagagtacttcgagtctcccttcaccatttccgacggcatctacggctcaacattttttgtagccacaggcttccacggacttcacgtcattattggctcaactttcctcactatctgcttcatccgccaactaatatttcactttacatccaaacatcactttggcttcgaagccgccgcctgatactggcattttgtagatgtggtttgactatttctgtatgtctccatctattgatgagggtcttactcttttagtataaatagtaccgttaacttccaattaactagttttgacaacattcaaaaaagagtaataaacttcgccttaattttaataatcaacaccctcctagccttactactaataattattacattttgactaccacaactcaacggctacatagaaaaatccaccccttacgagtgcggcttcgaccctatatcccccgcccgcgtccctttctccataaaattcttcttagtagctattaccttcttattatttgatctagaaattgccctccttttacccctaccatgagccctacaaacaactaacctgccactaatagttatgtcatccctcttattaatcatcatcctagccctaagtctggcctatgagtgactacaaaaaggattagactgaaccgaattggtatatagtttaaacaaaacgaatgatttcgactcattaaattatgataatcatatttaccaaatgcccctcatttacataaatattatactagcatttaccatctcacttctaggaatactagtatatcgctcacacctcatatcctccctactatgcctagaaggaataatactatcgctgttcattatagctactctcataaccctcaacacccactccctcttagccaatattgtgcctattgccatactagtctttgccgcctgcgaagcagcggtgggcctagccctactagtctcaatctccaacacatatggcctagactacgtacataacctaaacctactccaatgctaaaactaatcgtcccaacaattatattactaccactgacatgactttccaaaaaacacataatttgaatcaacacaaccacccacagcctaattattagcatcatccctctactattttttaaccaaatcaacaacaacctatttagctgttccccaaccttttcctccgaccccctaacaacccccctcctaatactaactacctgactcctacccctcacaatcatggcaagccaacgccacttatccagtgaaccactatcacgaaaaaaactctacctctctatactaatctccctacaaatctccttaattataacattcacagccacagaactaatcatattttatatcttcttcgaaaccacacttatccccaccttggctatcatcacccgatgaggcaaccagccagaacgcctgaacgcaggcacatacttcctattctacaccctagtaggctcccttcccctactcatcgcactaatttacactcacaacaccctaggctcactaaacattctactactcactctcactgcccaagaactatcaaactcctgagccaacaacttaatatgactagcttacacaatagcttttatagtaaagatacctctttacggactccacttatgactccctaaagcccatgtcgaagcccccatcgctgggtcaatagtacttgccgcagtactcttaaaactaggcggctatggtataatacgcctcacactcattctcaaccccctgacaaaacacatagcctaccccttccttgtactatccctatgaggcataattataacaagctccatctgcctacgacaaacagacctaaaatcgctcattgcatactcttcaatcagccacatagccctcgtagtaacagccattctcatccaaaccccctgaagcttcaccggcgcagtcattctcataatcgcccacgggcttacatcctcattactattctgcctagcaaactcaaactacgaacgcactcacagtcgcatcataatcctctctcaaggacttcaaactctactcccactaatagctttttgatgacttctagcaagcctcgctaacctcgccttaccccccactattaacctactgggagaactctctgtgctagtaaccacgttctcctgatcaaatatcactctcctacttacaggactcaacatactagtcacagccctatactccctctacatatttaccacaacacaatggggctcactcacccaccacattaacaacataaaaccctcattcacacgagaaaacaccctcatgttcatacacctatcccccattctcctcctatccctcaaccccgacatcattaccgggttttcctcttgtaaatatagtttaaccaaaacatcagattgtgaatctgacaacagaggcttacgaccccttatttaccgagaaagctcacaagaactgctaactcatgcccccatgtctaacaacatggctttctcaacttttaaaggataacagctatccattggtcttaggccccaaaaattttggtgcaactccaaataaaagtaataaccatgcacactactataaccaccctaaccctgacttccctaattccccccatccttaccaccctcgttaaccctaacaaaaaaaactcatacccccattatgtaaaatccattgtcgcatccacctttattatcagtctcttccccacaacaatattcatgtgcctagaccaagaagttattatctcgaactgacactgagccacaacccaaacaacccagctctccctaagcttcaaactagactacttctccataatattcatccctgtagcattgttcgttacatggtccatcatagaattctcactgtgatatataaactcagacccaaacattaatcagttcttcaaatatctactcatcttcctaattaccatactaatcttagttaccgctaacaacctattccaactgttcatcggctgagagggcgtaggaattatatccttcttgctcatcagttgatgatacgcccgagcagatgccaacacagcagccattcaagcaatcctatacaaccgtatcggcgatatcggtttcatcctcgccttagcatgatttatcctacactccaactcatgagacccacaacaaatagcccttctaaacgctaatccaagcctcaccccactactaggcctcctcctagcagcagcaggcaaatcagcccaattaggtctccacccctgactcccctcagccatagaaggccccaccccagtctcagccctactccactcaagcactatagttgtagcaggaatcttcttactcatccgcttccaccccctagcagaaaatagcccactaatccaaactctaacactatgcttaggcgctatcaccactctgttcgcagcagtctgcgcccttacacaaaatgacatcaaaaaaatcgtagccttctccacttcaagtcaactaggactcataatagttacaatcggcatcaaccaaccacacctagcattcctgcacatctgtacccacgccttcttcaaagccatactatttatgtgctccgggtccatcatccacaaccttaacaatgaacaagatattcgaaaaataggaggactactcaaaaccatacctctcacttcaacctccctcaccattggcagcctagcattagcaggaatacctttcctcacaggtttctactccaaagaccacatcatcgaaaccgcaaacatatcatacacaaacgcctgagccctatctattactctcatcgctacctccctgacaagcgcctatagcactcgaataattcttctcaccctaacaggtcaacctcgcttccccacccttactaacattaacgaaaataaccccaccctactaaaccccattaaacgcctggcagccggaagcctattcgcaggatttctcattactaacaacatttcccccacatcccccttccaaacaacaatccccctctacctaaaactcacagccctcgctgtcactttcctaggacttctaacagccctagacctcaactacctaaccaacaaacttaaaataaaatccccactatgcacattttatttctccaacatactcggattctaccctagcatcacacaccgcacaatcccctatctaggccttcttacgagccaaaacctgcccctactcctcctagacctaacctgactagaaaagctattacctaaaacaatttcacagcaccaaatctccacctccatcatcacctcaacccaaaaaggcataattaaactttacttcctctctttcttcttcccactcatcctaaccctactcctaatcacataacctattcccccgagcaatctcaattacaatatatacaccaacaaacaatgttcaaccagtaactactactaatcaacgcccataatcatacaaagcccccgcaccaataggatcctcccgaatcaaccctgacccctctccttcataaattattcagcttcctacactattaaagtttaccacaaccaccaccccatcatactctttcacccacagcaccaatcctacctccatcgctaaccccactaaaacactcaccaagacctcaacccctgacccccatgcctcaggatactcctcaatagccatcgctgtagtatatccaaagacaaccatcattccccctaaataaattaaaaaaactattaaacccatataacctcccccaaaattcagaataataacacacccgaccacaccgctaacaatcaatactaagcccccataaataggagaaggcttagaagaaaaccccacaaaccccattactaaacccacactcaacagaaacaaagcatacatcattattctcgcacggactacaaccacgaccaatgatatgaaaaaccatcgttgtatttcaactacaagaacaccaatgaccccaatacgcaaaactaaccccctaataaaattaattaaccactcattcatcgacctccccaccccatccaacatctccgcatgatgaaacttcggctcactccttggcgcctgcctgatcctccaaatcaccacaggactattcctagccatgcactactcaccagacgcctcaaccgccttttcatcaatcgcccacatcactcgagacgtaaattatggctgaatcatccgctaccttcacgccaatggcgcctcaatattctttatctgcctcttcctacacatcgggcgaggcctatattacggatcatttctctactcagaaacctgaaacatcggcattatcctcctgcttgcaactatagcaacagccttcataggctatgtcctcccgtgaggccaaatatcattctgaggggccacagtaattacaaacttactatccgccatcccatacattgggacagacctagttcaatgaatctgaggaggctactcagtagacagtcccaccctcacacgattctttacctttcacttcatcttgcccttcattattgcagccctagcagcactccacctcctattcttgcacgaaacgggatcaaacaaccccctaggaatcacctcccattccgataaaatcaccttccacccttactacacaatcaaagacgccctcggcttacttctcttccttctctccttaatgacattaacactattctcaccagacctcctaggcgacccagacaattataccctagccaaccccttaaacacccctccccacatcaagcccgaatgatatttcctattcgcctacacaattctccgatccgtccctaacaaactaggaggcgtccttgccctattactatccatcctcatcctagcaataatccccatcctccatatatccaaacaacaaagcataatatttcgcccactaagccaatcactttattgactcctagccgcagacctcctcattctaacctgaatcggaggacaaccagtaagctacccttttaccatcattggacaagtagcatccgtactatacttcacaacaatcctaatcctaataccaactatctccctaattgaaaacaaaatactcaaatgggcctgtccttgtagtataaactaatacaccagtcttgtaaaccggagatgaaaacctttttccaaggacaaatcagagaaaaagtctttaactccaccattagcacccaaagctaagattctaatttaaactattctctgttctttcatggggaagcagatttgggtaccacccaagtattgactcacccatcaacaaccgctatgtatttcgtacattactgccagccaccatgaatattgtacggtaccataaatacttgaccacctgtagtacataaaaacccaatccacatcaaaaccccctccccatgcttacaagcaagtacagcaatcaaccctcaactatcacacatcaactgcaactccaaagccacccctcacccactaggatatcaacaaacctacccgcccttaacagtacatagcacataaagccatttaccgtacatagcacattacagtcaaatcccttctcgtccccatggatgacccccctcagataggggtcccttgaccaccatcctccgtgaaatcaatatcccgcacaagagtgctactctcctcgctccgggcccataacacttgggggtagctaaagtgaactgtatccgacatctggttcctacttcagggtcataaagcctaaatagcccacacgttccccttaaataagacatcacgatg

SEQ ID NO: 323 - DNA, 16571 bp, Homo sapiens mitochondrial
  3109: "n" refers to a nucleotide at position 3107 of the Cambridge Reference Sequence (CRS, Anderson et al. 1981 Nature 290:457-465), later determined to be absent from the human mtDNA sequence according to the revised CRS (rCRS, Andrews et al. 1999 Nature Genetics 23:147); "n" therefore represents a single nucleotide deletion at a position corresponding to nucleotide 3107 of SEQ ID NO:1 as provided herein.
gatcacaggtctatcaccctattaaccactcacgggagctctccatgcatttggtattttcgtctggggggtgtgcacgcgatagcattgcgagacgctggagccggagcaccctatgtcgcagtatctgtctttgattcctgcctcatcctattatttatcgcacctacgttcaatattacaggcgaacatacttactaaagtgtgttaattaattaatgcttgtaggacataataataacaattgaatgtctgcacagccgctttccacacagacatcataacaaaaaatttccaccaaaccccccctcccccccgcttctggccacagcacttaaacacatctctgccaaaccccaaaaacaaagaaccctaacaccagcctaaccagatttcaaattttatcttttggcggtatgcacttttaacagtcaccccccaactaacacattattttcccctcccactcccatactactaatctcatcaatacaacccccgcccatcctacccagcacacacacaccgctgctaaccccataccccgaaccaaccaaaccccaaagacaccccccacagtttatgtagcttacctcctcaaagcaatacactgaaaatgtttagacgggctcacatcaccccataaacaaataggtttggtcctagcctttctattagctcttagtaagattacacatgcaagcatccccgttccagtgagttcaccctctaaatcaccacgatcaaaagggacaagcatcaagcacgcagcaatgcagctcaaaacgcttagcctagccacacccccacgggaaacagcagtgattaacctttagcaataaacgaaagtttaactaagctatactaaccccagggttggtcaatttcgtgccagccaccgcggtcacacgattaacccaagtcaatagaagccggcgtaaagagtgttttagatcaccccctccccaataaagctaaaactcacctgagttgtaaaaaactccagttgacacaaaatagactacgaaagtggctttaacatatctgaacacacaatagctaagacccaaactgggattagataccccactatgcttagccctaaacctcaacagttaaatcaacaaaactgctcgccagaacactacgagccacagcttaaaactcaaaggacctggcggtgcttcatatccctctagaggagcctgttctgtaatcgataaaccccgatcaacctcaccacctcttgctcagcctatataccgccatcttcagcaaaccctgatgaaggctacaaagtaagcgcaagtacccacgtaaagacgttaggtcaaggtgtagcccatgaggtggcaagaaatgggctacattttctaccccagaaaactacgatagcccttatgaaacttaagggtcgaaggtggatttagcagtaaactgagagtagagtgcttagttgaacagggccctgaagcgcgtacacaccgcccgtcaccctcctcaagtatacttcaaaggacatttaactaaaacccctacgcatttatatagaggagacaagtcgtaacatggtaagtgtactggaaagtgcacttggacgaaccagagtgtagcttaacacaaagcacccaacttacacttaggagatttcaacttaacttgaccgctctgagctaaacctagccccaaacccactccaccttactaccagacaaccttagccaaaccatttacccaaataaagtataggcgatagaaattgaaacctggcgcaatagatatagtaccgcaagggaaagatgaaaaattataaccaagcataatatagcaaggactaacccctataccttctgcataatgaattaactagaaataactttgcaaggagagccaaagctaagacccccgaaaccagacgagctacctaagaacagctaaaagagcacacccgtctatgtagcaaaatagtgggaagatttataggtagaggcgacaaacctaccgagcctggtgatagctggttgtccaagatagaatcttagttcaactttaaatttgcccacagaaccctctaaatccccttgtaaatttaactgttagtccaaagaggaacagctctttggacactaggaaaaaaccttgtagagagagtaaaaaatttaacacccatagtaggcctaaaagcagccaccaattaagaaagcgttcaagctcaacacccactacctaaaaaatcccaaacatataactgaactcctcacacccaattggaccaatctatcaccctatagaagaactaatgttagtataagtaacatgaaaacattctcctccgcataagcctgcgtcagattaaaacactgaactgacaattaacagcccaatatctacaatcaaccaacaagtcattattaccctcactgtcaacccaacacaggcatgctcataaggaaaggttaaaaaaagtaaaaggaactcggcaaatcttaccccgcctgtttaccaaaaacatcacctctagcatcaccagtattagaggcaccgcctgcccagtgacacatgtttaacggccgcggtaccctaaccgtgcaaaggtagcataatcacttgttccttaaatagggacctgtatgaatggctccacgagggttcagctgtctcttacttttaaccagtgaaattgacctgcccgtgaagaggcgggcataacacagcaagacgagaagaccctatggagctttaatttattaatgcaaacagtacctaacaaacccacaggtcctaaactaccaaacctgcattaaaaatttcggttggggcgacctcggagcagaacccaacctccgagcagtacatgctaagacttcaccagtcaaagcgaactactatactcaattgatccaataacttgaccaacggaacaagttaccctagggataacagcgcaatcctattctagagtccatatcaacaatagggtttacgacctcgatgttggatcaggacatcccaatggtgcagccgctattaaaggttcgtttgttcaacgattaaagtcctacgtgatctgagttcagaccggagtaatccaggtcggtttctatctacnttcaaattcctccctgtacgaaaggacaagagaaataaggcctacttcacaaagcgccttcccccgtaaatgatatcatctcaacttagtattatacccacacccacccaagaacagggtttgttaagatggcagagcccggtaatcgcataaaacttaaaactttacagtcagaggttcaattcctcttcttaacaacatacccatggccaacctcctactcctcattgtacccattctaatcgcaatggcattcctaatgcttaccgaacgaaaaattctaggctatatacaactacgcaaaggccccaacgttgtaggcccctacgggctactacaacccttcgctgacgccataaaactcttcaccaaagagcccctaaaacccgccacatctaccatcaccctctacatcaccgccccgaccttagctctcaccatcgctcttctactatgaacccccctccccatacccaaccccctggtcaacctcaacctaggcctcctatttattctagccacctctagcctagccgtttactcaatcctctgatcagggtgagcatcaaactcaaactacgccctgatcggcgcactgcgagcagtagcccaaacaatctcatatgaagtcaccctagccatcattctactatcaacattactaataagtggctcctttaacctctccacccttatcacaacacaagaacacctctgattactcctgccatcatgacccttggccataatatgatttatctccacactagcagagaccaaccgaacccccttcgaccttgccgaaggggagtccgaactagtctcaggcttcaacatcgaatacgccgcaggccccttcgccctattcttcatagccgaatacacaaacattattataataaacaccctcaccactacaatcttcctaggaacaacatatgacgcactctcccctgaactctacacaacatattttgtcaccaagaccctacttctaacctccctgttcttatgaattcgaacagcatacccccgattccgctacgaccaactcatacacctcctatgaaaaaacttcctaccactcaccctagcattacttatatgatatgtctccatacccattacaatctccagcattccccctcaaacctaagaaatatgtctgataaaagagttactttgatagagtaaataataggagcttaaacccccttatttctaggactatgagaatcgaacccatccctgagaatccaaaattctccgtgccacctatcacaccccatcctaaagtaaggtcagctaaataagctatcgggcccataccccgaaaatgttggttatacccttcccgtactaattaatcccctggcccaacccgtcatctactctaccatctttgcaggcacactcatcacagcgctaagctcgcactgattttttacctgagtaggcctagaaataaacatgctagcttttattccagttctaaccaaaaaaataaaccctcgttccacagaagctgccatcaagtatttcctcacgcaagcaaccgcatccataatccttctaatagctatcctcttcaacaatatactctccggacaatgaaccataaccaatactaccaatcaatactcatcattaataatcataatggctatagcaataaaactaggaatagccccctttcacttctgagtcccagaggttacccaaggcacccctctgacatccggcctgcttcttctcacatgacaaaaactagcccccatctcaatcatataccaaatctctccctcactaaacgtaagccttctcctcactctctcaatcttatccatcatagcaggcagttgaggtggattaaaccaaacccagctacgcaaaatcttagcatactcctcaattacccacataggatgaataatagcagttctaccgtacaaccctaacataaccattcttaatttaactatttatattatcctaactactaccgcattcctactactcaacttaaactccagcaccacgaccctactactatctcgcacctgaaacaagctaacatgactaacacccttaattccatccaccctcctctccctaggaggcctgcccccgctaaccggctttttgcccaaatgggccattatcgaagaattcacaaaaaacaatagcctcatcatccccaccatcatagccaccatcaccctccttaacctctacttctacctacgcctaatctactccacctcaatcacactactccccatatctaacaacgtaaaaataaaatgacagtttgaacatacaaaacccaccccattcctccccacactcatcacccttaccacgctactcctacctatctccccttttatactaataatcttatagaaatttaggttaaatacagaccaagagccttcaaagccctcagtaagttgcaatacttaatttctgtaacagctaaggactgcaaaaccccactctgcatcaactgaacgcaaatcagccactttaattaagctaagcccttactagaccaatgggacttaaacccacaaacacttagttaacagctaagcaccctaatcaactggcttcaatctacttctcccgccgccgggaaaaaaggcgggagaagccccggcaggtttgaagctgcttcttcgaatttgcaattcaatatgaaaatcacctcggagctggtaaaaagaggcctaacccctgtctttagatttacagtccaatgcttcactcagccattttacctcacccccactgatgttcgccgaccgttgactattctctacaaaccacaaagacattggaacactatacctattattcggcgcatgagctggagtcctaggcacagctctaagcctccttattcgagccgagctgggccagccaggcaaccttctaggtaacgaccacatctacaacgttatcgtcacagcccatgcatttgtaataatcttcttcatagtaatacccatcataatcggaggctttggcaactgactagttcccctaataatcggtgcccccgatatggcgtttccccgcataaacaacataagcttctgactcttacctccctctctcctactcctgctcgcatctgctatagtggaggccggagcaggaacaggttgaacagtctaccctcccttagcagggaactactcccaccctggagcctccgtagacctaaccatcttctccttacacctagcaggcgtctcctctatcttaggggccatcaatttcatcacaacaattatcaatataaaaccccctgccataacccaataccaaacgcccctcttcgtctgatccgtcctaatcacagcagtcctacttctcctatctctcccagtcctagctgctggcatcactatactactaacagaccgcaacctcaacaccaccttcttcgaccccgccggaggaggagaccccattctataccaacacctattctgatttttcggtcaccctgaagtttatattcttatcctaccaggcttcggaataatctcccatattgtaacttactactccggaaaaaaagaaccatttggatacataggtatggtctgagctatgatatcaattggcttcctagggtttatcgtgtgagcacaccatatatttacagtaggaatagacgtagacacacgagcatatttcacctccgctaccataatcatcgctatccccaccggcgtcaaagtatttagctgactcgccacactccacggaagcaatatgaaatgatctgctgcagtgctctgagccctaggattcatctttcttttcaccgtaggtggcctgactggcattgtattagcaaactcatcactagacatcgtactacacgacacgtactacgttgtagcccacttccactatgtcctatcaataggagctgtatttgccatcataggaggcttcattcactgatttcccctattctcaggctacaccctagaccaaacctacgccaaaatccatttcactatcatattcatcggcgtaaatctaactttcttcccacaacactttctcggcctatccggaatgccccgacgttactcggactaccccgatgcatacaccacatgaaacatcctatcatctgtaggctcattcatttctctaacagcagtaatattaataattttcatgatttgagaagccttcgcttcgaagcgaaaagtcctaatagtagaagaaccctccataaacctggagtgactatatggatgccccccaccctaccacacattcgaagaacccgtatacataaaatctagacaaaaaaggaaggaatcgaaccccccaaagctggtttcaagccaaccccatggcctccatgactttttcaaaaaggtattagaaaaaccatttcataactttgtcaaagttaaattataggctaaatcctatatatcttaatggcacatgcagcgcaagtaggtctacaagacgctacttcccctatcatagaagagcttatcacctttcatgatcacgccctcataatcattttccttatctgcttcctagtcctgtatgcccttttcctaacactcacaacaaaactaactaatactaacatctcagacgctcaggaaatagaaaccgtctgaactatcctgcccgccatcatcctagtcctcatcgccctcccatccctacgcatcctttacataacagacgaggtcaacgatccctcccttaccatcaaatcaattggccaccaatggtactgaacctacgagtacaccgactacggcggactaatcttcaactcctacatacttcccccattattcctagaaccaggcgacctgcgactccttgacgttgacaatcgagtagtactcccgattgaagcccccattcgtataataattacatcacaagacgtcttgcactcatgagctgtccccacattaggcttaaaaacagatgcaattcccggacgtctaaaccaaaccactttcaccgctacacgaccgggggtatactacggtcaatgctctgaaatctgtggagcaaaccacagtttcatgcccatcgtcctagaattaattcccctaaaaatctttgaaatagggcccgtatttaccctatagcaccccctctaccccctctagagcccactgtaaagctaacttagcattaaccttttaagttaaagattaagagaaccaacacctctttacagtgaaatgccccaactaaatactaccgtatggcccaccataattacccccatactccttacactattcctcatcacccaactaaaaatattaaacacaaactaccacctacctccctcaccaaagcccataaaaataaaaaattataacaaaccctgagaaccaaaatgaacgaaaatctgttcgcttcattcattgcccccacaatcctaggcctacccgccgcagtactgatcattctacttccccctctattgatccccacctccaaatatctcatcaacaaccgactaatcaccacccaacaatgactaatcaaactaacctcaaaacaaatgataaccatacacaacactaaaggacgaacctgatctcttatactagtatccttaatcatttttattgccacaactaacctcctcggactcctgcctcactcatttacaccaaccacccaactatctataaacctagccatggccatccccttatgagcgggcgcagtgattataggctttcgctctaagattaaaaatgccctagcccacttcttaccacaaggcacacctacaccccttatccccatactagttattatcgaaaccatcagcctactcattcaaccaatagccctggccgtacgcctaaccgctaacattactgcaggccacctactcatgcacctaattggaagcgccaccctagcaatatcaaccattaaccttccctctacacttatcatcttcacaattctaattctactgactatcctagaaatcgctgtcgccttaatccaagcctacgttttcacacttctagtaagcctctacctgcacgacaacacataatgacccaccaatcacatgcctatcatatagtaaaacccagcccatgacccctaacaggggccctctcagccctcctaatgacctccggcctagccatgtgatttcacttccactccataacgctcctcatactaggcctactaaccaacacactaaccatataccaatgatggcgcgatgtaacacgagaaagcacataccaaggccaccacacaccacctgtccaaaaaggccttcgatacgggataatcctatttattacctcagaagtttttttcttcgcaggatttttctgagccttttaccactccagcctagcccctaccccccaattaggagggcactggcccccaacaggcatcaccccgctaaatcccctagaagtcccactcctaaacacatccgtattactcgcatcaggagtatcaatcacctgagctcaccatagtctaatagaaaacaaccgaaaccaaataattcaagcactgcttattacaattttactgggtctctattttaccctcctacaagcctcagagtacttcgagtctcccttcaccatttccgacggcatctacggctcaacattttttgtagccacaggcttccacggacttcacgtcattattggctcaactttcctcactatctgcttcatccgccaactaatatttcactttacatccaaacatcactttggcttcgaagccgccgcctgatactggcattttgtagatgtggtttgactatttctgtatgtctccatctattgatgagggtcttactcttttagtataaatagtaccgttaacttccaattaactagttttgacaacattcaaaaaagagtaataaacttcgccttaattttaataatcaacaccctcctagccttactactaataattattacattttgactaccacaactcaacggctacatagaaaaatccaccccttacgagtgcggcttcgaccctatatcccccgcccgcgtccctttctccataaaattcttcttagtagctattaccttcttattatttgatctagaaattgccctccttttacccctaccatgagccctacaaacaactaacctgccactaatagttatgtcatccctcttattaatcatcatcctagccctaagtctggcctatgagtgactacaaaaaggattagactgaaccgaattggtatatagtttaaacaaaacgaatgatttcgactcattaaattatgataatcatatttaccaaatgcccctcatttacataaatattatactagcatttaccatctcacttctaggaatactagtatatcgctcacacctcatatcctccctactatgcctagaaggaataatactatcgctgttcattatagctactctcataaccctcaacacccactccctcttagccaatattgtgcctattgccatactagtctttgccgcctgcgaagcagcggtgggcctagccctactagtctcaatctccaacacatatggcctagactacgtacataacctaaacctactccaatgctaaaactaatcgtcccaacaattatattactaccactgacatgactttccaaaaaacacataatttgaatcaacacaaccacccacagcctaattattagcatcatccctctactattttttaaccaaatcaacaacaacctatttagctgttccccaaccttttcctccgaccccctaacaacccccctcctaatactaactacctgactcctacccctcacaatcatggcaagccaacgccacttatccagtgaaccactatcacgaaaaaaactctacctctctatactaatctccctacaaatctccttaattataacattcacagccacagaactaatcatattttatatcttcttcgaaaccacacttatccccaccttggctatcatcacccgatgaggcaaccagccagaacgcctgaacgcaggcacatacttcctattctacaccctagtaggctcccttcccctactcatcgcactaatttacactcacaacaccctaggctcactaaacattctactactcactctcactgcccaagaactatcaaactcctgagccaacaacttaatatgactagcttacacaatagcttttatagtaaagatacctctttacggactccacttatgactccctaaagcccatgtcgaagcccccatcgctgggtcaatagtacttgccgcagtactcttaaaactaggcggctatggtataatacgcctcacactcattctcaaccccctgacaaaacacatagcctaccccttccttgtactatccctatgaggcataattataacaagctccatctgcctacgacaaacagacctaaaatcgctcattgcatactcttcaatcagccacatagccctcgtagtaacagccattctcatccaaaccccctgaagcttcaccggcgcagtcattctcataatcgcccacgggcttacatcctcattactattctgcctagcaaactcaaactacgaacgcactcacagtcgcatcataatcctctctcaaggacttcaaactctactcccactaatagctttttgatgacttctagcaagcctcgctaacctcgccttaccccccactattaacctactgggagaactctctgtgctagtaaccacgttctcctgatcaaatatcactctcctacttacaggactcaacatactagtcacagccctatactccctctacatatttaccacaacacaatggggctcactcacccaccacattaacaacataaaaccctcattcacacgagaaaacaccctcatgttcatacacctatcccccattctcctcctatccctcaaccccgacatcattaccgggttttcctcttgtaaatatagtttaaccaaaacatcagattgtgaatctgacaacagaggcttacgaccccttatttaccgagaaagctcacaagaactgctaactcatgcccccatgtctaacaacatggctttctcaacttttaaaggataacagctatccattggtcttaggccccaaaaattttggtgcaactccaaataaaagtaataaccatgcacactactataaccaccctaaccctgacttccctaattccccccatccttaccaccctcgttaaccctaacaaaaaaaactcatacccccattatgtaaaatccattgtcgcatccacctttattatcagtctcttccccacaacaatattcatgtgcctagaccaagaagttattatctcgaactgacactgagccacaacccaaacaacccagctctccctaagcttcaaactagactacttctccataatattcatccctgtagcattgttcgttacatggtccatcatagaattctcactgtgatatataaactcagacccaaacattaatcagttcttcaaatatctactcatcttcctaattaccatactaatcttagttaccgctaacaacctattccaactgttcatcggctgagagggcgtaggaattatatccttcttgctcatcagttgatgatacgcccgagcagatgccaacacagcagccattcaagcaatcctatacaaccgtatcggcgatatcggtttcatcctcgccttagcatgatttatcctacactccaactcatgagacccacaacaaatagcccttctaaacgctaatccaagcctcaccccactactaggcctcctcctagcagcagcaggcaaatcagcccaattaggtctccacccctgactcccctcagccatagaaggccccaccccagtctcagccctactccactcaagcactatagttgtagcaggaatcttcttactcatccgcttccaccccctagcagaaaatagcccactaatccaaactctaacactatgcttaggcgctatcaccactctgttcgcagcagtctgcgcccttacacaaaatgacatcaaaaaaatcgtagccttctccacttcaagtcaactaggactcataatagttacaatcggcatcaaccaaccacacctagcattcctgcacatctgtacccacgccttcttcaaagccatactatttatgtgctccgggtccatcatccacaaccttaacaatgaacaagatattcgaaaaataggaggactactcaaaaccatacctctcacttcaacctccctcaccattggcagcctagcattagcaggaatacctttcctcacaggtttctactccaaagaccacatcatcgaaaccgcaaacatatcatacacaaacgcctgagccctatctattactctcatcgctacctccctgacaagcgcctatagcactcgaataattcttctcaccctaacaggtcaacctcgcttccccacccttactaacattaacgaaaataaccccaccctactaaaccccattaaacgcctggcagccggaagcctattcgcaggatttctcattactaacaacatttcccccgcatcccccttccaaacaacaatccccctctacctaaaactcacagccctcgctgtcactttcctaggacttctaacagccctagacctcaactacctaaccaacaaacttaaaataaaatccccactatgcacattttatttctccaacatactcggattctaccctagcatcacacaccgcacaatcccctatctaggccttcttacgagccaaaacctgcccctactcctcctagacctaacctgactagaaaagctattacctaaaacaatttcacagcaccaaatctccacctccatcatcacctcaacccaaaaaggcataattaaactttacttcctctctttcttcttcccactcatcctaaccctactcctaatcacataacctattcccccgagcaatctcaattacaatatatacaccaacaaacaatgttcaaccagtaactactactaatcaacgcccataatcatacaaagcccccgcaccaataggatcctcccgaatcaaccctgacccctctccttcataaattattcagcttcctacactattaaagtttaccacaaccaccaccccatcatactctttcacccacagcaccaatcctacctccatcgctaaccccactaaaacactcaccaagacctcaacccctgacccccatgcctcaggatactcctcaatagccatcgctgtagtatatccaaagacaaccatcattccccctaaataaattaaaaaaactattaaacccatataacctcccccaaaattcagaataataacacacccgaccacaccgctaacaatcaatactaaacccccataaataggagaaggcttagaagaaaaccccacaaaccccattactaaacccacactcaacagaaacaaagcatacatcattattctcgcacggactacaaccacgaccaatgatatgaaaaaccatcgttgtatttcaactacaagaacaccaatgaccccaatacgcaaaactaaccccctaataaaattaattaaccactcattcatcgacctccccaccccatccaacatctccgcatgatgaaacttcggctcactccttggcgcctgcctgatcctccaaatcaccacaggactattcctagccatgcactactcaccagacgcctcaaccgccttttcatcaatcgcccacatcactcgagacgtaaattatggctgaatcatccgctaccttcacgccaatggcgcctcaatattctttatctgcctcttcctacacatcgggcgaggcctatattacggatcatttctctactcagaaacctgaaacatcggcattatcctcctgcttgcaactatagcaacagccttcataggctatgtcctcccgtgaggccaaatatcattctgaggggccacagtaattacaaacttactatccgccatcccatacattgggacagacctagttcaatgaatctgaggaggctactcagtagacagtcccaccctcacacgattctttacctttcacttcatcttgcccttcattattgcagccctagcagcactccacctcctattcttgcacgaaacgggatcaaacaaccccctaggaatcacctcccattccgataaaatcaccttccacccttactacacaatcaaagacgccctcggcttacttctcttccttctctccttaatgacattaacactattctcaccagacctcctaggcgacccagacaattataccctagccaaccccttaaacacccctccccacatcaagcccgaatgatatttcctattcgcctacacaattctccgatccgtccctaacaaactaggaggcgtccttgccctattactatccatcctcatcctagcaataatccccatcctccatatatccaaacaacaaagcataatatttcgcccactaagccaatcactttattgactcctagccgcagacctcctcattctaacctgaatcggaggacaaccagtaagctacccttttaccatcattggacaagtagcatccgtactatacttcacaacaatcctaatcctaataccaactatctccctaattgaaaacaaaatactcaaatgggcctgtccttgtagtataaactaatacaccagtcttgtaaaccggagatgaaaacctttttccaaggacaaatcagagaaaaagtctttaactccaccattagcacccaaagctaagattctaatttaaactattctctgttctttcatggggaagcagatttgggtaccacccaagtattgactcacccatcaacaaccgctatgtatttcgtacattactgccagccaccatgaatattgtacggtaccataaatacttgaccacctgtagtacatgaaaacccaatccacatcaaaaccccctccccatgcttacaagcaagcacagcaatcaaccctcaactatcacacatcaactgcaactccaaagccacccctcacccactaggataccaacaaacctacccacccttaacagtacatagtacataaagccatttaccgtacatagcacattacagtcaaatcccttctcgtccccatggatgacccccctcagataggggtcccttgaccaccatcctccgtgaaatcaatatcccgcacaagagtgctactctcctcgctccgggcccataacacttgggggtagctaaagtgaactgtatccgacatctggttcctacttcagggccataaagcctaaatagcccacacgttccccttaaataagacatcacgatg

SEQ ID NO: 324 - DNA, 16570 bp, Homo sapiens mitochondrial
  3108: "n" refers to a nucleotide at position 3107 of the Cambridge Reference Sequence (CRS, Anderson et al. 1981 Nature 290:457-465), later determined to be absent from the human mtDNA sequence according to the revised CRS (rCRS, Andrews et al. 1999 Nature Genetics 23:147); "n" therefore represents a single nucleotide deletion at a position corresponding to nucleotide 3107 of SEQ ID NO:1 as provided herein.
gatcacaggtctatcaccctattaaccactcacgggagctctccatgcatttggtattttcgtctggggggtatgcacgcgatagcattgcgagacgctggagccggagcaccctatgtcgcagtatctgtctttgattcctgcctcatcctattatttatcgcacctacgttcaatattacaggcgaacatacttactaaagtgtgttaattaattaatgcttgtaggacataataataacaattgaatgtctgcacagccgctttccacacagacatcataacaaaaaatttccaccaaaccccccctcccccgccttctggccacagcacttaaacacatctctgccaaaccccaaaaacaaagaaccctaacaccagcctaaccagatttcaaattttatcttttggcggtatgcacttttaacagtcaccccccaactaacacattattttcccctcccactcccatactactaatctcatcaatacaacccccgcccatcctacccagcacacacacaccgctgctaaccccataccccgaaccaaccaaaccccaaagacaccccccacagtttatgtagcttacctcctcaaagcaatacactgaaaatgtttagacgggctcacatcaccccataaacaaataggtttggtcctagcctttctattagctcttagtaagattacacatgcaagcatccccgttccagtgagttcaccctctaaatcaccacgatcaaaagggacaagcatcaagcacgcagcaatgcagctcaaaacgcttagcctagccacacccccacgggaaacagcagtgattaacctttagcaataaacgaaagtttaactaagctatactaaccccagggttggtcaatttcgtgccagccaccgcggtcacacgattaacccaagtcaatagaagccggcgtaaagagtgttttagatcaccccctccccaataaagctaaaactcacctgagttgtaaaaaactccagttgacacaaaatagactacgaaagtggctttaacatatctgaacacacaatagctaagacccaaactgggattagataccccactatgcttagccctaaacctcaacagttaaatcaacaaaactgctcgccagaacactacgagccacagcttaaaactcaaaggacctggcggtgcttcatatccctctagaggagcctgttctgtaatcgataaaccccgatcaacctcaccacctcttgctcagcctatataccgccatcttcagcaaaccctgatgaaggctacaaagtaagcgcaagtacccacgtaaagacgttaggtcaaggtgtagcccatgaggtggcaagaaatgggctacattttctaccccagaaaactacgatagcccttatgaaacttaagggtcgaaggtggatttagcagtaaactgagagtagagtgcttagttgaacagggccctgaagcgcgtacacaccgcccgtcaccctcctcaagtatacttcaaaggacatttaactaaaacccctacgcatttatatagaggagacaagtcgtaacatggtaagtgtactggaaagtgcacttggacgaaccagagtgtagcttaacacaaagcacccaacttacacttaggagatttcaacttaacttgaccgctctgagctaaacctagccccaaacccactccaccttactaccagacaaccttagccaaaccatttacccaaataaagtataggcgatagaaattgaaacctggcgcaatagatatagtaccgcaagggaaagatgaaaaattataaccaagcataatatagcaaggactaacccctataccttctgcataatgaattaactagaaataactttgcaaggagagccaaagctaagacccccgaaaccagacgagctacctaagaacagctaaaagagcacacccgtctatgtagcaaaatagtgggaagatttataggtagaggcgacaaacctaccgagcctggtgatagctggttgtccaagatagaatcttagttcaactttaaatttgcccacagaaccctctaaatccccttgtaaatttaactgttagtccaaagaggaacagctctttggacactaggaaaaaaccttgtagagagagtaaaaaatttaacacccatagtaggcctaaaagcagccaccaattaagaaagcgttcaagctcaacacccactacctaaaaaatcccaaacatataactgaactcctcacacccaattggaccaatctatcaccctatagaagaactaatgttagtataagtaacatgaaaacattctcccccgcataagcctgcgtcagattaaaacactgaactgacaattaacagcccaatatctacaatcaaccaacaagtcattattaccctcactgtcaacccaacacaggcatgctcataaggaaaggttaaaaaaagtaaaaggaactcggcaaatcttaccccgcctgtttaccaaaaacatcacctctagcatcaccagtattagaggcaccgcctgcccagtgacacatgtttaacggccgcggtaccctaaccgtgcaaaggtagcataatcacttgttccttaaatagggacctgtatgaatggctccacgagggttcagctgtctcttacttttaaccagtgaaattgacctgcccgtgaagaggcgggcataacacagcaagacgagaagaccctatggagctttaatttattaatgcaaacagtacctaacaaacccacaggtcctaaactaccaaacctgcattaaaaatttcggttggggcgacctcggagcagaacccaacctccgagcagtacatgctaagacttcaccagtcaaagcgaactactatactcaattgatccaataacttgaccaacggaacaagttaccctagggataacagcgcaatcctattctagagtccatatcaacaatagggtttacgacctcgatgttggatcaggacatcccaatggtgcagccgctattaaaggttcgtttgttcaacgattaaagtcctacgtgatctgagttcagaccggagtaatccaggtcggtttctatctacnttcaaattcctccctgtacgaaaggacaagagaaataaggcctacttcacaaagcgccttcccccgtaaatgatatcatctcaacttagtattatacccacacccacccaagaacagggtttgttaagatggcagagcccggtaatcgcataaaacttaaaactttacagtcagaggttcaattcctcttcttaacaacatacccatggccaacctcctactcctcattgtacccattctaatcgcaatggcattcctaatgcttaccgaacgaaaaattctaggctatatacaactacgcaaaggccccaacgttgtaggcccctacgggctactacaacccttcgctgacgccataaaactcttcaccaaagagcccctaaaacccgccacatctaccatcaccctctacatcaccgccccgaccttagctctcaccatcgctcttctactatgaacccccctccccatacccaaccccctggtcaacctcaacctaggcctcctatttattctagccacctctagcctagccgtttactcaatcctctgatcagggtgagcatcaaactcaaactacgccctgatcggcgcactgcgagcagtagcccaaacaatctcatatgaagtcaccctagccatcattctactatcaacattactaataagtggctcctttaacctctccacccttatcacaacacaagaacacctctgattactcctgccatcatgacccttggccataatatgatttatctccacactagcagagaccaaccgaacccccttcgaccttgccgaaggggagtccgaactagtctcaggcttcaacatcgaatacgccgcaggccccttcgccctattcttcatagccgaatacacaaacattattataataaacaccctcaccactacaatcttcctaggaacaacatatgacgcactctcccctgaactctacacaacatattttgtcaccaagaccctacttctaacctccctgttcttatgaattcgaacagcatacccccgattccgctacgaccaactcatacacctcctatgaaaaaacttcctaccactcaccctagcattacttatatgatatgtctccatacccattacaatctccagcattccccctcaaacctaagaaatatgtctgataaaagagttactttgatagagtaaataataggagcttaaacccccttatttctaggactatgagaatcgaacccatccctgagaatccaaaattctccgtgccacctatcacaccccatcctaaagtaaggtcagctaaataagctatcgggcccataccccgaaaatgttggttatacccttcccgtactaattaatcccctggcccaacccgtcatctactctaccatctttgcaggcacactcatcacagcgctaagctcgcactgattttttacctgagtaggcctagaaataaacatgctagcttttattccagttctaaccaaaaaaataaaccctcgttccacagaagctgccatcaagtatttcctcacgcaagcaaccgcatccataatccttctaatagctatcctcttcaacaatatactctccggacaatgaaccataaccaatactaccaatcaatactcatcattaataatcataatggctatagcaataaaactaggaatagccccctttcacttctgagtcccagaggttacccaaggcacccctctgacatccggcctgcttcttctcacatgacaaaaactagcccccatctcaatcatataccaaatctctccctcactaaacgtaagccttctcctcactctctcaatcttatccatcatagcaggcagttgaggtggattaaaccaaacccagctacgcaaaatcttagcatactcctcaattacccacataggatgaataatagcagttctaccgtacaaccctaacataaccattcttaatttaactatttatattatcctaactactaccgcattcctactactcaacttaaactccagcaccacgaccctactactatctcgcacctgaaacaagctaacatgactaacacccttaattccatccaccctcctctccctaggaggcctgcccccgctaaccggctttttgcccaaatgggccattatcgaagaattcacaaaaaacaatagcctcatcatccccaccatcatagccaccatcaccctccttaacctctacttctacctacgcctaatctactccacctcaatcacactactccccatatctaacaacgtaaaaataaaatgacagtttgaacatacaaaacccaccccattcctccccacactcatcgcccttaccacgctactcctacctatctccccttttatactaataatcttatagaaatttaggttaaatacagaccaagagccttcaaagccctcagtaagttgcaatacttaatttctgtaacagctaaggactgcaaaaccccactctgcatcaactgaacgcaaatcagccactttaattaagctaagcccttactagaccaatgggacttaaacccacaaacacttagttaacagctaagcaccctaatcaactggcttcaatctacttctcccgccgccgggaaaaaaggcgggagaagccccggcaggtttgaagctgcttcttcgaatttgcaattcaatatgaaaatcacctcggagctggtaaaaagaggcctaacccctgtctttagatttacagtccaatgcttcactcagccattttacctcacccccactgatgttcgccgaccgttgactattctctacaaaccacaaagacattggaacactatacctattattcggcgcatgagctggagtcctaggcacagctctaagcctccttattcgagccgagctgggccagccaggcaaccttctaggtaacgaccacatctacaacgttatcgtcacagcccatgcatttgtaataatcttcttcatagtaatacccatcataatcggaggctttggcaactgactagttcccctaataatcggtgcccccgatatggcgtttccccgcataaacaacataagcttctgactcttacctccctctctcctactcctgctcgcatctgctatagtggaggccggagcaggaacaggttgaacagtctaccctcccttagcagggaactactcccaccctggagcctccgtagacctaaccatcttctccttacacctagcaggtgtctcctctatcttaggggccatcaatttcatcacaacaattatcaatataaaaccccctgccataacccaataccaaacgcccctcttcgtctgatccgtcctaatcacagcagtcctacttctcctatctctcccagtcctagctgctggcatcactatactactaacagaccgcaacctcaacaccaccttcttcgaccccgccggaggaggagaccccattctataccaacacctattctgatttttcggtcaccctgaagtttatattcttatcctaccaggcttcggaataatctcccatattgtaacttactactccggaaaaaaagaaccatttggatacataggtatggtctgagctatgatatcaattggcttcctagggtttatcgtgtgagcacaccatatatttacagtaggaatagacgtagacacacgagcatatttcacctccgctaccataatcatcgctatccccaccggcgtcaaagtatttagctgactcgccacactccacggaagcaatatgaaatgatctgctgcagtgctctgagccctaggattcatctttcttttcaccgtaggtggcctgactggcattgtattagcaaactcatcactagacatcgtactacacgacacgtactacgttgtagcccacttccactatgtcctatcaataggagctgtatttgccatcataggaggcttcattcactgatttcccctattctcaggctacaccctagaccaaacctacgccaaaatccatttcactatcatattcatcggcgtaaatctaactttcttcccacaacactttctcggcctatccggaatgccccgacgttactcggactaccccgatgcatacaccacatgaaacatcctatcatctgtaggctcattcatttctctaacagcagtaatattaataattttcatgatttgagaagccttcgcttcgaagcgaaaagtcctaatagtagaagaaccctccataaacctggagtgactatatggatgccccccaccctaccacacattcgaagaacccgtatacataaaatctagacaaaaaaggaaggaatcgaaccccccaaagctggtttcaagccaaccccatggcctccatgactttttcaaaaaggtattagaaaaaccatttcataactttgtcaaagttaaattataggctaaatcctatatatcttaatggcacatgcagcgcaagtaggtctacaagacgctacttcccctatcatagaagagcttatcacctttcatgatcacgccctcataatcattttccttatctgcttcctagtcctgtatgcccttttcctaacactcacaacaaaactaactaatactaacatctcagacgctcaggaaatagaaaccgtctgaactatcctgcccgccatcatcctagtcctcatcgccctcccatccctacgcatcctttacataacagacgaggtcaacgatccctcccttaccatcaaatcaattggccaccaatggtactgaacctacgagtacaccgactacggcggactaatcttcaactcctacatacttcccccattattcctagaaccaggcgacctgcgactccttgacgttgacaatcgagtagtactcccgattgaagcccccattcgtataataattacatcacaagacgtcttgcactcatgagctgtccccacattaggcttaaaaacagatgcaattcccggacgtctaaaccaaaccactttcaccgctacacgaccgggggtatactacggtcaatgctctgaaatctgtggagcaaaccacagtttcatgcccatcgtcctagaattaattcccctaaaaatctttgaaatagggcccgtatttaccctatagcaccccctctaccccctctagagcccactgtaaagctaacttagcattaaccttttaagttaaagattaagagaaccaacacctctttacagtgaaatgccccaactaaatactaccgtatggcccaccataattacccccatactccttacactattcctcatcacccaactaaaaatattaaacacaaactaccacctacctccctcaccaaagcccataaaaataaaaaattataacaaaccctgagaaccaaaatgaacgaaaatctgttcgcttcattcattgcccccacaatcctaggcctacccgccgcagtactgatcattctatttccccctctattgatccccacctccaaatatctcatcaacaaccgactaatcaccacccaacaatgactaatcaaactaacctcaaaacaaatgataaccatacacaacactaaaggacgaacctgatctcttatactagtatccttaatcatttttattgccacaactaacctcctcggactcctgcctcactcatttacaccaaccacccaactatctataaacctagccatggccatccccttatgagcgggcgcagtgattataggctttcgctctaagattaaaaatgccctagcccacttcttaccacaaggcacacctacaccccttatccccatactagttattatcgaaaccatcagcctactcattcaaccaatagccctggccgtacgcctaaccgctaacattactgcaggccacctactcatgcacctaattggaagcgccaccctagcaatatcaaccattaaccttccctctacacttatcatcttcacaattctaattctactgactatcctagaaatcgctgtcgccttaatccaagcctacgttttcacacttctagtaagcctctacctgcacgacaacacataatgacccaccaatcacatgcctatcatatagtaaaacccagcccatgacccctaacaggggccctctcagccctcctaatgacctccggcctagccatgtgatttcacttccactccataacgctcctcatactaggcctactaaccaacacactaaccatataccaatgatggcgcgatgtaacacgagaaagcacataccaaggccaccacacaccacctgtccaaaaaggccttcgatacgggataatcctatttattacctcagaagtttttttcttcgcaggatttttctgagccttttaccactccagcctagcccctaccccccaattaggagggcactggcccccaacaggcatcaccccgctaaatcccctagaagtcccactcctaaacacatccgtattactcgcatcaggagtatcaatcacctgagctcaccatagtctaatagaaaacaaccgaaaccaaataattcaagcactgcttattacaattttactgggtctctattttaccctcctacaagcctcagagtacttcgagtctcccttcaccatttccgacggcatctacggctcaacattttttgtagccacaggcttccacggacttcacgtcattattggctcaactttcctcactatctgcttcatccgccaactaatatttcactttacatccaaacatcactttggcttcgaagccgccgcctgatactggcattttgtagatgtggtttgactatttctgtatgtctccatctattgatgagggtcttactcttttagtataaatagtaccgttaacttccaattaactagttttgacaacattcaaaaaagagtaataaacttcgccttaattttaataatcaacaccctcctagccttactactaataattattacattttgactaccacaactcaacggctacatagaaaaatccaccccttacgagtgcggcttcgaccctatatcccccgcccgcgtccctttctccataaaattcttcttagtagctattaccttcttattatttgatctagaaattgccctccttttacccctaccatgagccctacaaacaactaacctgccactaatagttatgtcatccctcttattaatcatcatcctagccctaagtctggcctatgagtgactacaaaaaggattagactgaaccgaattggtatatagtttaaacaaaacgaatgatttcgactcattaaattatgataatcatatttaccaaatgcccctcatttacataaatattatactagcatttaccatctcacttctaggaatactagtatatcgctcacacctcatatcctccctactatgcctagaaggaataatactatcgctgttcattatagctactctcataaccctcaacacccactccctcttagccaatattgtgcctattgccatactagtctttgccgcctgcgaagcagcggtgggcctagccctactagtctcaatctccaacacatatggcctagactacgtacataacctaaacctactccaatgctaaaactaatcgtcccaacaattatattactaccactgacatgactttccaaaaaacacataatttgaatcaacacaaccacccacagcctaattattagcatcatccctctactattttttaaccaaatcaacaacaacctatttagctgttccccaaccttttcctccgaccccctaacaacccccctcctaatactaactacctgactcctacccctcacaatcatggcaagccaacgccacttatccagtgaaccactatcacgaaaaaaactctacctctctatactaatctccctacaaatctccttaattataacattcacagccacagaactaatcatattttatatcttcttcgaaaccacacttatccccaccttggctatcatcacccgatgaggcaaccagccagaacgcctgaacgcaggcacatacttcctattctacaccctagtaggctcccttcccctactcatcgcactaatttacactcacaacaccctaggctcactaaacattctactactcactctcactgcccaagaactatcaaactcctgagccaacaacttaatatgactagcttacacaatagcttttatagtaaagatacctctttacggactccacttatgactccctaaagcccatgtcgaagcccccatcgctgggtcaatagtacttgccgcagtactcttaaaactaggcggctatggtataatacgcctcacactcattctcaaccccctgacaaaacacatagcctaccccttccttgtactatccctatgaggcataattataacaagctccatctgcctacgacaaacagacctaaaatcgctcattgcatactcttcaatcagccacatagccctcgtagtaacagccattctcatccaaaccccctgaagcttcaccggcgcagtcattctcataatcgcccacgggcttacatcctcattactattctgcctagcaaactcaaactacgaacgcactcacagtcgcatcataatcctctctcaaggacttcaaactctactcccactaatagctttttgatgacttctagcaagcctcgctaacctcgccttaccccccactattaacctactgggagaactctctgtgctagtaaccacgttctcctgatcaaatatcactctcctacttacaggactcaacatactagtcacagccctatactccctctacatatttaccacaacacaatggggctcactcacccaccacattaacaacataaaaccctcattcacacgagaaaacaccctcatgttcatacacctatcccccattctcctcctatccctcaaccccgacatcattaccgggttttcctcttgtaaatatagtttaaccaaaacatcagattgtgaatctgacaacagaggcttacgaccccttatttaccgagaaagctcacaagaactgctaactcatgcccccatgtctaacaacatggctttctcaacttttaaaggataacagctatccattggtcttaggccccaaaaattttggtgcaactccaaataaaagtaataaccatgcacactactataaccaccctaaccctgacttccctaattccccccatccttaccaccctcgttaaccctaacaaaaaaaactcatacccccattatgtaaaatccattgtcgcatccacctttattatcagtctcttccccacaacaatattcatgtgcctagaccaagaagttattatctcgaactgacactgagccacaacccaaacaacccagctctccctaagcttcaaactagactacttctccataatattcatccctgtagcattgttcgttacatggtccatcatagaattctcactgtgatatataaactcagacccaaacattaatcagttcttcaaatatctactcatcttcctaattaccatactaatcttagttaccgctaacaacctattccaactgttcatcggctgagagggcgtaggaattatatccttcttgctcatcagttgatgatacgcccgagcagatgccaacacagcagccattcaagcaatcctatacaaccgtatcggcgatatcggtttcatcctcgccttagcatgatttatcctacactccaactcatgagacccacaacaaatagcccttctaaacgctaatccaagcctcaccccactactaggcctcctcctagcagcagcaggcaaatcagcccaattaggtctccacccctgactcccctcagccatagaaggccccaccccagtctcagccctactccactcaagcactatagttgtagcaggaatcttcttactcatccgcttccaccccctagcagaaaatagcccactaatccaaactctaacactatgcttaggcgctatcaccactctgttcgcagcagtctgcgcccttacacaaaatgacatcaaaaaaatcgtagccttctccacttcaagtcaactaggactcataatagttacaatcggcatcaaccaaccacacctagcattcctgcacatctgtacccacgccttcttcaaagccatactatttatgtgctccgggtccatcatccacaaccttaacaatgaacaagatattcgaaaaataggaggactactcaaaaccatacctctcacttcaacctccctcaccattggcagcctagcattagcaggaatacctttcctcacaggtttctactccaaagaccacatcatcgaaaccgcaaacatatcatacacaaacgcctgagccctatctattactctcatcgctacctccctgacaagcgcctatagcactcgaataattcttctcaccctaacaggtcaacctcgcttccccacccttactaacattaacgaaaataaccccaccctactaaaccccattaaacgcctggcagccggaagcctattcgcaggatttctcattactaacaacatttcccccgcatcccccttccaaacaacaatccccctctacctaaaactcacagccctcgctgtcactttcctaggacttctaacagccctagacctcaactacctaaccaacaaacttaaaataaaatccccactatgcacattttatttctccaacatactcggattctaccctagcatcacacaccgcacaatcccctatctaggccttcttacgagccaaaacctgcccctactcctcctagacctaacctgactagaaaagctattacctaaaacaatttcacagcaccaaatctccacctccatcatcacctcaacccaaaaaggcataattaaactttacttcctctctttcttcttcccactcatcctaaccctactcctaatcacataacctattcccccgagcaatctcaattacaatatatacaccaacaaacaatgttcaaccagtaactactactaatcaacgcccataatcatacaaagcccccgcaccaataggatcctcccgaatcaaccctgacccctctccttcataaattattcagcttcctacactattaaagtttaccacaaccaccaccccatcatactctttcacccacagcaccaatcctacctccatcgctaaccccactaaaacactcaccaagacctcaacccctgacccccatgcctcaggatactcctcaatagccatcgctgtagtatatccaaagacaaccatcattccccctaaataaattaaaaaaactattaaacccatataacctcccccaaaattcagaataataacacacccgaccacaccgctaacaatcaatactaaacccccataaataggagaaggcttagaagaaaaccccacaaaccccattactaaacccacactcaacagaaacaaagcatacatcattattctcgcacggactacaaccacgaccaatgatatgaaaaaccatcgttgtatttcaactacaagaacaccaatgaccccaatacgcaaaactaaccccctaataaaattaattaaccactcattcatcgacctccccaccccatccaacatctccgcatgatgaaacttcggctcactccttggcgcctgcctgatcctccaaatcaccacaggactattcctagccatgcactactcaccagacgcctcaaccgccttttcatcaatcgcccacatcactcgagacgtaaattatggctgaatcatccgctaccttcacgccaatggcgcctcaatattctttatctgcctcttcctacacatcgggcgaggcctatattacggatcatttctctactcagaaacctgaaacatcggcattatcctcctgcttgcaactatagcaacagccttcataggctatgtcctcccgtgaggccaaatatcattctgaggggccacagtaattacaaacttactatccgccatcccatacattgggacagacctagttcaatgaatctgaggaggctactcagtagacagtcccaccctcacacgattctttacctttcacttcatcttgcccttcattattgcagccctagcagcactccacctcctattcttgcacgaaacgggatcaaacaaccccctaggaatcacctcccattccgataaaatcaccttccacccttactacacaatcaaagacgccctcggcttacttctcttccttctctccttaatgacattaacactattctcaccagacctcctaggcgacccagacaattataccctagccaaccccttaaacacccctccccacatcaagcccgaatgatatttcctattcgcctacacaattctccgatccgtccctaacaaactaggaggcgtccttgccctattactatccatcctcatcctagcaataatccccatcctccatatatccaaacaacaaagcataatatttcgcccactaagccaatcactttattgactcctagccgcagacctcctcattctaacctgaatcggaggacaaccagtaagctacccttttaccatcattggacaagtagcatccgtactatacttcacaacaatcctaatcctaataccaactatctccctaattgaaaacaaaatactcaaatgggcctgtccttgtagtataaactaatacaccagtcttgtaaaccggagatgaaaacctttttccaaggacaaatcagagaaaaagtctttaactccaccattagcacccaaagctaagattctaatttaaactattctctgttctttcatggggaagcagatttgggtaccacccaagtattgactcacccatcaacaaccgctatgtatttcgtacattactgccagccaccatgaatattgtacggtaccataaatacttgaccacctgtagtacataaaaacccaatccacatcaaaaccccctccccatgcttacaagcaagtacagcaatcaaccctcaactatcacacattaactgcaactccaaagccacccctcacccactaggataccaacaaacctacccacccttaacagtacatagtacataaagccatttaccgtacatagcacattacagtcaaatcccttctcgtccccatggatgacccccctcagataggggtcccttgaccaccatcctccgtgaaatcaatatcccgcacaagagtgctactctcctcgctccgggcccataacacttgggggtagctaaagtgaactgtatccgacatctggttcctacttcagggccataaagcctaaatagcccacacgttccccttaaataagacatcacgatg

SEQ ID NO: 325 - DNA, 16570 bp, Homo sapiens mitochondrial
  3108: "n" refers to a nucleotide at position 3107 of the Cambridge Reference Sequence (CRS, Anderson et al. 1981 Nature 290:457-465), later determined to be absent from the human mtDNA sequence according to the revised CRS (rCRS, Andrews et al. 1999 Nature Genetics 23:147); "n" therefore represents a single nucleotide deletion at a position corresponding to nucleotide 3107 of SEQ ID NO:1 as provided herein.
gatcacaggtctatcaccctattaaccactcacgggagctctccatgcatttggtattttcgtctggggggtatgcacgcgatagcattgcgagacgctggagccggagcaccctatgtcgcagtatctgtctttgattcctgcctcatcctattatttatcgcacctacgttcaatattacaggcgaacatacttactaaagtgtgttaattaattaatgcttgtaggacataataataacaattgaatgtctgcacagccgctttccacacagacatcataacaaaaaatttccaccaaaccccccctcccccgccttctggccacagcacttaaacacatctctgccaaaccccaaaaacaaagaaccctaacaccagcctaaccagatttcaaattttatcttttggcggtatgcacttttaacagtcaccccccaactaacacattattttcccctcccactcccatactactaatctcatcaatacaacccccgcccatcctacccagcacacacacaccgctgctaaccccataccccgaaccaaccaaaccccaaagacaccccccacagtttatgtagcttacctcctcaaagcaatacactgaaaatgtttagacgggctcacatcaccccataaacaaataggtttggtcctagcctttctattagctcttagtaagattacacatgcaagcatccccgttccagtgagttcaccctctaaatcaccacgatcaaaagggacaagcatcaagcacgcagcaatgcagctcaaaacgcttagcctagccacacccccacgggaaacagcagtgattaacctttagcaataaacgaaagtttaactaagctatactaaccccagggttggtcaatttcgtgccagccaccgcggtcacacgattaacccaagtcaatagaagccggcgtaaagagtgttttagatcaccccctccccaataaagctaaaactcacctgagttgtaaaaaactccagttgacacaaaatagactacgaaagtggctttaacatatctgaacacacaatagctaagacccaaactgggattagataccccactatgcttagccctaaacctcaacagttaaatcaacaaaactgctcgccagaacactacgagccacagcttaaaactcaaaggacctggcggtgcttcatatccctctagaggagcctgttctgtaatcgataaaccccgatcaacctcaccacctcttgctcagcctatataccgccatcttcagcaaaccctgatgaaggctacaaagtaagcgcaagtacccacgtaaagacgttaggtcaaggtgtagcccatgaggtggcaagaaatgggctacattttctaccccagaaaactacgatagcccttatgaaacttaagggtcgaaggtggatttagcagtaaactgagagtagagtgcttagttgaacagggccctgaagcgcgtacacaccgcccgtcaccctcctcaagtatacttcaaaggacatttaactaaaacccctacgcatttatatagaggagacaagtcgtaacatggtaagtgtactggaaagtgcacttggacgaaccagagtgtagcttaacacaaagcacccaacttacacttaggagatttcaacttaacttgaccgctctgagctaaacctagccccaaacccactccaccttactaccagacaaccttagccaaaccatttacccaaataaagtataggcgatagaaattgaaacctggcgcaatagatatagtaccgcaagggaaagatgaaaaattataaccaagcataatatagcaaggactaacccctataccttctgcataatgaattaactagaaataactttgcaaggagagccaaagctaagacccccgaaaccagacgagctacctaagaacagctaaaagagcacacccgtctatgtagcaaaatagtgggaagatttataggtagaggcgacaaacctaccgagcctggtgatagctggttgtccaagatagaatcttagttcaactttaaatttgcccacagaaccctctaaatccccttgtaaatttaactgttagtccaaagaggaacagctctttggacactaggaaaaaaccttgtagagagagtaaaaaatttaacacccatagtaggcctaaaagcagccaccaattaagaaagcgttcaagctcaacacccactacctaaaaaatcccaaacatataactgaactcctcacacccaattggaccaatctatcaccctatagaagaactaatgttagtataagtaacatgaaaacattctcctccgcataagcctgcgtcagattaaaacactgaactgacaattaacagcccaatatctacaatcaaccaacaagtcattattaccctcactgtcaacccaacacaggcatgctcataaggaaaggttaaaaaaagtaaaaggaactcggcaaatcttaccccgcctgtttaccaaaaacatcacctctagcatcaccagtattagaggcaccgcctgcccagtgacacatgtttaacggccgcggtaccctaaccgtgcaaaggtagcataatcacttgttccttaaatagggacctgtatgaatggctccacgagggttcagctgtctcttacttttaaccagtgaaattgacctgcccgtgaagaggcgggcataacacagcaagacgagaagaccctatggagctttaatttattaatgcaaacagtacctaacaaacccacaggtcctaaactaccaaacctgcattaaaaatttcggttggggcgacctcggagcagaacccaacctccgagcagtacatgctaagacttcaccagtcaaagcgaactactatactcaattgatccaataacttgaccaacggaacaagttaccctagggataacagcgcaatcctattctagagtccatatcaacaatagggtttacgacctcgatgttggatcaggacatcccgatggtgcagccgctattaaaggttcgtttgttcaacgattaaagtcctacgtgatctgagttcagaccggagtaatccaggtcggtttctatctacnttcaaattcctccctgtacgaaaggacaagagaaataaggcctacttcacaaagcgccttcccccgtaaatgatatcatctcaacttagtattatacccacacccacccaagaacagggtttgttaagatggcagagcccggtaatcgcataaaacttaaaactttacagtcagaggttcaattcctcttcttaacaacatacccatggccaacctcctactcctcattgtacccattctaatcgcaatggcattcctaatgcttaccgaacgaaaaattctaggctatatacaactacgcaaaggccccaacgttgtaggcccctacgggctactacaacccttcgctgacgccataaaactcttcaccaaagagcccctaaaacccgccacatctaccatcaccctctacatcaccgccccgaccttagctctcaccatcgctcttctactatgaacccccctccccatacccaaccccctggtcaacctcaacctaggcctcctatttattctagccacctctagcctagccgtttactcaatcctctgatcagggtgagcatcaaactcaaactacgccctgatcggcgcactgcgagcagtagcccaaacaatctcatatgaagtcaccctagccatcattctactatcaacattactaataagtggctcctttaacctctccacccttatcacaacacaagaacacctctgattactcctgccatcatgacccttggccataatatgatttatctccacactagcagagaccaaccgaacccccttcgaccttgccgaaggggagtccgaactagtctcaggcttcaacatcgaatacgccgcaggccccttcgccctattcttcatagccgaatacacaaacattattataataaacaccctcaccactacaatcttcctaggaacaacatatgacgcactctcccctgaactctacacaacatattttgtcaccaagaccctacttctaacctccctgttcttatgaattcgaacagcatacccccgattccgctacgaccaactcatacacctcctatgaaaaaacttcctaccactcaccctagcattacttatatgatatgtctccatacccattacaatctccagcattccccctcaaacctaagaaatatgtctgataaaagagttactttgatagagtaaataataggagcttaaacccccttatttctaggactatgagaatcgaacccatccctgagaatccaaaattctccgtgccacctatcacaccccatcctaaagtaaggtcagctaaataagctatcgggcccataccccgaaaatgttggttatacccttcccgtactaattaatcccctggcccaacccgtcatctactctaccatctttgcaggcacactcatcacagcgctaagctcgcactgattttttacctgagtaggcctagaaataaacatgctagcttttattccagttctaaccaaaaaaataaaccctcgttccacagaagctgccatcaagtatttcctcacgcaagcaaccgcatccataatccttctaatagctatcctcttcaacaatatactctccggacaatgaaccataaccaatactaccaatcaatactcatcattaataatcataatggctatagcaataaaactaggaatagccccctttcacttctgagtcccagaggttacccaaggcacccctctgacatccggcctgcttcttctcacatgacaaaaactagcccccatctcaatcatataccaaatctctccctcactaaacgtaagccttctcctcactctctcaatcttatccatcatagcaggcagttgaggtggattaaaccaaacccagctacgcaaaatcttagcatactcctcaattacccacataggatgaataatagcagttctaccgtacaaccctaacataaccattcttaatttaactatttatattatcctaactactaccgcattcctactactcaacttaaactccagcaccacgaccctactactatctcgcacctgaaacaagctaacatgactaacacccttaattccatccaccctcctctccctaggaggcctgcccccgctaaccggctttttgcccaaatgggccattatcgaagaattcacaaaaaacaatagcctcatcatccccaccatcatagccaccatcaccctccttaacctctacttctacctacgcctaatctactccacctcaatcacactactccccatatctaacaacgtaaaaataaaatgacagtttgaacatacaaaacccaccccattcctccccacactcatcgcccttaccacgctactcctacctatctccccttttatactaataatcttatagaaatttaggttaaatacagaccaagagccttcaaagccctcagtaagttgcaatacttaatttctgtaacagctaaggactgcaaaaccccactctgcatcaactgaacgcaaatcagccactttaattaagctaagcccttactagaccaatgggacttaaacccacaaacacttagttaacagctaagcaccctaatcaactggcttcaatctacttctcccgccgccgggaaaaaaggcgggagaagccccggcaggtttgaagctgcttcttcgaatttgcaattcaatatgaaaatcacctcggagctggtaaaaagaggcctaacccctgtctttagatttacagtccaatgcttcactcagccattttacctcacccccactgatgttcgccgaccgttgactattctctacaaaccacaaagacattggaacactatacctattattcggcgcatgagctggagtcctaggcacagctctaagcctccttattcgagccgagctgggccagccaggcaaccttctaggtaacgaccacatctacaacgttatcgtcacagcccatgcatttgtaataatcttcttcatagtaatacccatcataatcggaggctttggcaactgactagttcccctaataatcggtgcccccgatatggcgtttccccgcataaacaacataagcttctgactcttacctccctctctcctactcctgctcgcatctgctatagtggaggccggagcaggaacaggttgaacagtctaccctcccttagcagggaactactcccaccctggagcctccgtagacctaaccatcttctccttacacctagcaggtgtctcctctatcttaggggccatcaatttcatcacaacaattatcaatataaaaccccctgccataacccaataccaaacgcccctcttcgtctgatccgtcctaatcacagcagtcctacttctcctatctctcccagtcctagctgctggcatcactatactactaacagaccgcaacctcaacaccaccttcttcgaccccgccggaggaggagaccccattctataccaacacctattctgatttttcggtcaccctgaagtttatattcttatcctaccaggcttcggaataatctcccatattgtaacttactactccggaaaaaaagaaccatttggatacataggtatggtctgagctatgatatcaattggcttcctagggtttatcgtgtgagcacaccatatatttacagtaggaatagacgtagacacacgagcatatttcacctccgctaccataatcatcgctatccccaccggcgtcaaagtatttagctgactcgccacactccacggaagcaatatgaaatgatctgctgcagtgctctgagccctaggattcatctttcttttcaccgtaggtggcctgactggcattgtattagcaaactcatcactagacatcgtactacacgacacgtactacgttgtagcccacttccactatgtcctatcaataggagctgtatttgccatcataggaggcttcattcactgatttcccctattctcaggctacaccctagaccaaacctacgccaaaatccatttcactatcatattcatcggcgtaaatctaactttcttcccacaacactttctcggcctatccggaatgccccgacgttactcggactaccccgatgcatacaccacatgaaacatcctatcatctgtaggctcattcatttctctaacagcagtaatattaataattttcatgatttgagaagccttcgcttcgaagcgaaaagtcctaatagtagaagaaccctccataaacctggagtgactatatggatgccccccaccctaccacacattcgaagaacccgtatacataaaatctagacaaaaaaggaaggaatcgaaccccccaaagctggtttcaagccaaccccatggcctccatgactttttcaaaaaggtattagaaaaaccatttcataactttgtcaaagttaaattataggctaaatcctatatatcttaatggcacatgcagcgcaagtaggtctacaagacgctacttcccctatcatagaagagcttatcacctttcatgatcacgccctcataatcattttccttatctgcttcctagtcctgtatgcccttttcctaacactcacaacaaaactaactaatactaacatctcagacgctcaggaaatagaaaccgtctgaactatcctgcccgccatcatcctagtcctcatcgccctcccatccctacgcatcctttacataacagacgaggtcaacgatccctcccttaccatcaaatcaattggccaccaatggtactgaacctacgagtacaccgactacggcggactaatcttcaactcctacatacttcccccattattcctagaaccaggcgacctgcgactccttgacgttgacaatcgagtagtactcccgattgaagcccccattcgtataataattacatcacaagacgtcttgcactcatgagctgtccccacattaggcttaaaaacagatgcaattcccggacgtctaaaccaaaccactttcaccgctacacgaccgggggtatactacggtcaatgctctgaaatctgtggagcaaaccacagtttcatgcccatcgtcctagaattaattcccctaaaaatctttgaaatagggcccgtatttaccctatagcaccccctctaccccctctagagcccactgtaaagctaacttagcattaaccttttaagttaaagattaagagaaccaacacctctttacagtgaaatgccccaactaaatactaccgtatggcccaccataattacccccatactccttacactattcctcatcacccaactaaaaatattaaacacaaactaccacctacctccctcaccaaagcccataaaaataaaaaattataacaaaccctgagaaccaaaatgaacgaaaatctgttcgcttcattcattgcccccacaatcctaggcctacccgccgcagtactgatcattctatttccccctctattgatccccacctccaaatatctcatcaacaaccgactaatcaccacccaacaatgactaatcaaactaacctcaaaacaaatgataaccatacacaacactaaaggacgaacctgatctcttatactagtatccttaatcatttttattgccacaactaacctcctcggactcctgcctcactcatttacaccaaccacccaactatctataaacctagccatggccatccccttatgagcgggcgcagtgattataggctttcgctctaagattaaaaatgccctagcccacttcttaccacaaggcacacctacaccccttatccccatactagttattatcgaaaccatcagcctactcattcaaccaatagccctggccgtacgcctaaccgctaacattactgcaggccacctactcatgcacctaattggaagcgccaccctagcaatatcaaccattaaccttccctctacacttatcatcttcacaattctaattctactgactatcctagaaatcgctgtcgccttaatccaagcctacgttttcacacttctagtaagcctctacctgcacgacaacacataatgacccaccaatcacatgcctatcatatagtaaaacccagcccatgacccctaacaggagccctctcagccctcctaatgacctccggcctagccatgtgatttcacttccactccataacgctcctcatactaggcctactaaccaacacactaaccatataccaatgatggcgcgatgtaacacgagaaagcacataccaaggccaccacacaccacctgtccaaaaaggccttcgatacgggataatcctatttattacctcagaagtttttttcttcgcaggatttttctgagccttttaccactccagcctagcccctaccccccaattaggagggcactggcccccaacaggcatcaccccgctaaatcccctagaagtcccactcctaaacacatccgtattactcgcatcaggagtatcaatcacctgagctcaccatagtctaatagaaaacaaccgaaaccaaataattcaagcactgcttattacaattttactgggtctctattttaccctcctacaagcctcagagtacttcgagtctcccttcaccatttccgacggcatctacggctcaacattttttgtagccacaggcttccacggacttcacgtcattattggctcaactttcctcactatctgcttcatccgccaactaatatttcactttacatccaaacatcactttggcttcgaagccgccgcctgatactggcattttgtagatgtggtttgactatttctgtatgtctccatctattgatgagggtcttactcttttagtataaatagtaccgttaacttccaattaactagttttgacaacattcaaaaaagagtaataaacttcgccttaattttaataatcaacaccctcctagccttactactaataattattacattttgactaccacaactcaacggctacatagaaaaatccaccccttacgagtgcggcttcgaccctatatcccccgcccgcgtccctttctccataaaattcttcttagtagctattaccttcttattatttgatctagaaattgccctccttttacccctaccatgagccctacaaacaactaacctgccactaatagttatgtcatccctcttattaatcatcatcctagccctaagtctggcctatgagtgactacaaaaaggattagactgaaccgaattggtatatagtttaaacaaaacgaatgatttcgactcattaaattatgataatcatatttaccaaatgcccctcatttacataaatattatactagcatttaccatctcacttctaggaatactagtatatcgctcacacctcatatcctccctactatgcctagaaggaataatactatcgctgttcattatagctactctcataaccctcaacacccactccctcttagccaatattgtgcctattgccatactagtctttgccgcctgcgaagcagcggtgggcctagccctactagtctcaatctccaacacatatggcctagactacgtacataacctaaacctactccaatgctaaaactaatcgtcccaacaattatattactaccactgacatgactttccaaaaaacacataatttgaatcaacacaaccacccacagcctaattattagcatcatccctctactattttttaaccaaatcaacaacaacctatttagctgttccccaaccttttcctccgaccccctaacaacccccctcctaatactaactacctgactcctacccctcacaatcatggcaagccaacgccacttatccagtgaaccactatcacgaaaaaaactctacctctctatactaatctccctacaaatctccttaattataacattcacagccacagaactaatcatattttatatcttcttcgaaaccacacttatccccaccttggctatcatcacccgatgaggcaaccagccagaacgcctgaacgcaggcacatacttcctattctacaccctagtaggctcccttcccctactcatcgcactaatttacactcacaacaccctaggctcactaaacattctactactcactctcactgcccaagaactatcaaactcctgagccaacaacttaatatgactagcttacacaatagcttttatagtaaagatacctctttacggactccacttatgactccctaaagcccatgtcgaagcccccatcgctgggtcaatagtacttgccgcagtactcttaaaactaggcggctatggtataatacgcctcacactcattctcaaccccctgacaaaacacatagcctaccccttccttgtactatccctatgaggcataattataacaagctccatctgcctacgacaaacagacctaaaatcgctcattgcatactcttcaatcagccacatagccctcgtagtaacagccattctcatccaaaccccctgaagcttcaccggcgcagtcattctcataatcgcccacggacttacatcctcattactattctgcctagcaaactcaaactacgaacgcactcacagtcgcatcataatcctctctcaaggacttcaaactctactcccactaatagctttttgatgacttctagcaagcctcgctaacctcgccttaccccccactattaacctactgggagaactctctgtgctagtaaccacgttctcctgatcaaatatcactctcctacttacaggactcaacatactagtcacagccctatactccctctacatatttaccacaacacaatggggctcactcacccaccacattaacaacataaaaccctcattcacacgagaaaacaccctcatgttcatacacctatcccccattctcctcctatccctcaaccccgacatcattaccgggttttcctcttgtaaatatagtttaaccaaaacatcagattgtgaatctgacaacagaggcttacgaccccttatttaccgagaaagctcacaagaactgctaactcatgcccccatgtctaacaacatggctttctcaacttttaaaggataacagctatccattggtcttaggccccaaaaattttggtgcaactccaaataaaagtaataaccatgcacactactataaccaccctaaccctgacttccctaattccccccatccttaccaccctcgttaaccctaacaaaaaaaactcatacccccattatgtaaaatccattgtcgcatccacctttattatcagtctcttccccacaacaatattcatgtgcctagaccaagaagttattatctcgaactgacactgagccacaacccaaacaacccagctctccctaagcttcaaactagactacttctccataatattcatccctgtagcattgttcgttacatggtccatcatagaattctcactgtgatatataaactcagacccaaacattaatcagttcttcaaatatctactcatcttcctaattaccatactaatcttagttaccgctaacaacctattccaactgttcatcggctgagagggcgtaggaattatatccttcttgctcatcagttgatgatacgcccgagcagatgccaacacagcagccattcaagcaatcctatacaaccgtatcggcgatatcggtttcatcctcgccttagcatgatttatcctacactccaactcatgagacccacaacaaatagcccttctaaacgctaatccaagcctcaccccactactaggcctcctcctagcagcagcaggcaaatcagcccaattaggtctccacccctgactcccctcagccatagaaggccccaccccagtctcagccctactccactcaagcactatagttgtagcaggaatcttcttactcatccgcttccaccccctagcagaaaatagcccactaatccaaactctaacactatgcttaggcgctatcaccactctgttcgcagcagtctgcgcccttacacaaaatgacatcaaaaaaatcgtagccttctccacttcaagtcaactaggactcataatagttacaatcggcatcaaccaaccacacctagcattcctgcacatctgtacccacgccttcttcaaagccatactatttatgtgctccgggtccatcatccacaaccttaacaatgaacaagatattcgaaaaataggaggactactcaaaaccatacctctcacttcaacctccctcaccattggcagcctagcattagcaggaatacctttcctcacaggtttctactccaaagaccacatcatcgaaaccgcaaacatatcatacacaaacgcctgagccctatctattactctcatcgctacctccctgacaagcgcctatagcactcgaataattcttctcaccctaacaggtcaacctcgcttccccacccttactaacattaacgaaaataaccccaccctactaaaccccattaaacgcctggcagccggaagcctattcgcaggatttctcattactaacaacatttcccccgcatcccccttccaaacaacaatccccctctacctaaaactcacagccctcgctgtcactttcctaggacttctaacagccctagacctcaactacctaaccaacaaacttaaaataaaatccccactatgcacattttatttctccaacatactcggattctaccctagcatcacacaccgcacaatcccctatctaggccttcttacgagccaaaacctgcccctactcctcctagacctaacctgactagaaaagctattacctaaaacaatttcacagcaccaaatctccacctccatcatcacctcaacccaaaaaggcataattaaactttacttcctctctttcttcttcccactcatcctaaccctactcctaatcacataacctattcccccgagcaatctcaattacaatatatacaccaacaaacaatgttcaaccagtaactactactaatcaacgcccataatcatacaaagcccccgcaccaataggatcctcccgaatcaaccctgacccctctccttcataaattattcagcttcctacactattaaagtttaccacaaccaccaccccatcatactctttcacccacagcaccaatcctacctccatcgctaaccccactaaaacactcaccaagacctcaacccctgacccccatgcctcaggatactcctcaatagccatcgctgtagtatatccaaagacaaccatcattccccctaaataaattaaaaaaactattaaacccatataacctcccccaaaattcagaataataacacacccgaccacaccgctaacaatcaatactaaacccccataaataggagaaggcttagaagaaaaccccacaaaccccattactaaacccacactcaacagaaacaaagcatacatcattattctcgcacggactacaaccacgaccaatgatatgaaaaaccatcgttgtatttcaactacaagaacaccaatgaccccaatacgcaaaactaaccccctaataaaattaattaaccactcattcatggacctccccaccccatccaacatctccgcatgatgaaacttcggctcactccttggcgcctgcctgatcctccaaatcaccacaggactattcctagccatgcactactcaccagacgcctcaaccgccttttcatcaatcgcccacatcactcgagacgtaaattatggctgaatcatccgctaccttcacgccaatggcgcctcaatattctttatctgcctcttcctacacatcgggcgaggcctatattacggatcatttctctactcagaaacctgaaacatcggcattatcctcctgcttgcaactatagcaacagccttcataggctatgtcctcccgtgaggccaaatatcattctgaggggccacagtaattacaaacttactatccgccatcccatacattgggacagacctagttcaatgaatctgaggaggctactcagtagacagtcccaccctcacacgattctttacctttcacttcatcttgcccttcattattgcagccctagcagcactccacctcctattcttgcacgaaacgggatcaaacaaccccctaggaatcacctcccattccgataaaatcaccttccacccttactacacaatcaaagacgccctcggcttacttctcttccttctctccttaatgacattaacactattctcaccagacctcctaggcgacccagacaattataccctagccaaccccttaaacacccctccccacatcaagcccgaatgatatttcctattcgcctacacaattctccgatccgtccctaacaaactaggaggcgtccttgccctattactatccatcctcatcctagcaataatccccatcctccatatatccaaacaacaaagcataatatttcgcccactaagccaatcactttattgactcctagccgcagacctcctcattctaacctgaatcggaggacaaccagtaagctacccttttaccatcattggacaagtagcatccgtactatacttcacaacaatcctaatcctaataccaactatctccctaattgaaaacaaaatactcaaatgggcctgtccttgtagtataaactaatacaccagtcttgtaaaccggagatgaaaacctttttccaaggacaaatcagagaaaaagtctttaactccaccattagcacccaaagctaagattctaatttaaactattctctgttctttcatggggaagcagatttgggtaccacccaagtattgactcacccatcaacaaccgctatgtatttcgtacattactgccagccaccatgaatattgtacagtaccataaatacttgaccacctgtagtacataaaaacccaatccacatcaaaaccccctccccatgcttacaggcaagtacagcaatcaaccctcaactatcacacatcaactgcaactccaaagccacccctcacccactaggataccaacaaacctacccacccttaacagtacatagtacatgaagccatttaccgtacatagcacattacagtcaaatcccttctcgtccccatggatgacccccctcagataggggtcccttgaccaccatcctccgtgaaatcaatatcccgcacaagagtgctactctcctcgctccgggcccataacacttgggggtagctaaagtgaactgtatccgacatctggttcctacttcagggccataaagcctaaatagcccacacgttccccttaaataagacatcacgatg

SEQ ID NO: 326 - DNA, 16564 bp, Homo sapiens mitochondrial
  3110: "n" refers to a nucleotide at position 3107 of the Cambridge Reference Sequence (CRS, Anderson et al. 1981 Nature 290:457-465), later determined to be absent from the human mtDNA sequence according to the revised CRS (rCRS, Andrews et al. 1999 Nature Genetics 23:147); "n" therefore represents a single nucleotide deletion at a position corresponding to nucleotide 3107 of SEQ ID NO:1 as provided herein.
gatcacaggtctatcaccctattaaccactcacgggagctctccatgcatttggtattttcgtctggggggtgtgcacgcgatagcattgcgagacgctggagccggagcaccctatgtcgcagtatctgtctttgattcctgcctcattctattatttatcgcacctacgttcaatattacaggcgaacatacctactaaagtgtgttaattaattaatgcttgtaagacataataataacaattgaatgtctgcacagccgctttccacacagacatcataacaaaaaatttccaccaaaccccccctccccccccgcttctggccacagcacttaaacacatctctgccaaaccccaaaaacaaagaaccctaacaccagcctaaccagatttcaaattttatcttttggcggtatgcacttttaacagtcaccccccaactaacacattattttcccctcccactcccatactactaatctcatcaatacaacccccacccatcctacccagcacacacacaccgctgctaaccccataccccgaaccaaccaaaccccaaagacaccccccacagtttatgtagcttacctcctcaaagcaatacactgaaaatgtttagacgggctcacatcaccccataaacaaataggtttggtcctagcctttctattagctcttagtaagattacacatgcaagcatccccgttccagtgagttcaccctctaaatcaccacgatcaaaagggacaagcatcaagcacgcagcaatgcagctcaaaacgcttagcctagccacacccccacgggaaacagcagtgattagcctttagcaataaacgaaagtttaactaagctatactaaccccagggttggtcaatttcgtgccagccaccgcggtcacacgattaacccaagtcaatagaagccggcgtaaagagtgttttagatcaccccctccccaataaagctaaaactcacctgagttgtaaaaaactccagttgacacaaaatagactacgaaagtggctttaacatatctgaacacacaatagctaagacccaaactgggattagataccccactatgcttagccctaaacctcaacagttaaatcaacaaaactgctcgccagaacactacgagccacagcttaaaactcaaaggacctggcggtgcttcatatccctctagaggagcctgttctgtaatcgataaaccccgatcaacctcaccacctcttgctcagcctatataccgccatcttcagcaaaccctgatgaaggctacaaagtaagcgcaagtacccacgtaaagacgttaggtcaaggtgtagcccatgaggtggcaagaaatgggctacattttctaccccagaaaactacgatagcccttatgaaacttaagggtcgaaggtggatttagcagtaaactgagagtagagtgcttagttgaacagggccctgaagcgcgtacacaccgcccgtcaccctcctcaagtatacttcaaaggacatttaactaaaacccctacgcatttatatagaggagacaagtcgtaacatggtaagtgtactggaaagtgcacttggacgaaccagagtgtagcttaacacaaagcacccaacttacacttaggagatttcaacttaacttgaccgctctgagctaaacctagccccaaacccactccaccttactaccagacaaccttagccaaaccatttacccaaataaagtataggcgatagaaattgaaacctggcgcaatagatatagtaccgcaagggaaagatgaaaaattataaccaagcataatatagcaaggactaacccctataccttctgcataatgaattaactagaaataactttgcaaggagagccaaagctaagacccccgaaaccagacgagctacctaagaacagctaaaagagcacacccgtctatgtagcaaaatagtgggaagatttataggtagaggcgacaaacctaccgagcctggtgatagctggttgtccaagatagaatcttagttcaactttaaatttgcccacagaaccctctaaatccccttgtaaatttaactgttagtccaaagaggaacagctctttggacactaggaaaaaaccttgtagagagagtaaaaaatttaacacccatagtaggcctaaaagcagccaccaattaagaaagcgttcaagctcaacacccactacctaaaaaatcccaaacatataactgaactcctcacacccaattggaccaatctatcaccctatagaagaactaatgttagtataagtaacatgaaaacattctcctccgcataagcctgcgtcagattaaaacactgaactgacaattaacagcccaatatctacaatcaaccaacaagtcattattaccctcactgtcaacccaacacaggcatgctcataaggaaaggttaaaaaaagtaaaaggaactcggcaaatcttaccccgcctgtttaccaaaaacatcacctctagcatcaccagtattagaggcaccgcctgcccagtgacacatgtttaacggccgcggtaccctaaccgtgcaaaggtagcataatcacttgttccttaaatagggacctgtatgaatggctccacgagggttcagctgtctcttacttttaaccagtgaaattgacctgcccgtgaagaggcgggcatgacacagcaagacgagaagaccctatggagctttaatttattaatgcaaacagtacctaacaaacccacaggtcctaaactaccaaacctgcattaaaaatttcggttggggcgacctcggagcagaacccaacctccgagcagtacatgctaagacttcaccagtcaaagcgaactactatactcaattgatccaataacttgaccaacggaacaagttaccctagggataacagcgcaatcctattctagagtccatatcaacaatagggtttacgacctcgatgttggatcaggacatcccgatggtgcagccgctattaaaggttcgtttgttcaacgattaaagtcctacgtgatctgagttcagaccggagtaatccaggtcggtttctatctacnttcaaattcctccctgtacgaaaggacaagagaaataaggcctacttcacaaagcgccttcccccgtaaatgatatcatctcaacttagtattatacccacacccacccaagaacagggtttgttaagatggcagagcccggtaatcgcataaaacttaaaactttacagtcagaggttcaattcctcttcttaacaacatacccatggccaacctcctactcctcattgtacccattctaatcgcaatggcattcctaatgcttaccgaacgaaaaattctaggctatatacaactacgcaaaggccccaacgttgtaggcccctacgggctactacaacccttcgctgacgccataaaactcttcaccaaagagcccctaaaacccgccacatctaccatcaccctctacatcaccgccccgaccttagctctcaccgtcgctcttctactatgaacccccctccccatacccaaccccctggtcaacctcaacctaggcctcctatttattctagccacctctagcctagccgtttactcaatcctctgatcggggtgagcatcaaactcaaactacgccctgatcggcgcactgcgagcagtagcccaaacaatctcatatgaagtcaccctagccatcattctactatcaacattactaataagtggctcctttaacctctccacccttatcacaacacaagaacacctctgattactcctgccatcatgacccttggccataatatgatttatctccacactagcagagaccaaccgaacccccttcgaccttgccgaaggagagtccgaactagtctcaggcttcaacatcgaatacgccgcaggccccttcgccctattcttcatagccgaatacacaaacattattataataaacaccctcaccactacaatcttcctaggaacaacatatgacgcactctcccctgaactctacacaacatattttgtcaccaagaccctacttctaacctccctgttcttatgaattcgaacagcatacccccgattccgctacgaccaactcatacacctcctatgaaaaaacttcctaccactcaccctagcattacttatatgatatgtctccatacccattacaatctccagcattccccctcaaacctaagaaatatgtctgataaaagagttactttgatagagtaaataataggagcttaaacccccttatttctaggactatgagaatcgaacccatccctgagaatccaaaattctccgtgccacctatcacaccccatcctaaagtaaggtcagctaaataagctatcgggcccataccccgaaaatgttggttatacccttcccgtactaattaatcccctggcccaacccgtcatctactctaccatctttgcaggcacactcatcacagcgctaagctcgcactgattttttacctgagtaggcctagaaataaacatgctagcttttattccagttctaaccaaaaaaataaaccctcgttccacagaagctgccatcaagtatttcctcacgcaagcaaccgcatccataatccttctaatagctatcctcttcaacaatatactctccggacaatgaaccataaccaatactaccaatcaatactcatcattaataatcataatggctatagcaataaaactaggaatagccccctttcacttctgagtcccagaagttacccaaggcacccctctgacatccggcctgcttcttctcacatgacaaaaactagcccccatctcaatcatataccaaatctctccctcactaaacgtaagccttctcctcactctctcaatcttatccatcatagcaggcagttgaggtggactaaaccaaacccagctacgcaaaatcttagcatactcctcaattacccacataggatgaataatagcagttctaccgtacaaccctaacataaccattcttaatttaactatttatattatcctaactactaccgcattcctactactcaacttaaactccagcaccacgaccctactactatctcgcacctgaaacaagctaacatgactaacacccttaattccatccaccctcctctccctaggaggcctgcccccgctaaccggctttttgcccaaatgggccattatcgaagaattcacaaaaaacaatagcctcatcatccccaccatcatagccaccatcaccctccttaacctctacttctacctacgcctaatctactccacctcaatcacactactccccatatctaacaacgtaaaaataaaatgacagtttgaacatacaaaacccaccccattcctccccacactcatcgcccttaccacgctactcctacctatctccccttttatactaataatcttatagaaatttaggttaaatacagaccaagagccttcaaagccctcagtaagttgcaatacttaatttctgtaacagctaaggactgcaaaaccccactctgcatcaactgaacgcaaatcagccactttaattaagctaagcccttactagaccaatgggacttaaacccacaaacacttagttaacagctaagcaccctaatcaactggcttcaatctacttctcccgccgccgggaaaaaaggcgggagaagccccggcaggtttgaagctgcttcttcgaatttgcaattcaatatgaaaatcacctcggagctggtaaaaagaggcctaacccctgtctttagatttacagtccaatgcttcactcagccattttacctcacccccactgatgttcgccgaccgttgactattctctacaaaccacaaagacattggaacactatacctattattcggcgcatgagctggagtcctaggcacagctctaagcctccttattcgagccgagctgggccagccaggcaaccttctaggtaacgaccacatctacaacgttatcgtcacagcccatgcatttgtaataatcttcttcatagtaatacccatcataatcggaggctttggcaactgactagttcccctaataatcggtgcccccgatatggcgtttccccgcataaacaacataagcttctgactcttacctccctctctcctactcctgctcgcatctgctatagtggaggccggagcaggaacaggttgaacagtctaccctcccttagcagggaactactcccaccctggagcctccgtagacctaaccatcttctccttacacctagcaggtgtctcctctatcttaggggccatcaatttcatcacaacaattatcaatataaaaccccctgccataacccaataccaaacgcccctcttcgtctgatccgtcctaattacagcagtcctacttctcctatctctcccagtcctagctgctggcatcactatactactaacagaccgcaacctcaacaccaccttcttcgaccccgccggaggaggagaccccattctataccaacacctattctgatttttcggtcaccctgaagtttatattcttatcctaccaggcttcggaataatctcccatattgtaacttactactccggaaaaaaagaaccatttggatacataggtatggtctgagctatgatatcaattggcttcctagggtttatcgtgtgagcacaccatatatttacagtaggaatagacgtagacacacgagcatatttcacctccgctaccataatcatcgctatccccaccggcgtcaaagtatttagctgactcgccacactccacggaagcaatatgaaatgatctgctgcagtgctctgagccctaggattcatctttcttttcaccgtaggtggcctgactggcattgtattagcaaactcatcactagacatcgtactacacgacacgtactacgttgtagctcacttccactatgtcctatcaataggagctgtatttgccatcataggaggcttcattcactgatttcccctattctcaggctacaccctagaccaaacctacgccaaaatccatttcactatcatattcatcggcgtaaatctaactttcttcccacaacactttctcggcctatccggaatgccccgacgttactcggactaccccgatgcatacaccacatgaaacatcctatcatctgtaggctcattcatttctctaacagcagtaatattaataattttcatgatttgagaagccttcgcttcgaagcgaaaagtcctaatagtagaagaaccctccataaacctggagtgactatatggatgccccccaccctaccacacattcgaagaacccgtatacataaaatctagacaaaaaaggaaggaatcgaaccccccaaagctggtttcaagccaaccccatggcctccatgactttttcaaaaaggtattagaaaaaccatttcataactttgtcaaagttaaattataggctaaatcctatatatcttaatggcacatgcagcgcaagtaggtctacaagacgctacttcccctatcatagaagagcttatcacctttcatgatcacgccctcataatcattttccttatctgcttcctagtcctgtatgcccttttcctaacactcacaacaaaactaactaatactaacatctcagacgctcaggaaatagaaaccgtctgaactatcctgcccgccatcatcctagtcctcatcgccctcccatccctacgcatcctttacataacagacgaggtcaacgatccctcccttaccatcaaatcaattggccaccaatggtactgaacctacgagtacaccgactacggcggactaatcttcaactcctacatacttcccccattattcctagaaccaggcgacctgcgactccttgacgttgacaatcgagtagtactcccgattgaagcccccattcgtataataattacatcacaagacgtcttgcactcatgagctgtccccacattaggcttaaaaacagatgcaattcccggacgtctaaaccaaaccactttcaccgctacacgaccgggggtatactacggtcaatgctctgaaatctgtggagcaaaccacagtttcatgcccatcgtcctagaattaattcccctaaaaatctttgaaatagggcccgtatttaccctatagcaccccctctagagcccactgtaaagctaacttagcattaaccttttaagttaaagattaagagaaccaacacctctttacagtgaaatgccccaactaaatactaccgtatggcccaccataattacccccatactccttacactattcctcatcacccaactaaaaatattaaacacaaactaccacctacctccctcaccaaagcccataaaaataaaaaattataacaaaccctgagaaccaaaatgaacgaaaatctgttcgcttcattcattgcccccacaatcctaggcctacccgccgcagtactgatcattctatttccccctctattgatccccacctccaaatatctcatcaacaaccgactaatcaccacccaacaatgactaatcaaactaacctcaaaacaaatgataaccatacacaacactaaaggacgaacctgatctcttatactagtatccttaatcatttttattgccacaactaacctcctcggactcctgcctcactcatttacaccaaccacccaactatctataaacctagccatggccatccccttatgagcgggcgcagtgattataggctttcgctctaagattaaaaatgccctagcccacttcttaccacaaggcacacctacaccccttatccccatactagttattatcgaaaccatcagcctactcattcaaccaatagccctggccgtacgcctaaccgctaacattactgcaggccacctactcatgcacctaattggaagcgccaccctagcaatatcaaccattaaccttccctctacacttatcatcttcacaattctaattctactgactatcctagaaatcgctgtcgccttaatccaagcctacgttttcacacttctagtaagcctctacctgcacgacaacacataatgacccaccaatcacatgcctatcatatagtaaaacccagcccatgacccctaacaggggccctctcagccctcctaatgacctccggcctagccatgtgatttcacttccactccataacgctcctcatactaggcctactaaccaacacactaaccatataccaatgatggcgcgatgtaacacgagaaagcacataccaaggccaccacacaccacctgtccaaaaaggccttcgatacgggataatcctatttattacctcagaagtttttttcttcgcaggatttttctgagccttttaccactccagcctagcccctaccccccaattaggagggcactggcccccaacaggcatcaccccgctaaatcccctagaagtcccactcctaaacacatccgtattactcgcatcaggagtatcaatcacctgagctcaccatagtctaatagaaaacaaccgaaaccaaataattcaagcactgcttattacaattttactgggtctctattttaccctcctacaagcctcagagtacttcgagtctcccttcaccatttccgacggcatctacggctcaacattttttgtagccacaggcttccacggacttcacgtcattattggctcaactttcctcactatctgcttcatccgccaactaatatttcactttacatccaaacatcactttggcttcgaagccgccgcctgatactggcattttgtagatgtggtctgactatttctgtatgtctccatctattgatgagggtcttactcttttagtataaatagtaccgttaacttccaattaactagttttgacaacattcaaaaaagagtaataaacttcgccttaattttaataatcaacaccctcctagccttactactaataattattacattttgactaccacaactcaacggctacatagaaaaatccaccccttacgagtgcggcttcgaccctatatcccccgcccgcgtccctttctccataaaattcttcttagtagctattaccttcttattatttgatctagaaattgccctccttttacccctaccatgagccctacaaacaactaacctgccactaatagttatgtcatccctcttattaatcatcatcctagccctaagtctggcctatgagtgactacaaaaaggattagactgaaccgaattggtatatagtttaaacaaaacgaatgatttcgactcattaaattatgataatcatatttaccaaatgcccctcatttacataaatattatactagcatttaccatctcacttctaggaatactagtatatcgctcacacctcatatcctccctactatgcctagaaggaataatactatcgctgttcattatagctactctcataaccctcaacacccactccctcttagccaatattgtgcctattgccatactagtctttgccgcctgcgaagcagcagtgggcctagccctactagtctcaatctccaacacatatggcctagactacgtacataacctaaacctactccaatgctaaaactaatcgtcccaacaattatattactaccactgacatgactttccaaaaaacacataatttgaatcaacacaaccacccacagcctaattattagcatcatccctctactattttttaaccaaatcaacaacaacctatttagctgttccccaaccttttcctccgaccccctaacaacccccctcctaatactaactacctgactcctacccctcacaatcatggcaagccaacgccacttatccagtgaaccactatcacgaaaaaaactctacctctctatactaatctccctacaaatctccttaattataacattcacagccacagaactaatcatattttatatcttcttcgaaaccacacttatccccaccttggctatcatcacccgatgaggcaaccagtcagaacgcctgaacgcaggcacatacttcctattctacaccctagtaggctcccttcccctactcatcgcactaatttacactcacaacaccctaggctcactaaacattctactactcactctcactgcccaagaactatcaaactcctgagccaacaacttaatatgactagcttacacaatagcttttatagtaaagatacctctttacggactccacttatgactccctaaagcccatgtcgaagcccccatcgctgggtcaatagtacttgccgcagtactcttaaaactaggcggctatggtataatacgcctcacactcattctcaaccccctgacaaaacacatagcctaccccttccttgtactatccctatgaggcataattataacaagctccatctgcctacgacaaacagacctaaaatcgctcattgcatactcttcaatcagccacatagccctcgtagtaacagccattctcatccaaaccccctgaagcttcaccggcgcagtcattctcataatcgcccacggacttacatcctcattactattctgcctagcaaactcaaactacgaacgcactcacagtcgcatcataatcctctctcaaggacttcaaactctactcccactaatagctttttgatgacttctagcaagcctcgctaacctcgccttaccccccactattaacctactgggagaactctctgtgctagtaaccacgttctcctgatcaaatatcactctcctacttacaggactcaacatactagtcacagccctatactccctctacatatttaccacaacacaatggggctcactcacccaccacattaacaacataaaaccctcattcacacgagaaaacaccctcatgttcatacacctatcccccattctcctcctatccctcaaccccgacatcattaccgggttttcctcttgtaaatatagtttaaccaaaacatcagattgtgaatctgacaacagaggcttacgaccccttatttaccgagaaagctcacaagaactgctaactcatgcccccatgtctaacaacatggctttctcaacttttaaaggataacagctatccattggtcttaggccccaaaaattttggtgcaactccaaataaaagtaataaccatgcacactactataaccaccctaaccctgacttccctaattccccccatccttaccaccctcgttaaccctaacaaaaaaaactcatacccccattatgtaaaatccattgtcgcatccacctttattatcagtctcttccccacaacaatattcatgtgcctagaccaagaagttattatctcgaactgacactgagccacaacccaaacaacccagctctccctaagcttcaaactagactacttctccataatattcatccctgtagcattgttcgttacatggtccatcatagaattctcactgtgatatataaactcagacccaaacattaatcagttcttcaaatatctactcatcttcctaattaccatactaatcttagttaccgctaacaacctattccaactgttcatcggctgagagggcgtaggaattatatccttcttgctcatcagttgatgatacgcccgagcagatgccaacacagcagccattcaagcaatcctatacaaccgtatcggcgatatcggtttcatcctcgccttagcatgatttatcctacactccaactcatgagacccacaacaaatagcccttctaaacgctaatccaagcctcaccccactactaggcctcctcctagcagcagcaggcaaatcagcccaattaggtctccacccctgactcccctcagccatagaaggccccaccccagtctcagccctactccactcaagcactatagttgtagcaggaatcttcttactcatccgcttccaccccctagcagaaaatagcccactaatccaaactctaacactatgcttaggcgctatcaccactctgttcgcagcagtctgcgcccttacacaaaatgacatcaaaaaaatcgtagccttctccacttcaagtcaactaggactcataatagttacaatcggcatcaaccaaccacacctagcattcctgcacatctgtacccacgccttcttcaaagccatactatttatgtgctccgggtccatcatccacaaccttaacaatgaacaagatattcgaaaaataggaggactactcaaaaccatacctctcacttcaacctccctcaccattggcagcctagcattagcaggaatacctttcctcacaggtttctactccaaagaccacatcatcgaaaccgcaaacatatcatacacaaacgcctgagccctatctattactctcatcgctacctccctaacaagcgcctatagcactcgaataattcttctcaccctaacaggtcaacctcgcttccccacccttactaacattaacgaaaataaccccaccctactaaaccccattaaacgcctggcagccggaagcctattcgcaggatttctcattactaacaacatttcccccgcatcccccttccaaacaacaatccccctctacctaaaactcacagccctcgctgtcactttcctaggacttctaacagccctagacctcaactacctaaccaacaaacttaaaataaaatccccactatgcacattttatttctccaacatactcggattctaccctagcatcacacaccgcacaatcccctatctaggccttcttacgagccaaaacctgcccctactcctcctagacctaacctgactagaaaagctattacctaaaacaatttcacagcaccaaatctccacctccatcatcacctcaacccaaaaaggcataattaaactttacttcctctctttcttcttcccactcatcctaaccctactcctaatcacataacctattcccccgagcaatctcaattacaatatatacaccaacaaacaatgttcaaccagtaactactactaatcaacgcccataatcatacaaagcccccgcaccaataggatcctcccgaatcaaccctgacccctctccttcataaattattcagcttcctacactattaaagtttaccacaaccaccaccccatcatactctttcacccacagcaccaatcctacctccatcgctaaccccactaaaacactcaccaagacctcaacccctgacccccatgcctcaggatactcctcaatagccatcgctgtagtatatccaaagacaaccatcattccccctaaataaattaaaaaaactattaaacccatataacctcccccaaaattcagaataataacacacccgaccacaccgctaacaatcaatactaaacccccataaataggagaaggcttagaagaaaaccccacaaaccccattactaaacccacactcaacagaaacaaagcatacatcattattctcgcacggactacaaccacgaccaatgatatgaaaaaccatcgttgtatttcaactacaagaacaccaatgaccccaatacgcaaaattaaccccctaataaaattaattaaccactcattcatcgacctccccaccccatccaacatctccgcatgatgaaacttcggctcactccttggcgcctgcctgatcctccaaatcaccacaggactattcctagccatgcactactcaccagacgcctcaaccgccttttcatcaatcgcccacatcactcgagacgtaaattatggctgaatcatccgctaccttcacgccaatggcgcctcaatattctttatctgcctcttcctacacatcgggcgaggcctatattacggatcatttctctactcagaaacctgaaacatcggcattatcctcctgcttgcaactatagcaacagccttcataggctatgtcctcccgtgaggccaaatatcattctgaggggccacagtaattacaaacttactatccgccatcccatacattgggacagacctagttcaatgaatctgaggaggctactcagtagacagtcccaccctcacacgattctttacctttcacttcatcttgcccttcattattgcagccctagcagcactccacctcctattcttgcacgaaacgggatcaaacaaccccctaggaatcacctcccattccgataaaatcaccttccacccttactacacaatcaaagacgccctcgggttacttctcttccttctctccttaatgacattaacactattctcaccagacctcctaggggacccagacaattataccctagccaaccccttaaatacccctccccacatcaagcccgaatgatatttcctattcgcctacacaattctccgatccgtccctaacaaactaggaggcgtccttgccctattactatccatcctcatcctagcaataatccccatcctccatatatccaaacaacaaagcataatatttcgcccactaagccaatcactttattgactcctagccgcagacctcctcattctaacctgaatcggaggacaaccagtaagctacccttttaccatcattggacaagtagcatccgtactatacttcacaacaatcctaatcctaataccaactatctccctaattgaaaacaaaatactcaaatgggcctgtccttgtagtataaactaatacaccagtcttgtaaaccggagatgaaaacctttttccaaggacaaatcagagaaaaagtctttaactccaccattagcacccaaagctaagattctaatttaaactattctctgttctttcatggggaagcagatttgggtaccacccaagtattgactcacccatcaacaaccgctatgtatttcgtacattactgccagtcaccatgaatattgtacggtaccataaatacttgaccacctgtagtacataaaaacccaatccacatcaaacccccccccccactgcttacaagcaagtacagcaaccaaccctcaactatcacacatcaactgcaactccaaagccacccctcacccactaggataccaacaaacctacccacccttaacagtacatagtacataaagccattcaccgtacatagcacattacagtcaaatcccttctcgtccccatggatgacccccctcagataggggtcccttgaccaccatcctccgtgaaatcaatatcccgcacaagagtgctactctcctcgctccgggcccataacacttgggggtagctaaaatgaactgtatccgacatctggttcctacttcagggccataaagcctaaatagcccacacgttccccttaaataagacatcacgatg

SEQ ID NO: 327 - DNA, 16572 bp, Homo sapiens mitochondrial
  3110: "n" refers to a nucleotide at position 3107 of the Cambridge Reference Sequence (CRS, Anderson et al. 1981 Nature 290:457-465), later determined to be absent from the human mtDNA sequence according to the revised CRS (rCRS, Andrews et al. 1999 Nature Genetics 23:147); "n" therefore represents a single nucleotide deletion at a position corresponding to nucleotide 3107 of SEQ ID NO:1 as provided herein.
gatcacaggtctatcaccctattaaccactcacgggagctctccatgcatttggtattttcgtctggggggtatgcacgcgatagcattgcgagacgctggagccggagcaccctatgtcgcagtatctgtctttgattcctgcctcatcctattattcatcgcacctacgttcaatattacaggcgaacatacttactaaagtgtgttaattaattaatgcttgtaggacataataataacaattgaatgtctgcacagccgctttccacacagacatcataacaaaaaatttccaccaaaccccccctccccccccgcttctggccacagcacttaaacacatctctgccaaaccccaaaaacaaagaaccctaacaccagcctaaccagatttcaaattttatcttttggcggtatgcacttttaacagtcaccccccaactaacacattattttcccctcccactcccatactactaatctcatcaatacaacccccgcccatcctacccagcacacacacaccgctgctaaccccataccccgaaccaaccaaaccccaaagacaccccccacagtttatgtagcttacctcctcaaagcaatacactgaaaatgtttagacgggctcacatcaccccataaacaaataggtttggtcctagcctttctattagctcttagtaagattacacatgcaagcatccccgttccagtgagttcaccctctaaatcaccacgatcaaaagggacaagcatcaagcacgcagcaatgcagctcaaaacgcttagcctagccacacccccacgggaaacagcagtgattaacctttagcaataaacgaaagtttaactaagctatactaaccccagggttggtcaatttcgtgccagccaccgcggtcacacgattaacccaagtcaatagaagccggcgtaaagagtgttttagatcaccccctccccaataaagctaaaactcacctgagttgtaaaaaactccagttgacacaaaatagactacgaaagtggctttaacatatctgaacacacaatagctaagacccaaactgggattagataccccactatgcttagccctaaacctcaacagttaaatcaacaaaactgctcgccagaacactacgagccacagcttaaaactcaaaggacctggcggtgcttcatatccctctagaggagcctgttctgtaatcgataaaccccgatcaacctcaccacctcttgctcagcctatataccgccatcttcagcaaaccctgatgaaggctacaaagtaagcgcaagtacccacgtaaagacgttaggtcaaggtgtagcccatgaggtggcaagaaatgggctacattttctaccccagaaaactacgatagcccttatgaaacttaagggtcgaaggtggatttagcagtaaactgagagtagagtgcttagttgaacagggccctgaagcgcgtacacaccgcccgtcaccctcctcaagtatacttcaaaggacatttaactaaaacccctacgcatttatatagaggagacaagtcgtaacatggtaagtgtactggaaagtgcacttggacgaaccagagtgtagcttaacacaaagcacccaacttacacttaggagatttcaacttaacttgaccgctctgagctaaacctagccccaaacccactccaccttactaccagacaaccttagccaaaccatttacccaaataaagtataggcgatagaaattgaaacctggcgcaatagatatagtaccgcaagggaaagatgaaaaattataaccaagcataatatagcaaggactaacccctataccttctgcataatgaattaactagaaataactttgcaaggagagccaaagctaagacccccgaaaccagacgagctacctaagaacagctaaaagagcacacccgtctatgtagcaaaatagtgggaagatttataggtagaggcgacaaacctaccgagcctggtgatagctggttgtccaagatagaatcttagttcaactttaaatttgcccacagaaccctctaaatccccttgtaaatttaactgttagtccaaagaggaacagctctttggacactaggaaaaaaccttgtagagagagtaaaaaatttaacacccatagtaggcctaaaagcagccaccaattaagaaagcgttcaagctcaacacccactacctaaaaaatcccaaacatataactgaactcctcacacccaattggaccaatctatcaccctatagaagaactaatgttagtataagtaacatgaaaacattctcctccgcataagcctgcgtcagattaaaacactgaactgacaattaacagcccaatatctacaatcaaccaacaagtcattattaccctcactgtcaacccaacacaggcatgctcataaggaaaggttaaaaaaagtaaaaggaactcggcaaatcttaccccgcctgtttaccaaaaacatcacctctagcatcaccagtattagaggcaccgcctgcccagtgacacatgtttaacggccgcggtaccctaaccgtgcaaaggtagcataatcacttgttccttaaatagggacctgtatgaatggctccacgagggttcagctgtctcttacttttaaccagtgaaattgacctgcccgtgaagaggcgggcataacacagcaagacgagaagaccctatggagctttaatttattaatgcaaacagtacctaacaaacccacaggtcctaaactaccaaacctgcattaaaaatttcggttggggcgacctcggagcagaacccaacctccgagcagtacatgctaagacttcaccagtcaaagcgaactactatactcaattgatccaataacttgaccaacggaacaagttaccctagggataacagcgcaatcctattctagagtccatatcaacaatagggtttacgacctcgatgttggatcaggacatcccaatggtgcagccgctattaaaggttcgtttgttcaacgattaaagtcctacgtgatctgagttcagaccggagtaatccaggtcggtttctatctacnttcaaattcctccctgtacgaaaggacaagagaaataaggcctacttcacaaagcgccttcccccgtaaatgatatcatctcaacttagtattatacccacacccacccaagaacagggtttgttaagatggcagagcccggtaatcgcataaaacttaaaactttacagtcagaggttcaattcctcttcttaacaacatacccatggccaacctcctactcctcattgtacccattctaatcgcaatggcattcctaatgcttaccgaacgaaaaattctaggctatatacaactacgcaaaggccccaacgttgtaggcccctacgggctactacaacccttcgctgacgccataaaactcttcaccaaagagcccctaaaacccgccacatctaccatcaccctctacatcaccgccccgaccttagctctcaccatcgctcttctactatgaacccccctccccatacccaaccccctggtcaacctcaacctaggcctcctatttattctagccacctctagcctagccgtttactcaatcctctgatcagggtgagcatcaaactcaaactacgccctgatcggcgcactgcgagcagtagcccaaacaatctcatatgaagtcaccctagccatcattctactatcaacattactaataagtggctcctttaacctctccacccttatcacaacacaagaacacctctgattactcctgccatcatgacccttggccataatatgatttatctccacactagcagagaccaaccgaacccccttcgaccttgccgaaggggagtccgaactagtctcaggcttcaacatcgaatacgccgcaggccccttcgccctattcttcatagccgaatacacaaacattattataataaacaccctcaccactacaatcttcctaggaacaacatatgacgcactctcccctgaactctacacaacatattttgtcaccaagaccctacttctaacctccctgttcttatgaattcgaacagcatacccccgattccgctacgaccaactcatacacctcctatgaaaaaacttcctaccactcaccctagcattacttatatgatatgtctccatacccattacaatctccagcattccccctcaaacctaagaaatatgtctgataaaagagttactttgatagagtaaataataggagcttaaacccccttatttctaggactatgagaatcgaacccatccctgagaatccaaaattctccgtgccacctatcacaccccatcctaaagtaaggtcagctaaataagctatcgggcccataccccgaaaatgttggttatacccttcccgtactaattaatcccctggcccaacccgtcatctactctaccatctttgcaggcacactcatcacagcgctaagctcgcactgattttttacctgagtaggcctagaaataaacatgctagcttttattccagttctaaccaaaaaaataaaccctcgttccacagaagctgccatcaagtatttcctcacgcaagcaaccgcatccataatccttctaatagctatcctcttcaacaatatactctccggacaatgaaccataaccaatactaccaatcaatactcatcattaataatcataatggctatagcaataaaactaggaatagccccctttcacttctgagtcccagaggttacccaaggcacccctctgacatccggcctgcttcttctcacatgacaaaaactagcccccatctcaatcatataccaaatctctccctcactaaacgtaagccttctcctcactctctcaatcttatccatcatagcaggcagttgaggtggattaaaccaaacccagctacgcaaaatcttagcatactcctcaattacccacataggatgaataatagcagttctaccgtacaaccctaacataaccattcttaatttaactatttatattatcctaactactaccgcattcctactactcaacttaaactccagcaccacgaccctactactatctcgcacctgaaacaagctaacatgactaacacccttaattccatccaccctcctctccctaggaggcctgcccccgctaaccggctttttgcccaaatgggccattatcgaagaattcacaaaaaacaatagcctcatcatccccaccatcatagccaccatcaccctccttaacctctacttctacctacgcctaatctactccacctcaatcacactactccccatatctaacaacgtaaaaataaaatgacagtttgaacatacaaaacccaccccattcctccccacactcatcgcccttaccacgctactcctacctatctccccttttatactaataatcttatagaaatttaggttaaatacagaccaagagccttcaaagccctcagtaagttgcaatacttaatttctgtaacagctaaggactgcaaaaccccactctgcatcaactgaacgcaaatcagccactttaattaagctaagcccttactagaccaatgggacttaaacccacaaacacttagttaacagctaagcaccctaatcaactggcttcaatctacttctcccgccgccgggaaaaaaggcgggagaagccccggcaggtttgaagctgcttcttcgaatttgcaattcaatatgaaaatcacctcggagctggtaaaaagaggcctaacccctgtctttagatttacagtccaatgcttcactcagccattttacctcacccccactgatgttcgccgaccgttgactattctctacaaaccacaaagacattggaacactatacctattattcggcgcatgagctggagtcctaggcacagctctaagcctccttattcgagccgagctgggccagccaggcaaccttctaggtaacgaccacatctacaacgttatcgtcacagcccatgcatttgtaataatcttcttcatagtaatacccatcataatcggaggctttggcaactgactagttcccctaataatcggtgcccccgatatggcgtttccccgcataaacaacataagcttctgactcttacctccctctctcctactcctgctcgcatctgctatagtggaggccggagcaggaacaggttgaacagtctaccctcccttagcagggaactactcccaccctggagcctccgtagacctaaccatcttctccttacacctagcaggtgtctcctctatcttaggggccatcaatttcatcacaacaattatcaatataaaaccccctgccataacccaataccaaacgcccctcttcgtctgatccgtcctaatcacagcagtcctacttctcctatctctcccagtcctagctgctggcatcactatactactaacagaccgcaacctcaacaccaccttcttcgaccccgccggaggaggagaccccattctataccaacacctattctgatttttcggtcaccctgaagtttatattcttatcctaccaggcttcggaataatctcccatattgtaacttactactccggaaaaaaagaaccatttggatacataggtatggtctgagctatgatatcaattggcttcctagggtttatcgtgtgagcacaccatatatttacagtaggaatagacgtagacacacgagcatatttcacctccgctaccataatcatcgctatccccaccggcgtcaaagtatttagctgactcgccacactccacggaagcaatatgaaatgatctgctgcagtgctctgagccctaggattcatctttcttttcaccgtaggtggcctgactggcattgtattagcaaactcatcactagacatcgtactacacgacacgtactacgttgtagcccacttccactatgtcctatcaataggagctgtatttgccatcataggaggcttcattcactgatttcccctattctcaggctacaccctagaccaaacctacgccaaaatccatttcactatcatattcatcggcgtaaatctaactttcttcccacaacactttctcggcctatccggaatgccccgacgttactcggactaccccgatgcatacaccacatgaaacatcctatcatctgtaggctcattcatttctctaacagcagtaatattaataattttcatgatttgagaagccttcgcttcgaagcgaaaagtcctaatagtagaagaaccctccataaacctggagtgactatatggatgccccccaccctaccacacattcgaagaacccgtatacataaaatctagacaaaaaaggaaggaatcgaaccccccaaagctggtttcaagccaaccccatggcctccatgactttttcaaaaaggtattagaaaaaccatttcataactttgtcaaagttaaattataggctaaatcctatatatcttaatggcacatgcagcgcaagtaggtctacaagacgctacttcccctatcatagaagagcttatcacctttcatgatcacgccctcataatcattttccttatctgcttcctagtcctgtatgcccttttcctaacactcacaacaaaactaactaatactaacatctcagacgctcaggaaatagaaaccgtctgaactatcctgcccgccatcatcctagtcctcatcgccctcccatccctacgcatcctttacataacagacgaggtcaacgatccctcccttaccatcaaatcaattggccaccaatggtactgaacctacgagtacaccgactacggcggactaatcttcaactcctacatacttcccccattattcctagaaccaggcgacctgcgactccttgacgttgacaatcgagtagtactcccgattgaagcccccattcgtataataattacatcacaagacgtcttgcactcatgagctgtccccacattaggcttaaaaacagatgcaattcccggacgtctaaaccaaaccactttcaccgctacacgaccgggggtatactacggtcaatgctctgaaatctgtggagcaaaccacagtttcatgcccatcgtcctagaattaattcccctaaaaatctttgaaatagggcccgtatttaccctatagcaccccctctaccccctctagagcccactgtaaagctaacttagcattaaccttttaagttaaagattaagagaaccaacacctctttacagtgaaatgccccaactaaatactaccgtatggcccaccataattacccccatactccttacactattcctcatcacccaactaaaaatattaaacacaaactaccacctacctcccttaccaaagcccataaaaataaaaaattataacaaaccctgagaaccaaaatgaacgaaaatctgttcgcttcattcattgcccccacaatcctaggcctacccgccgcagtactgatcattctatttccccctctattgatccccacctccaaatatctcatcaacaaccgactaatcaccacccaacaatgactaatcaaactaacctcaaaacaaatgataaccatacacaacactaaaggacgaacctgatctcttatactagtatccttaatcatttttattgccacaactaacctcctcggactcctgcctcactcatttacaccaaccacccaactatctataaacctagccatggccatccccttatgagcgggcgcagtgattataggctttcgctctaagattaaaaatgccctagcccacttcttaccacaaggcacacctacaccccttatccccatactagttattatcgaaaccatcagcctactcattcaaccaatagccctggccgtacgcctaaccgctaacattactgcaggccacctactcatgcacctaattggaagcgccaccctagcaatatcaaccattaaccttccctctacacttatcatcttcacaattctaattctactgactatcctagaaatcgctgtcgccttaatccaagcctacgttttcacacttctagtaagcctctacctgcacgacaacacataatgacccaccaatcacatgcctatcatatagtaaaacccagcccatgacccctaacaggggccctctcagccctcctaatgacctccggcctagccatgtgatttcacttccactccataacgctcctcatactaggcctactaaccaacacactaaccatataccaatgatggcgcgatgtaacacgagaaagcacataccaaggccaccacacaccacctgtccaaaaaggccttcgatacgggataatcctatttattacctcagaagtttttttcttcgcaggatttttctgagccttttaccactccagcctagcccctaccccccaattaggagggcactggcccccaacaggcatcaccccgctaaatcccctagaagtcccactcctaaacacatccgtattactcgcatcaggagtatcaatcacctgagctcaccatagtctaatagaaaacaaccgaaaccaaataattcaagcactgcttattacaattttactgggtctctattttaccctcctacaagcctcagagtacttcgagtctcccttcaccatttccgacggcatctacggctcaacattttttgtagccacaggcttccacggacttcacgtcattattggctcaactttcctcactatctgcttcatccgccaactaatatttcactttacatccaaacatcactttggcttcgaagccgccgcctgatactggcattttgtagatgtggtttgactatttctgtatgtctccatctattgatgagggtcttactcttttagtataaatagtaccgttaacttccaattaactagttttgacaacattcaaaaaagagtaataaacttcgccttaattttaataatcaacaccctcctagccttactactaataattattacattttgactaccacaactcaacggctacatagaaaaatccaccccttacgagtgcggcttcgaccctatatcccccgcccgcgtccctttctccataaaattcttcttagtagctattaccttcttattatttgatctagaaattgccctccttttacccctaccatgagccctacaaacaactaacctgccactaatagttatgtcatccctcttattaatcatcatcctagccctaagtctggcctatgagtgactacaaaaaggattagactgaaccgaattggtatatagtttaaacaaaacgaatgatttcgactcattaaattatgataatcatatttaccaaatgcccctcatttacataaatattatactagcatttaccatctcacttctaggaatactagtatatcgctcacacctcatatcctccctactatgcctagaaggaataatactatcgctgttcattatagctactctcataaccctcaacacccactccctcttagccaatattgtgcctattgccatactagtctttgccgcctgcgaagcagcggtgggcctagccctactagtctcaatctccaacacatatggcctagactacgtacataacctaaacctactccaatgctaaaactaatcgtcccaacaattatattactaccactgacatgactttccaaaaaacacataatttgaatcaacacaaccacccacagcctaattattagcatcatccctctactattttttaaccaaatcaacaacaacctatttagctgttccccaaccttttcctccgaccccctaacaacccccctcctaatactaactacctgactcctacccctcacaatcatggcaagccaacgccacttatccagtgaaccactatcacgaaaaaaactctacctctctatactaatctccctacaaatctccttaattataacattcacagccacagaactaatcatattttatatcttcttcgaaaccacacttatccccaccttggctatcatcacccgatgaggcaaccagccagaacgcctgaacgcaggcacatacttcctattctacaccctagtaggctcccttcccctactcatcgcactaatttacactcacaacaccctaggctcactaaacattctactactcactctcactgcccaagaactatcaaactcctgagccaacaacttaatatgactagcttacacaatagcttttatagtaaagatacctctttacggactccacttatgactccctaaagcccatgtcgaagcccccatcgctgggtcaatagtacttgccgcagtactcttaaaactaggcggctatggtataatacgcctcacactcattctcaaccccctgacaaaacacatagcctaccccttccttgtactatccctatgaggcataattataacaagctccatctgcctacgacaaacagacctaaaatcgctcattgcatactcttcaatcagccacatagccctcgtagtaacagccattctcatccaaaccccctgaagcttcaccggcgcagtcattctcataatcgcccacgggcttacatcctcattactattctgcctagcaaactcaaactacgaacgcactcacagtcgcatcataatcctctctcaaggacttcaaactctactcccactaatagctttttgatgacttctagcaagcctcgctaacctcgccttaccccccactattaacctactgggagaactctctgtgctagtaaccacgttctcctgatcaaatatcactctcctacttacaggactcaacatactagtcacagccctatactccctctacatatttaccacaacacaatggggctcactcacccaccacattaacaacataaaaccctcattcacacgagaaaacaccctcatgttcatacacctatcccccattctcctcctatccctcaaccccgacatcattaccgggttttcctcttgtaaatatagtttaaccaaaacatcagattgtgaatctgacaacagaggcttacgaccccttatttaccgagaaagctcacaagaactgctaactcatgcccccatgtctaacaacatggctttctcaacttttaaaggataacagctatccattggtcttaggccccaaaaattttggtgcaactccaaataaaagtaataaccatgcacactactataaccaccctaaccctgacttccctaattccccccatccttaccaccctcgttaaccctaacaaaaaaaactcatacccccattatgtaaaatccattgtcgcatccacctttattatcagtctcttccccacaacaatattcatgtgcctagaccaagaagttattatctcgaactgacactgagccacaacccaaacaacccagctctccctaagcttcaaactagactacttctccataatattcatccctgtagcattgttcgttacatggtccatcatagaattctcactgtgatatataaactcagacccaaacattaatcagttcttcaaatatctactcatcttcctaattaccatactaatcttagttaccgctaacaacctattccaactgttcatcggctgagagggcgtaggaattatatccttcttgctcatcagttgatgatacgcccgagcagatgccaacacagcagccattcaagcaatcctatacaaccgtatcggcgatatcggtttcatcctcgccttagcatgatttatcctacactccaactcatgagacccacaacaaatagcccttctaaacgctaatccaagcctcaccccactactaggcctcctcctagcagcagcaggcaaatcagcccaattaggtctccacccctgactcccctcagccatagaaggccccaccccagtctcagccctactccactcaagcactatagttgtagcaggaatcttcttactcatccgcttccaccccctagcagaaaatagcccactaatccaaactctaacactatgcttaggcgctatcaccactctgttcgcagcagtctgcgcccttacacaaaatgacatcaaaaaaatcgtagccttctccacttcaagtcaactaggactcataatagttacaatcggcatcaaccaaccacacctagcattcctgcacatctgtacccacgccttcttcaaagccatactatttatgtgctccgggtccatcatccacaaccttaacaatgaacaagatattcgaaaaataggaggactactcaaaaccatacctctcacttcaacctccctcaccattggcagcctagcattagcaggaatacctttcctcacaggtttctactccaaagaccacatcatcgaaaccgcaaacatatcatacacaaacgcctgagccctatctattactctcatcgctacctccctgacaagcgcctatagcactcgaataattcttctcaccctaacaggtcaacctcgcttccccacccttactaacattaacgaaaataaccccaccctactaaaccccattaaacgcctggcagccggaagcctattcgcaggatttctcattactaacaacatttcccccgcatcccccttccaaacaacaatccccctctacctaaaactcacagccctcgctgtcactttcctaggacttctaacagccctagacctcaactacctaaccaacaaacttaaaataaaatccccactatgcacattttatttctccaacatactcggattctaccctagcatcacacaccgcacaatcccctatctaggccttcttacgagccaaaacctgcccctactcctcctagacctaacctgactagaaaagctattacctaaaacaatttcacagcaccaaatctccacctccatcatcacctcaacccaaaaaggcataattaaactttacttcctctctttcttcttcccactcatcctaaccctactcctaatcacataacctattcccccgagcaatctcaattacaatatatacaccaacaaacaatgttcaaccagtaactactactaatcaacgcccataatcatacaaagcccccgcgccaataggatcctcccgaatcaaccctgacccctctccttcataaattattcagcttcctacactattaaagtttaccacaaccaccaccccatcatactctttcacccacagcaccaatcctacctccatcgctaaccccactaaaacactcaccaagacctcaacccctgacccccatgcctcaggatactcctcaatagccatcgctgtagtatatccaaagacaaccatcattccccctaaataaattaaaaaaactattaaacccatataacctcccccaaaattcagaataataacacacccgaccacaccgctaacaatcaatactaaacccccataaataggagaaggcttagaagaaaaccccacaaaccccattactaaacccacactcaacagaaacaaagcatacatcattattctcgcacggactacaaccacgaccaatgatatgaaaaaccatcgttgtatttcaactacaagaacaccaatgaccccaatacgcaaaactaaccccctaataaaattaattaaccactcattcatcgacctccccaccccatccaacatctccgcatgatgaaacttcggctcactccttggcgcctgcctgatcctccaaatcaccacaggactattcctagccatgcactactcaccagacgcctcaaccgccttttcatcaatcgcccacatcactcgagacgtaaattatggctgaatcatccgctaccttcacgccaatggcgcctcaatattctttatctgcctcttcctacacatcgggcgaggcctatattacggatcatttctctactcagaaacctgaaacatcggcattatcctcctgcttgcaactatagcaacagccttcataggctatgtcctcccgtgaggccaaatatcattctgaggggccacagtaattacaaacttactatccgccatcccatacattgggacagacctagttcaatgaatctgaggaggctactcagtagacagtcccaccctcacacgattctttacctttcacttcatcttgcccttcattattgcagccctagcagcactccacctcctattcttgcacgaaacgggatcaaacaaccccctaggaatcacctcccattccgataaaatcaccttccacccttactacacaatcaaagacgccctcggcttacttctcttccttctctccttaatgacattaacactattctcaccagacctcctaggcgacccagacaattataccctagccaaccccttaaacacccctccccacatcaagcccgaatgatatttcctattcgcctacacaattctccgatccgtccctaacaaactaggaggcgtccttgccctattactatccatcctcatcctagcaataatccccatcctccatatatccaaacaacaaagcataatatttcgcccactaagccaatcactttattgactcctagccgcagacctcctcattctaacctgaatcggaggacaaccagtaagctacccttttaccatcattggacaagtagcatccgtactatacttcacaacaatcctaatcctaataccaactatctccctaattgaaaacaaaatactcaaatgggcctgtccttgtagtataaactaatacaccagtcttgtaaaccggagatgaaaacctttttccaaggacaaatcagagaaaaagtctttaactccaccattagcacccaaagctaagattctaatttaaactattctctgttctttcatggggaagcagatttgggtaccacccaagtattgactcacccatcaacaaccgctatgtatttcgtacattactgccagccaccatgaatattgtacggtaccataaatacttgaccacctgtagtacataaaaacccaatccacatcaaaaccccctccccatgcttacaagcaagtacagcaatcaaccctcaactatcacacatcaactgcaactccaaagccacccctcacccactaggataccaacaaacctacccacccttaacagtacatagtacataaagccatttaccgtacatagcacattacagtcaaatcccttctcgtccccatggatgacccccctcagataggggtcccttgaccaccatcctccgtgaaatcaatatcccgcacaagagtgctactctcctcgctccgggcccataacacttgggggtagctaaagtgaactgtatccgacatctggttcctacttcagggccataaagcctaaatagcccacacgttccccttaaataagacatcacgatg

SEQ ID NO: 328 - DNA, 16569 bp, Homo sapiens mitochondrial
  3108: "n" refers to a nucleotide at position 3107 of the Cambridge Reference Sequence (CRS, Anderson et al. 1981 Nature 290:457-465), later determined to be absent from the human mtDNA sequence according to the revised CRS (rCRS, Andrews et al. 1999 Nature Genetics 23:147); "n" therefore represents a single nucleotide deletion at a position corresponding to nucleotide 3107 of SEQ ID NO:1 as provided herein.
gatcacaggtctatcaccctattaaccactcacgggagctctccatgcatttggtattttcgtctggggggtgtgcacgcgatagcattgcgagacgctggagccggagcaccctatgtcgcagtatctgtctttgattcctgccccatcctattatttatcgcacctacgttcaatattacaggcgaacatacttactaaagtgtgttaattaattaatgcttgtaggacataataataacaattgaatgtctgcacagccgctttccacacagacatcataacaaaaaatttccaccaaaccccccctcccccgccttctggccacagcacttaaacacatctctgccaaaccccaaaaacaaagaaccctaacaccagcctaaccagatttcaaattttatcttttggcggtatgcacttttaacagtcaccccctaactaacacattattttcccctcccactcccatactactaatctcatcaatacaacccccgcccatcctacccagcacacacacaccgctgctaaccccataccccgaaccaaccaaaccccaaagacaccccccacagtttatgtagcttacctcctcaaagcaatacactgaaaatgtttagacgggctcacatcaccccataaacaaataggtttggtcctagcctttctattagctcttagtaagattacacatgcaagcatccccgttccagtgagttcaccctctaaatcaccacgatcaaaagggacaagcatcaagcacgcagcaatgcagctcaaaacgcttagcctagccacacccccacgggaaacagcagtgattaacctttagcaataaacgaaagtttaactaagctatactaaccccagggttggtcaatttcgtgccagccaccgcggtcacacgattaacccaagtcaatagaagccggcgtaaagagtgttttagatcaccccctccccaataaagctaaaactcacctgagttgtaaaaaactccagttgacacaaaatagactacgaaagtggctttaacatatctgaacacacaatagctaagacccaaactgggattagataccccactatgcttagccctaaacctcaacagttaaatcaacaaaactgctcgccagaacactacgagccacagcttaaaactcaaaggacctggcggtgcttcatatccctctagaggagcctgttctgtaatcgataaaccccgatcaacctcaccacctcttgctcagcctatataccgccatcttcagcaaaccctgatgaaggctacaaagtaagcgcaagtacccacgtaaagacgttaggtcaaggtgtagcccatgaggtggcaagaaatgggctacattttctaccccagaaaactacgatagcccttatgaaacttaagggtcgaaggtggatttagcagtaaactgagagtagagtgcttagttgaacagggccctgaagcgcgtacacaccgcccgtcaccctcctcaagtatacttcaaaggacatttaactaaaacccctacgcatttatatagaggagacaagtcgtaacatggtaagtgtactggaaagtgcacttggacgaaccagagtgtagcttaacacaaagcacccaacttacacttaggagatttcaacttaacttgaccgctctgagctaaacctagccccaaacccactccaccttactaccagacaaccttagccaaaccatttacccaaataaagtataggcgatagaaattgaaacctggcgcaatagatatagtaccgcaagggaaagatgaaaaattataaccaagcataatatagcaaggactaacccctataccttctgcataatgaattaactagaaataactttgcaaggagagccaaagctaagacccccgaaaccagacgagctacctaagaacagctaaaagagcacacccgtctatgtagcaaaatagtgggaagatttataggtagaggcgacaaacctaccgagcctggtgatagctggttgtccaagatagaatcttagttcaactttaaatttgcccacagaaccctctaaatccccttgtaaatttaactgttagtccaaagaggaacagctctttggacactaggaaaaaaccttgtagagagagtaaaaaatttaacacccatagtaggcctaaaagcagccaccaattaagaaagcgttcaagctcaacacccactacctaaaaaatcccaaacatataactgaactcctcacacccaattggaccaatctatcaccctatagaagaactaatgttagtataagtaacatgaaaacattctcctccgcataagcctgcgtcagattaaaacactgaactgacaattaacagcccaatatctacaatcaaccaacaagtcattattaccctcactgtcaacccaacacaggcatgctcataaggaaaggttaaaaaaagtaaaaggaactcggcaaatcttaccccgcctgtttaccaaaaacatcacctctagcatcaccagtattagaggcaccgcctgcccagtgacacatgtttaacggccgcggtaccctaaccgtgcaaaggtagcataatcacttgttccttaaatagggacctgtatgaatggctccacgagggttcagctgtctcttacttttaaccagtgaaattgacctgcccgtgaagaggcgggcatgacacagcaagacgagaagaccctatggagctttaatttattaatgcaaacagtacctaacaaacccacaggtcctaaactaccaaacctgcattaaaaatttcggttggggcgacctcggagcagaacccaacctccgagcagtacatgctaagacttcaccagtcaaagcgaactactatactcaattgatccaataacttgaccaacggaacaagttaccctagggataacagcgcaatcctattctagagtccatatcaacaatagggtttacgacctcgatgttggatcaggacatcccgatggtgcagccgctattaaaggttcgtttgttcaacgattaaagtcctacgtgatctgagttcagaccggagtaatccaggtcggtttctatctacnttcaaattcctccctgtacgaaaggacaagagaaataaggcctacttcacaaagcgccttcccccgtaaatgatatcatctcaacttagtattatacccacacccacccaagaacagggtttgttaagatggcagagcccggtaatcgcataaaacttaaaactttacagtcagaggttcaattcctcttcttaacaacatacccatggccaacctcctactcctcattgtacccattctaatcgcaatggcattcctaatgcttaccgaacgaaaaattctaggctatatacaactacgcaaaggccccaacgttgtaggcccctacgggctactacaacccttcgctgacgccataaaactcttcaccaaagagcccctaaaacccgccacatctaccatcaccctctacatcaccgccccgaccttagctctcaccatcgctcttctactatgagcccccctccccatacccaaccccctggtcaacctcaacctaggcctcctatttattctagccacctctagcctagccgtttactcaatcctctgatcagggtgagcatcaaactcaaactacgccctgatcggcgcactgcgagcagtagcccaaacaatctcatatgaagtcaccctagccatcattctactatcaacattactaataagtggctcctttaacctctccacccttatcacaacacaagaacacctctgattactcctgccatcatgacccttggccataatatgatttatctccacactagcagagaccaaccgaacccccttcgaccttgccgaaggggagtccgaactagtctcaggcttcaacatcgaatacgccgcaggccccttcgccctattcttcatagccgaatacacaaacattattataataaacaccctcaccactacaatcttcctaggaacaacatatgacgcactctcccctgaactctacacaacatattttgtcaccaagaccctacttctaacctccctgttcttatgaattcgaacagcatacccccgattccgctacgaccaactcatacacctcctatgaaaaaacttcctaccactcaccctagcattacttatatgatatgtctccatacccattacaatctccagcattccccctcaaacttaagaaatatgtctgataaaagagttactttgatagagtaaataataggagcttaaacccccttatttctaggactatgagaatcgaacccatccctgagaatccaaaattctccgtgccacctatcacaccccatcctaaagtaaggtcagctaaataagctatcgggcccataccccgaaaatgttggttatacccttcccgtactaattaatcccctggcccaacccgtcatctactctaccatctttgcaggcacactcatcacagcgctaagctcgcactgattttttacctgagtaggcctagaaataaacatgctagcttttattccagttctaaccaaaaaaataaaccctcgttccacagaagctgccatcaagtatttcctcacgcaagcaaccgcatccataatccttctaatagctatcctcttcaacaatatactctccggacaatgaaccataaccaatactaccaatcaatactcatcattaataatcataatggctatagcaataaaactaggaatagccccctttcacttctgagtcccagaggttacccaaggcacccctctgacatccggcctgcttcttctcacatgacaaaaactagcccccatctcaatcatataccaaatctctccctcactaaacgtaagccttctcctcactctctcaatcttatccatcatagcaggcagttgaggtggattaaaccaaacccagctacgcaaaatcttagcatactcctcaattacccacataggatgaataatagcagttctaccgtacaaccctaacataaccattcttaatttaactatttatattatcctaactactaccgcattcctactactcaacttaaactccagcaccacgaccctactactatctcgcacctgaaacaagctaacatgactaacacccttaattccatccaccctcctctccctaggaggcctgcccccgctaaccggctttttgcccaaatgggccattatcgaagaattcacaaaaaacaatagcctcatcatccccaccatcatagccaccatcaccctccttaacctctacttctacctacgcctaatctactccacctcaatcacactactccccatatctaacaacgtaaaaataaaatgacagtttgaacatacaaaacccaccccattcctccccacactcatcgcccttaccacgctactcctacctatctccccttttatactaataatcttatagaaatttaggttaaatacagaccaagagccttcaaagccctcagtaagttgcaatacttaatttctgtaacagctaaggactgcaaaaccccactctgcatcaactgaacgcaaatcagccactttaattaagctaagcccttactagaccaatgggacttaaacccacaaacacttagttaacagctaagcaccctaatcaactggcttcaatctacttctcccgccgccgggaaaaaaggcgggagaagccccggcaggtttgaagctgcttcttcgaatttgcaattcaatatgaaaatcacctcggagctggtaaaaagaggcctaacccctgtctttagatttacagtccaatgcttcactcagccattttacctcacccccactgatgttcgccgaccgttgactattctctacaaaccacaaagacattggaacactatacctattattcggcgcatgagctggagtcctaggcacagctctaagcctccttattcgagccgagctgggccagccaggcaaccttctaggtaacgaccacatctacaacgttatcgtcacagcccatgcatttgtaataatcttcttcatagtaatacccatcataatcggaggctttggcaactgactagttcccctaataatcggtgcccccgatatggcgtttccccgcataaacaacataagcttctgactcttacctccctctctcctactcctgctcgcatctgctatagtggaggccggagcaggaacaggttgaacagtctaccctcccttagcagggaactactcccaccctggagcctccgtagacctaaccatcttctccttacacctagcaggtgtctcctctatcttaggggccatcaatttcatcacaacaattatcaatataaaaccccctgccataacccaataccaaacgcccctcttcgtctgatccgtcctaatcacagcagtcctacttctcctatctctcccagtcctagctgctggcatcactatactactaacagaccgcaacctcaacaccaccttcttcgaccccgccggaggaggagaccccattctataccaacacctattctgatttttcggtcaccctgaagtttatattcttatcctaccaggcttcggaataatctcccatattgtaacttactactccggaaaaaaagaaccatttggatacataggtatggtctgagctatgatatcaattggcttcctagggtttatcgtgtgagcacaccatatatttacagtaggaatagacgtagacacacgagcatatttcacctccgctaccataatcatcgctatccccaccggcgtcaaagtatttagctgactcgccacactccacggaagcaatatgaaatgatctgctgcagtgctctgagccctaggattcatctttcttttcaccgtaggtggcctgactggcattgtattagcaaactcatcactagacatcgtactacacgacacgtactacgttgtagctcacttccactatgtcctatcaataggagctgtatttgccatcataggaggcttcattcactgatttcccctattctcaggctacaccctagaccaaacctacgccaaaatccatttcactatcatattcatcggcgtaaatctaactttcttcccacaacactttctcggcctatccggaatgccccgacgttactcggactaccccgatgcatacaccacatgaaacatcctatcatctgtaggctcattcatttctctaacagcagtaatattaataattttcatgatttgagaagccttcgcttcgaagcgaaaagtcctaatagtagaagaaccctccataaacctggagtgactatatggatgccccccaccctaccacacattcgaagaacccgtatacataaaatctagacaaaaaaggaaggaatcgaaccccccaaagctggtttcaagccaaccccatggcctccatgactttttcaaaaaggtattagaaaaaccatttcataactttgtcaaagttaaattataggctaaatcctatatatcttaatggcacatgcagcgcaagtaggtctacaagacgctacttcccctatcatagaagagcttatcacctttcatgatcacgccctcataatcattttccttatctgcttcctagtcctgtatgcccttttcctaacactcacaacaaaactaactaatactaacatctcagacgctcaggaaatagaaaccgtctgaactatcctgcccgccatcatcctagtcctcatcgccctcccatccctacgcatcctttacataacagacgaggtcaacgatccctcccttaccatcaaatcaattggccaccaatggtactgaacctacgagtacaccgactacggcggactaatcttcaactcctacatacttcccccattattcctagaaccaggcgacctgcgactccttgacgttgacaatcgagtagtactcccgattgaagcccccattcgtataataattacatcacaagacgtcttgcactcatgagctgtccccacattaggcttaaaaacagatgcaattcccggacgtctaaaccaaaccactttcaccgctacacgaccgggggtatactacggtcaatgctctgaaatctgtggagcaaaccacagtttcatgcccatcgtcctagaattaattcccctaaaaatctttgaaatagggcccgtatttaccctatagcaccccctctaccccctctagagcccactgtaaagctaacttagcattaaccttttaagttaaagattaagagaaccaacacctctttacagtgaaatgccccaactaaatactaccgtatggcccaccataattacccccatactccttacactattcctcatcacccaactaaaaatattaaacacaaactaccacctacctccctcaccaaagcccataaaaataaaaaattataacaaaccctgagaaccaaaatgaacgaaaatctgttcgcttcattcattgcccccacaatcctaggcctacccgccgcagtactgatcattctatttccccctctattgatccccacctccaaatatctcatcaacaaccgactaatcaccacccaacaatgactaatcaaactaacctcaaaacaaatgataaccatacacaacactaaaggacgaacctgatctcttatactagtatccttaatcatttttattgccacaaccaacctcctcggactcctgcctcactcatttacaccaaccacccaactatctataaacctagccatggccatccccttatgagcgggcgcagtgattataggctttcgctctaagattaaaaatgccctagcccacttcttaccacaaggcacacctacaccccttatccccatactagttattatcgaaaccatcagcctactcattcaaccaatagccctggccgtacgcctaaccgctaacattactgcaggccacctactcatgcacctaattggaagcgccaccctagcaatatcaaccattaaccttccctctacacttatcatcttcacaattctaattctactgactatcctagaaatcgctgtcgccttaatccaagcctacgttttcacacttctagtaagcctctacctgcacgacaacacataatgacccaccaatcacatgcctatcatatagtaaaacccagcccatgacccctaacaggggccctctcagccctcctaatgacctccggcctagccatgtgatttcacttccactccataacgctcctcatactaggcctactaaccaacacactaaccatataccaatgatggcgcgatgtaacacgagaaagcacataccaaggccaccacacaccacctgtccaaaaaggccttcgatacgggataatcctatttattacctcagaagtttttttcttcgcaggatttttctgagccttttaccactccagcctagcccctaccccccaattaggagggcactggcccccaacaggcatcaccccgctaaatcccctagaagtcccactcctaaacacatccgtattactcgcatcaggagtatcaatcacctgagctcaccatagtctaatagaaaacaaccgaaaccaaataattcaagcactgcttattacaattttactgggtctctattttaccctcctacaagcctcagagtacttcgagtcttccttcaccatttccgacggcatctacggctcaacattttttgtagccacaggcttccacggacttcacgtcattattggctcaactttcctcactatctgcttcatccgccaactaatatttcactttacatccaaacatcactttggcttcgaagccgccgcctgatactggcattttgtagatgtggtttgactatttctgtatgtctccatctattgatgagggtcttactcttttagtataaatagtaccgttaacttccaattaactagttttgacaacattcaaaaaagagtaataaacttcgccttaattttaataatcaacaccctcctagccttactactaataattattacattctgactaccacaactcaacggctacatagaaaaatccaccccttacgagtgcggcttcgaccctatatcccccgcccgcgtccctttctccataaaattcttcttagtagctattaccttcttattatttgatctagaaattgccctccttttacccctaccatgagccctacaaacaactaacctgccactaatagttatgtcatccctcttattaatcatcatcctagccctaagtctggcctatgagtgactacaaaaaggattagactgaaccgaattggtatatagtttaaacaaaacgaatgatttcgactcattaaattatgataatcatatttaccaaatgcccctcatttacataaatattatactagcatttaccatctcacttctaggaatactagtatatcgctcacacctcatatcctccctactatgcctagaaggaataatactatcgctgttcattatagctactctcataaccctcaacacccactccctcttagccaatattgtgcctattgccatactagtctttgccgcctgcgaagcagcggtgggcctagccctactagtctcaatctccaacacatatggcctagactacgtacataacctaaacctactccaatgctaaaactaatcgtcccaacaattatattactaccactgacatgactttccaaaaaacacataatttgaatcaacacaaccacccacagcctaattattagcatcatccctctactattttttaaccaaatcaacaacaacctatttagctgttccccaaccttttcctccgaccccctaacaacccccctcctaatactaactacctgactcctacccctcacaatcatggcaagccaacgccacttatccagtgaaccactatcacgaaaaaaactctacctctctatactaatctccctacaaatctccttaattataacattcacagccacagaactaatcatattttatatcttcttcgaaaccacacttatccccaccttggctatcatcacccgatgaggcaaccagccagaacgcctgaacgcaggcacatacttcctattctacaccctagtaggctcccttcccctactcatcgcactaatttacactcacaacaccctaggctcactaaacattctactactcactctcactgcccaagaactatcaaactcctgagccaacaacttaatatgactagcttacacaatagcttttatagtaaagatacctctttacggactccacttatgactccctaaagcccatgtcgaagcccccatcgctgggtcaatagtacttgccgcagtactcttaaaactaggcggctatggtataatacgcctcacactcattctcaaccccctgacaaaacacatagcctaccccttccttgtactatccctatgaggcataattataacaagctccatctgcctacgacaaacagacctaaaatcgctcattgcatactcttcaatcagccacatagccctcgtagtaacagccattctcatccaaaccccctgaagcttcaccggcgcagtcattctcataattgcccacggacttacatcctcattactattctgcctagcaaactcaaactacgaacgcactcacagtcgcatcataatcctctctcaaggacttcaaactctactcccactaatagctttttgatgacttctagcaagcctcgctaacctcgccttaccccccactattaacctactgggagaactctctgtgctagtaaccacgttctcctgatcaaatatcactctcctacttacaggactcaacatactagtcacagccctatactccctctacatatttaccacaacacaatggggctcactcacccaccacattaacaacataaaaccctcattcacacgagaaaacaccctcatgttcatacacctatcccccattctcctcctatccctcaaccccgacatcattaccgggttttcctcttgtaaatatagtttaaccaaaacatcagattgtgaatctgacaacagaggcttacgaccccttatttaccgagaaagctcacaagaactgctaactcatgcccccatgtctaacaacatggctttctcaacttttaaaggataacagctatccattggtcttaggccccaaaaattttggtgcaactccaaataaaagtaataaccatgcacactactataaccaccctaaccctgacttccctaattccccccatccttaccaccctcgttaaccctaacaaaaaaaactcatacccccattatgtaaaatccattgtcgcatccacctttattatcagtctctttcccacaacaatattcatgtgcctagaccaagaagttattatctcgaactgacactgagccacaacccaaacaacccagctctccctaagcttcaaactagactacttctccataatattcatccctgtagcattgttcgttacatggtccatcatagaattctcactgtgatatataaactcagacccaaacattaatcagttcttcaaatatctactcatcttcctaattaccatactaatcttagttaccgctaacaacctattccaactgttcatcggctgagagggcgtaggaattatatccttcttgctcatcagttgatgatacgcccgagcagatgccaacacagcagccattcaagcaatcctatacaaccgtatcggcgatatcggtttcatcctcgccttagcatgatttatcctacactccaactcatgagacccacaacaaatagcccttctaaacgctaatccaagcctcaccccactactaggcctcctcctagcagcagcaggcaaatcagcccaattaggtctccacccctgactcccctcagccatagaaggccccaccccagtctcagccctactccactcaagcactatagttgtagcaggaatcttcttactcatccgcttccaccccctagcagaaaatagcccactaatccaaactctaacactatgcttaggcgctatcaccactctgttcgcagcagtctgcgcccttacacaaaatgacatcaaaaaaatcgtagccttctccacttcaagtcaactaggactcataatagttacaatcggcatcaaccaaccacacctagcattcctgcacatctgtacccacgccttcttcaaagccatactatttatgtgctccgggtccatcatccacaaccttaacaatgaacaagatattcgaaaaataggaggactactcaaaaccatgcctctcacttcaacctccctcaccattggcagcctagcattagcaggaatacctttcctcacaggtttctactccaaagaccacatcatcgaaaccgcaaacatatcatacacaaacgcctgagccctatctattactctcatcgctacctccctgacaagcgcctatagcactcgaataattcttctcaccctaacaggtcaacctcgcttccccacccttactaacattaacgaaaataaccccaccctactaaaccccattaaacgcctggcagccggaagcctattcgcaggatttctcattactaacaacatttcccccgcatcccccttccaaacaacaatccccctctacctaaaactcacagccctcgctgtcactttcctaggacttctaacagccctagacctcaactacctaaccaacaaacttaaaataaaatccccactatgcacattttatttctccaacatactcggattctaccctagcatcacacaccgcacaatcccctatctaggccttcttacgagccaaaacctgcccctactcctcctagacctaacctgactagaaaagctattacctaaaacaatttcacagcaccaaatctccacctccatcatcacctcaacccaaaaaggcataattaaactttacttcctctctttcttcttcccactcatcctaaccctactcctaatcacataacctattcccccgagcaatctcaattacaatatatacaccaacaaacaatgttcaaccagtaactactactaatcaacgcccataatcatacaaagcccccgcaccaataggatcctcccgaatcaaccctgacccctctccttcataaattattcagcttcctacactattaaagtttaccacaaccaccaccccatcatactctttcacccacagcaccaatcctacctccatcgctaaccccactaaaacactcaccaagacctcaacccctgacccccatgcctcaggatactcctcaatagccatcgctgtagtatatccaaagacaaccatcattccccctaaataaattaaaaaaactattaaacccatataacctcccccaaaattcagaataataacacacccgaccacaccgctaacaatcaatactaaacccccataaataggagaaggcttagaagaaaaccccacaaaccccattactaaacccacactcaacagaaacaaagcatacatcattattctcgcacggactacaaccacgaccaatgatatgaaaaaccatcgttgtatttcaactacaagaacaccaatgaccccaatacgcaaaattaaccccctaataaaattaattaaccactcattcatcgacctccccaccccatccaacatctccgcatgatgaaacttcggctcactccttggcgcctgcctgatcctccaaatcaccacaggactattcctagctatgcactactcaccagacgcctcaaccgccttttcatcaatcgcccacatcactcgagacgtaaattatggctgaatcatccgctaccttcacgccaatggcgcctcaatattctttatctgcctcttcctacacatcgggcgaggcctatattacggatcatttctctactcagaaacctgaaacatcggcattatcctcctgcttgcaactatagcaacagccttcataggctatgtcctcccgtgaggccaaatatcattctgaggggccacagtaattacaaacttactatccgccatcccatacattgggacagacctagttcaatgaatctgaggaggctactcagtagacagtcccaccctcacacgattctttacctttcacttcatcttgcccttcattattgcagccctagcagcactccacctcctattcttgcacgaaacgggatcaaacaaccccctaggaatcacctcccattccgataaaatcaccttccacccttactacacaatcaaagacgccctcggcttacttctcttccttctctccttaatgacattaacactattctcaccagacctcctaggcgacccagacaattataccctagccaaccccttaaacacccctccccacatcaagcccgaatgatatttcctattcgcctacacaattctccgatccgtccctaacaaactaggaggcgtccttgccctattactatccatcctcatcctagcaataatccccatcctccatatatccaaacaacaaagcataatatttcgcccactaagccaatcactttattgactcctagccgcagacctcctcattctaacctgaatcggaggacaaccagtaagctacccttttaccatcattggacaagtagcatccgtactatacttcacaacaatcctaatcctaataccaactatctccctaattgaaaacaaaatactcaaatgggcctgtccttgtagtataaactaatacaccagtcttgtaaaccggagatgaaaacctttttccaaggacaaatcagagaaaaagtctttaactccaccattagcacccaaagctaagattctaatttaaactattctctgttctttcatggggaagcagatttgggtgccacccaagtattgactcacccatcaacaaccgctatgtatttcgtacattactgccagccaccatgaatattgtacggtaccataaatacttgaccacctgtagtacataaaaacccaatccacatcaaaactcccccccatgcttacaagcaagtacagcaatcaaccctcaactatcacacatcaactgcaactccaaagccacccctcacccactaggataccaacaaacctacccacccttaacagtacatagtacataaagccatctaccgtacatagcacattacagtcaaatcccttctcgtccccatggatgacccccctcagataggggtcccttgaccaccatcctccgtgaaatcaatatcccgcacaagagtgctactctcctcgctccgggcccataacacttgggggtagctaaagtgaactgtatccgacatctggttcctacttcagggtcataaagcctaaatagcccacacgttccccttaaataagacatcacgatg

SEQ ID NO: 329 - DNA, 16570 bp, Homo sapiens mitochondrial
  3106: "n" refers to a nucleotide at position 3107 of the Cambridge Reference Sequence (CRS, Anderson et al. 1981 Nature 290:457-465), later determined to be absent from the human mtDNA sequence according to the revised CRS (rCRS, Andrews et al. 1999 Nature Genetics 23:147); "n" therefore represents a single nucleotide deletion at a position corresponding to nucleotide 3107 of SEQ ID NO:1 as provided herein.
gatcacaggtctatcaccctattaaccactcacgggagctctccatgcatttggtattttcgtctggggggtgtgcacgcgatagcattgcgagacgctggagccggagcaccctatgtcgcagtatctgtctttgattcctgcctcatctcattatttatcgcacctacgttcaatattataggagaccatacctattaaagtgtgttaattaattaatgcttgtaggacataataataacaattaaatgtctgcacagccgctttccacacagacatcataacaaaaaatttccgccaaaccccccctcccccgcattctggccacagcacttaaacacatctctgccaaaccccaaaaacaaagaaccctaacaccagcctaaccagatttcaaattttatcttttggcggtatgcacttttaacagtcaccccccaactaacacattattttcccctcccactcccatactactaatctcatcaatacaacccccgcccatcctacccagcacacacaccgctgctaaccccataccccgaaccaaccaaaccccaaagacaccccccacagtttatgtagcttacctcctcaaagcaatacactgaaaatgtttagacgggctcacatcaccccataaacaaataggtttggtcctagcctttctattagctcttagtaagattacacatgcaagcatccccgttccagtgagttcaccctctaaatcaccacgatcaaaagggacaagcatcaagcacgcaacaatgcagctcaaaacgcttagcctagccacacccccacgggaaacagcagtgataaacctttagcaataaacgaaagtttaactaagctatactaaccccagggttggtcaatttcgtgccagccaccgcggtcacacgattaacccaagtcaatagaagccggcgtaaagagtgttttagatcaccccctccccaataaagctaaaactcacctgagttgtaaaaaactccagttgacacaaaataaactacgaaagtggctttaacatatctgaacacacaatagctaagacccaaactgggattagataccccactatgcttagccctaaacctcaacagttaaatcaacaaaactgctcgccagaacactacgagccacagcttaaaactcaaaggacctggcggtgcttcatatccctctagaggagcctgttctgtaatcgataaaccccgatcaacctcaccacctcttgctcagcctatataccgccatcttcagcaaaccctgatgaaggctacaaagtaagcgcaagtacccacgtaaagacgttaggtcaaggtgtagcccatgaggtggcaagaaatgggctacattttctaccccagaaaactacgatagcccttatgaaacttaagggtcgaaggcggatttagcagtaaactgagagtagagtgcttagttgaacagggccctgaagcgcgtacacaccgcccgtcaccctcctcaagtatacttcaaaggacatttaactaaaacccctacgcatttatatagaggagacaagtcgtaacatggtaagtgtactggaaagtgcacttggacgaaccagagtgtagcttaacacaaagcacccaacttacacttaggagatttcaacttaacttgaccgctctgagctaaacctagccccaaacccactccaccttactaccagacaaccttagccaaaccatttacccaaataaagtataggcgatagaaattgaaacctggcgcaatagatatagtaccgcaagggaaagatgaaaaattataaccaagcataatatagcaaggactaacccctataccttctgcataatgaattaactagaaataactttgcaaggagagccaaagctaagacccccgaaaccagacgagctacctaagaacagctaaaagagcacacccgtctatgtagcaaaatagtgggaagatttataggtagaggcgacaaacctaccgagcctggtgatagctggttgtccaagatagaatcttagttcaactttaaatttgcccacagaaccctctaaatccccttgtaaatttaactgttagtccaaagaggaacagctctttggacactaggaaaaaaccttgtagagagagtaaaaaatattaacacccatagtaggcctaaaagcagccaccaattaagaaagcgttcaagctcaacacccactacctaaaaaatcccaaacatataactgaactcctcacacccaattggaccaatctatcaccctatagaagaactaatgttagtataagtaacatgaaaacattctcctccgcataagcctgcgtcagattaaaacactgaactgacaattaacagcccaatatctacaatcaccaacaagtcattattaccctcactgtcaacccaacacaggcatgctcataaggaaaggttaaaaaaagtaaaaggaactcggcaaatcttaccccgcctgtttaccaaaaacatcacctctagcatcaccagtattagaggcaccgcctgcccagtgacacatgtttaacggccgcggtaccctaaccgtgcaaaggtagcataatcacttgttccttaaatagggacctgtatgaatggctccacgagggttcagctgtctcttacttttaaccagtgaaattgacctgcccgtgaagaggcgggcatgacacagcaagacgagaagaccctatggagctttaatttattaatgcaaacaatacctaacaaacccacaggtcctaaactaccaaacctgcattaaaaatttcggttggggcgacctcggagcagaacccaacctccgagcagtacatgctaagacttcaccagtcaaagcgaactaccatactcaattgatccaataacttgaccaacggaacaagttaccctagggataacagcgcaatcctattctagagtccatatcaacaatagggtttacgacctcgatgttggatcaggacatcccgatggtgcagccgctattaaaggttcgtttgttcaacgattaaagtcctacgtgatctgagttcagaccggagtaatccaggtcggtttctatctacnttcaaattcctccctgtacgaaaggacaagagaaataaggcctacttcacaaagcgccttcccccgtaaatgatatcatctcaacttagtattatacccacacccacccaagaacagggtttgttaagatggcagagcccggtaatcgcataaaacttaaaactttacagtcagaggttcaattcctcttcttaacaacatacccatggccaacctcctactcctcattgtacccattctaatcgcaatggcattcctaatgcttaccgaacgaaaaattctaggctatatacaactacgcaaaggccccaacgttgtaggcccctacgggctactacaacccttcgctgacgccataaaactcttcaccaaagagcccctaaaacccgccacatctaccatcaccctctacatcaccgccccgaccttagctctcaccatcgctcttctactatgaacccccctccccatacccaaccccctggttaacctcaacctaggcctcctatttattctagccacctctagcctagccgtttactcaatcctctgatcaggatgagcatcaaactcaaactacgccctgatcggcgcactgcgagcagtagcccaaacaatctcatatgaagtcaccctagccatcattctactatcaacattactaataagcggctcctttaacctctccacccttatcacaacacaagaacacctctgattactcctgccatcatgacccttggccataatatgatttatctccacactagcagagaccaaccgaacccccttcgaccttgccgaaggggagtccgaactagtctcaggcttcaacatcgaatacgccgcaggccccttcgccctattcttcatagccgaatacacaaacattattataataaacaccctcaccactacaatcttcctaggaacaacatatgacgcactctcccctgaactctacacaacatattttgtcaccaagaccctacttctgacctccctgttcttatgaattcgaacagcatacccccgattccgctacgaccaactcatacacctcctatgaaaaaacttcctaccactcaccctagcattacttatatgatatgtctccatacccattacaatctccagcattccccctcaaacctaagaaatatgtctgataaaagagttactttgatagagtaaataataggagcttaaacccccttatttctaggactatgagaatcgaacccatccctgagaatccaaaattctccgtgccacctatcacaccccatcctaaagtaaggtcagctaaataagctatcgggcccataccccgaaaatgttggttatacccttcccgtactaattaatcccctggcccaacccgtcatctactctaccatctttgcaggcacactcatcacagcgctaagctcgcactgattttttacctgagtaggcctagaaataaacatgctagcttttattccagttctaaccaaaaaaataaaccctcgttccacagaagctgccatcaagtatttcctcacgcaagcaaccgcatccataatccttctaatagctatcctcttcaacaatatactctccggacaatgaaccataaccaatactaccaatcaatactcatcattaataatcataatggctatagcaataaaactaggaatagccccctttcacttctgagtcccagaggttacccaaggcacccctctgacatccggcctgcttcttctcacatgacaaaaactagcccccatctcaatcatataccaaatctctccctcactaaacgtaagccttctcctcactctctcaatcttatccatcatagcaggcagttgaggtggattaaaccaaacccagctacgcaaaatcttagcatactcctcaattacccacataggatgaataatagcagttctaccgtacaaccctaacataaccattcttaatttaactatttatattatcctaactactaccgcattcctactactcaacttaaactccagcaccacgaccctactactatctcgcacctgaaacaagctaacatgactaacacccttaattccatccaccctcctctccctaggaggcctgcccccactaaccggctttttgcccaaatgggccattatcgaagaattcacaaaaaacaatagcctcatcatccccaccatcatagccaccatcaccctccttaacctctacttctacctacgcctaatctactccacctcaatcacactactccccatatctaacaacgtaaaaataaaatgacagtttgaacatacaaaacccaccccattcctccccacactcatcgcccttaccacgctactcctacctatctccccttttatactaataatcttatagaaatttaggttaaatacagaccaagagccttcaaagccctcagtaagttgcaatacttaatttctgtaacagctaaggactgcaaaaccccactctgcatcaactgaacgcaaatcagccactttaattaagctaagcccttactagaccaatgggacttaaacccacaaacacttagttaacagctaagcaccctaatcaactggcttcaatctacttctcccgccgccgggaaaaaaggcgggagaagccccggcaggtttgaagctgcttcttcgaatttgcaattcaatatgaaaatcacctcggagctggtaaaaagaggcctaacccctgtctttagatttacagtccaatgcttcactcagccattttacctcacccccaccctgatgttcgccgaccgttgactattctctacaaaccacaaagacattgggacactatacctattattcggcgcatgagctggagtcctaggcacagctctaagcctccttattcgagccgagctgggccagccaggcaaccttctaggtaacgaccacatctacaacgtcatcgtcacagcccatgcatttgtaataatcttcttcatagtaatacccatcataatcggaggctttggcaactgactaattcccctaataatcggtgcccccgatatggcgtttccccgcataaacaacataagcttctgactcttacctccctctctcctactcctgctcgcatctgctacagtggaggccggagcaggaacaggttgaacagtctaccctcccttagcagggaactactcccaccctggagcctccgtagacctaaccatcttctccttacacctagcaggtgtctcctctatcttaggggccatcaatttcatcacaacaattatcaatataaaaccccctgccataacccaataccaaacgcccctcttcgtctgatccgtcctaatcacagcagtcctacttctcctatctctcccagtcctagctgctggcatcactatactactaacagaccgcaacctcaacaccaccttcttcgaccccgccggaggaggagaccccattctataccaacacctattctgatttttcggtcaccctgaagtttatattcttatcctaccaggcttcggaataatctcccatattgtaacttactactccggaaaaaaagaaccatttggatacataggtatggtctgagctatgatatcaattggcttcctagggtttatcgtgtgagcacaccatatatttacagtaggaatagacgtagacacacgagcatatttcacctccgctaccataatcatcgctatccccaccggcgtcaaagtatttagctgactcgccacactccacggaagcaatatgaaatgatctgctgcagtgctctgagccctaggattcatctttcttttcaccgtaggtggcctgactggcattgtattagcaaactcatcactagacatcgtactacacgacacgtactacgttgtagctcacttccactatgtcctatcaataggggctgtatttgccatcatagggggcttcattcactgatttcccctattctcaggctacaccctagaccaaacctacgccaaaatccatttcgctatcatattcatcggcgtaaatctaactttcttcccacaacactttctcggcctatccggaatgccccgacgttactcggactaccccgatgcatacaccacatgaaatatcctatcatctgtaggctcattcatttctctaacagcagtaatattaataattttcatgatttgagaagccttcgcttcaaagcgaaaagtcctaatagtagaagaaccctccataaacctggagtgactacatggatgccccccaccctaccacacattcgaagaacccgtatacataaaatctagacaaaaaaggaaggaatcgaaccccccaaagctggtttcaagccaaccccatggcctccatgactttttcaaaaagatattagaaaaaccatttcataactttgtcaaagttaaattataggctaaatcctatatatcttaatggcacatgcagcgcaagtaggtctacaagacgctacttcccctatcatagaagagcttatcacctttcatgatcacgccctcataatcattttccttatctgcttcctagtcctgtatgcccttttcctaacactcacaacaaaactaactaatactaacatctcagacgctcaggaaatagaaaccgtctgaactatcctgcccgccatcatcctagtcctcatcgccctcccatccctacgcatcctttacataacagacgaggtcaacgatccctcccttaccatcaaatcaattggccaccaatggtactgaacctacgagtacaccgactacggcggactaatcttcaactcctacatacttcccccattattcctagaaccaggcgacctgcgactccttgacgttgacaatcgagtagtactcccgattgaaacccccattcgtataataattacatcacaagacgtcttgcactcatgagctgtccccacattaggcttaaaaacagatgcaattcccggacgtctaaaccaaaccactttcaccgctacacgaccgggggtatactacggtcaatgctctgaaatctgtggagcaaaccacagtttcatgcccatcgtcctagaattaattcccctaaaaatctttgaaatagggcccgtatttaccctatagcaccccctctaccccctctagagcccactgtaaagctaacttagcattaaccttttaagttaaagattaagagaaccaacacctctttacagtgaaatgccccaactaaatactaccgtatggcccaccataattacccccatactccttacactattcctcatcacccaactaaaaatattaaacacaaactaccacttacctccctcaccaaagcccataaaaataaaaaattataacaaaccctgagaaccaaaatgaacgaaaatctgttcgcttcattcattgcccccacaatcctaggcctacccgccgcagtactgatcattctatttccccctctattgatccccacctccaaatatctcatcaacaaccgactaattaccacccaacaatgactaatcaaactaacctcaaaacaaatgatagccatacacaacactaaaggacgaacctgatctcttatactagtatccttaatcatttttattgccacaactaacctcctcgggctcctgcctcactcatttacaccaaccacccaactatctataaacctagccatggccatccccttatgagcgggcgcagtgattataggcttccgctctaagattaaaaatgccctagcccacttcttaccacaaggcacacctacaccccttatccccatactagttattatcgaaaccatcagcctactcattcaaccaatagccctggccgtacgcctaaccgctaacattactgcaggccacctactcatgcacctaattggaggcgccaccctagcaatatcgaccattaaccttccctctacacttatcatcttcacaattctaattctactgactatcctagaaatcgctgtcgccttaatccaagcctacgttttcacacttctagtaagcctctacctgcacgacaacacataatgacccaccaatcacatgcctatcatatagtaaaacccagcccatgacccctaacaggggccctctcagccctcctaatgacctccggcctagccatgtgatttcacttccactccataacgctcctcatactaggcctactaaccaacacactaaccatataccaatgatggcgcgatgtaacacgagaaagcacataccaaggccaccacacaccacctgtccaaaaaggccttcgatacgggataatcctatttattacctcagaagtttttttcttcgcaggatttttctgagccttttaccactccagcctagcccctaccccccaactaggagggcactggcccccaacaggcatcaccccgctaaatcccctagaagtcccactcctaaacacatccgtattactcgcatcaggagtatcaatcacctgagctcaccatagtctaatagaaaacaaccgaaaccaaataattcaagcactgcttattacaattttactgggtctctattttaccctcctacaagcctcagagtacttcgagtctcccttcaccatttccgacggcatctacggctcaacattttttgtagccacaggcttccacggacttcacgtcattattggctcaactttcctcactatctgcttcatccgccaactaatatttcactttacatccaaacatcactttggcttcgaagccgccgcctgatactggcattttgtagatgtggtttgactatttctgtatgtctccatctattgatgagggtcttactcttttagtataaatagtaccgttaacttccaattaactagttttgacaacattcaaaaaagagtaataaacttcgccttaattttaataatcaacaccctcctagccttactactaataattattacattttgactaccacaactcaacggctacatagaaaaatccaccccttacgagtgcggcttcgaccctatatcccccgcccgcgtccctttctccataaaattcttcttagtagctattaccttcttattatttgatctagaaattgccctccttttacccctaccatgagccctacaaacaactaacctgccactaatagctatgtcatccctcttattaatcatcatcctagccctaagtctggcctatgagtgactacaaaaaggattagactgagccgaattggtatatagtttaaacaaaacgaatgatttcgactcattaaattatgataatcatatttaccaaatgcccctcatttacataaatattatactagcatttaccatctcacttctaggaatactagtatatcgctcacacctcatatcctccctactatgcctagaaggaataatactatcactgttcattatagctactctcataaccctcaacacccactccctcttagccaatattgtgcctattgccatactagtctttgccgcctgcgaagcagcggtaggcctagccctactagtctcaatctccaacacatatggcctagactacgtacataacctaaacctactccaatgctaaaactaatcgtcccaacaattatattgttaccactgacatgactctccaaaaaacacataatttgaatcaacacaaccacccacagcctaattattagcatcatccccctactattttttaaccaaatcaacaacaacctatttagctgttccccaaccttttcctccgaccccctaacaacccccctcctaatactaactacctgactcctacccctcacaatcatggcaagccaacgccacttatccagtgaaccactatcacgaaaaaaactctacctctctatactaatctccctacaaatctccttaattataacattcacagccacagaactaatcatattttatatcttcttcgaaaccacacttatccccaccttggctatcatcacccgatgaggcaaccagccagaacgcctgaacgcaggcacatacttcctattctacaccctagtaggctcccttcccctactcatcgcactaatttacactcacaacaccctaggctcactaaacattctactactcactctcactgcccaagaactatcaaactcctgagccaacaacttaatatgactagcttacacaatagcttttatagtaaagatacctctttacggactccacttatgactccctaaagcccatgtcgaagcccccatcgctgggtcaatagtacttgccgcagtactcttaaaactaggcggctatggtataatacgcctcacactcattctcaaccccctgacaaaacacatagcctaccccttccttgtactatccctatgaggcataattataacaagctccatctgcctacgacaaacagacctaaaatcgctcattgcatactcttcaatcagccacatagccctcgtagtagcagccattctcatccaaaccccctgaagcttcaccggcgcagtcattctcataatcgcccacggacttacatcctcattactattctgcctagcaaactcaaactacgaacgcactcacagtcgcatcataatcctctctcaaggacttcaaactctactcccactaatagctttttgatgacttctagcaagcctcgctaacctcgccttaccccccactattaacctactgggagaactctctgtgctagtaaccacattctcctgatcaaatatcactctcctacttacaggactcaacatactagtcacagccctatactccctctacatatttaccacaacacaatggggctcactcacccaccacattaacaacataaaaccctcatttacacgagaaaacaccctcatgttcatacacctatcccccattctcctcctatccctcaaccccgacatcattaccgggttttcctcttgtaaatatagtttaaccaaaacatcagattgtgagtctgacaacagaggcttacgaccccttatttaccgagaaagctcacaagaactgctaactcatgcccccatgtctaacaacatggctttctcaacttttaaaggataacagctatccattggtcttaggccccaaaaattttggtgcaactccaaataaaagtaataaccatgcacactactataaccaccctaaccctgacttccctaattccccccatccttaccaccctcgttaaccctaacaaaaaaaactcatacccccattatgtaaaatccattgtcgcatccacctttattatcagtctcttccccacaacaatattcatgtgcctagaccaagaagttattatctcgaactgacactgagccacaacccaaacaacccagctctccctaagcttcaaactagactacttctccataatattcatccctgtagcattgttcgttacatggtccatcatagaattctcactgtgatatataaactcagacccaaacattaatcagttcttcaaatatctactcattttcctaattaccatactaatcttagttaccgctaacaacctattccaactgttcatcggctgagagggcgtaggaattatatccttcttgctcatcagttgatggtacgcccgagcagatgccaacacagcagccattcaagcaatcctatacaaccgtatcggcgatatcggtttcatcctcgccttagcatgatttatcctacactccaactcatgagacccacaacaaatagcccttctaaacgctaatccaagcctcaccccactactaggcctcctcctagcagcagcaggcaaatcagcccaattaggtctccacccctgactcccctcagccatagaaggccccaccccagtctcagccctactccactcaagcactatagttgtagcaggagtcttcttactcatccgcttccaccccctagcagaaaatagcccgctaatccaaactctaacactatgcttaggcgctatcaccactctgttcgcagcagtctgcgcccttacacaaaatgacatcaaaaaaatcgtagccttctccacttcaagtcaactaggactcataatagttacaatcggcatcaaccaaccacacctagcattcctgcacatctgtacccacgccttcttcaaagccatactatttatgtgctccgggtccatcatccacaaccttaacaatgaacaagatattcgaaaaataggaggactactcaaaaccatacctctcacttcaacctccctcaccattggcagcctagcattagcaggaatgcctttcctcacaggtttctattccaaagaccacatcatcgaaaccgcaaacatatcatacacaaacgcctgagccctatctattactctcatcgctacctccctgacaagcgcctatagcactcgaataattcttctcaccctaacaggtcaacctcgcttccctacccttactaacattaacgaaaataaccccaccctactaaaccccattaaacgcctggcagccggaagcctattcgcaggatttctcattactaacaacatttcccccgcatcccccttccaaacaacaatccccctccacctaaaactcacagccctcgctgtcactttcctaggacttctaacagccctagacctcaactacctaaccaacaaacttaaaataaaatccccactatgcacattttatttctccaacatactcggattctaccctagcatcacacaccgcacaatcccctatctaggccttcttacgagccaaaacctgcccctactcctcctagaccaaacctgactagaaaagctattacctaaaacaatttcacagcaccaaatctccacctccatcatcacctcaacccaaaaaggcataattaaactttacttcctctctttcttcttcccactcatcctaaccctactcctaatcacataacctattcccccgagcaatctcaattacaacatatacaccaacaaacaatgttcaaccagtaactactactaatcaacgcccataatcatacaaagcccccgcaccaataggatcctcccgaatcaaccctgacccctctccttcataaattattcagcttcctacactattaaagtttaccacaaccaccaccccatcatactctttcacccacagcaccaatcctacctccatcgctaaccccactaaaacactcaccaagacctcaacccctgacccccatgcctcaggatactcctcaatagccatcgctgtagtatatccaaagacaaccatcattccccctaaataaattaaaaaaactattaaacccatataacctcccccaaaattcagaataataacacacccaaccacaccgctaacaatcaatactaaacccccataaataggagaaggcttagaagaaaaccccacaaaccccattactaaacccacactcaacagaaacaaagcatacatcattattctcgcacggactacaaccacgaccaatgatatgaaaaaccatcgttgtatttcaactacaagaacaccaatgaccccaatacgcaaaattaaccccctaataaaattaattaaccactcattcatcgacctccccaccccatccaacatctccgcatgatgaaacttcggctcactccttggcgcctgcctgatcctccaaatcaccacaggactattcctagccatgcactattcaccagacgcctcaaccgccttttcatcaatcgcccacatcactcgagacgtaaattatggctgaatcatccgctaccttcacgccaatggcgcctcaatattttttatctgcctcttcctacacatcgggcgaggcctatattacggatcatttctctactcagaaacctgaaacatcggcattatcctcctgcttgcaactatagcaacagccttcataggctatgtcctcccgtgaggccaaatatcattctgaggggccacagtaattacaaacttactatccgccatcccatacattgggacagacctagttcaatgaatctgaggaggctactcagtagacagtcccaccctcacacgattctttacctttcacttcatcttgcccttcattattgcagccctagcagcactccacctcctattcttgcacgaaacgggatcaaacaaccccctaggaatcacctcccattccgataaaatcaccttccacccttactacacaatcaaagacgccctcggcttacttctcttccttctctccttaatgacattaacactattctcaccagacctcctaggcgacccagacaattataccctagccaaccccttaaacacccctccccacatcaagcccgaatgatatttcctattcgcctacacaattctccgatccgtccctaacaaactaggaggcgtccttgccctattactatccatcctcatcctagcaataatccccatcctccatatatccaaacaacaaagcataatatttcgcccactaagccaatcactttattgactcctagccgcagacctcctcattctaacctgagtcggaggacaaccagtaagctacccctttaccatcattggacaagtagcatccgtactatacttcacaacaatcctaatcctaataccaactatctccctaattgaaaacaaaatactcaaatgggcctgtccttgtagtataaactaatacaccagtcttgtaaaccggagatgaaaacctttttccaaggacaaatcagagaaaaagtctttaactccaccattagcacccaaagctaagattctaatttaaactattctctgttctttcatggggaagcagatttgggtaccacccaagtattgactcacccatcaacaaccgctatgtatttcgtacattactgccagccaccatgaatattgtacggtaccataaatacttaaccacctgtagtacataaaaacccaatccacatcaaaaccctccccccatgcttacaagcaagtacaacaatcaaccttcaactatcacacatcaactgcaactccaaagccacccctcccccactaggatatcaacaaagctacccatccttaacagtacatagcacataaagccatttaccgtacatagcacattacagtcaaatcccttcttgtccccatggatgacccccctcagataggggtcccttggccaccatcctccgtgaaatcaatatcccgcacaagagtgctactctcctcgctccgggcccataacacttgggggtagctaaagtgaactgtatccgacatctggttcctacttcagggtcataaagtctaaatagcccacacgttccccttaaataagacatcacgatg

SEQ ID NO: 330 - DNA, 16569 bp, Homo sapiens mitochondrial
  3107: "n" refers to a nucleotide at position 3107 of the Cambridge Reference Sequence (CRS, Anderson et al. 1981 Nature 290:457-465), later determined to be absent from the human mtDNA sequence according to the revised CRS (rCRS, Andrews et al. 1999 Nature Genetics 23:147); "n" therefore represents a single nucleotide deletion at a position corresponding to nucleotide 3107 of SEQ ID NO:1 as provided herein.
gatcacaggtctatcaccctattaaccactcacgggagctctccatgcatttggtattttcgtttggggggtgtgcacgcgatagcattgcgagacgctggagccggagcaccctatgtcgcagtatctgtctttgattcctgccccatcctgttatttatcgcacctacgttcaatattacaggcgaacatacttactaaagtgtgttaattaattaatgcttgtaggacatagtaataacaattgaatgtctgcacagccgctttccacacagacatcataacaaaaaatttccaccaaaccccccctcccccccgcttctggccacagcacttaaacacatctctgccaaaccccaaaaacaaagaaccctaacaccagcctaaccagatttcaaattttatcttttggcggtatgcacttttaacagtcaccccccaactaacacattattttcccctcccactcccatactactaatctcatcaatacaacccccgcccatcctacccagcacacacaccgctgctaaccccataccccgaaccaaccaaaccccaaagacaccccccacagtttatgtagcttacctcctcaaagcaatacactgaaaatgtttagacgggctcacatcaccccataaacaaataggtttggtcctggcctttctattagctcttagtaagattacacatgcaagcatccccgttccagtgagttcaccctctaaatcaccacgatcaaaagggacaagcatcaagcacgcagcaatgcagctcaaaacgcttagcctagccacacccccacgggaaacagcagtgattaacctttagcaataaacgaaagtttaactaagctatactaaccccagggttggtcaatttcgtgccagccaccgcggtcacacgattaacccaagtcaatagaagccggcgtaaagagtgttttagatcaccccctccccaataaagctaaaactcacctgagttgtaaaaaactccagttgacacaaaatagactacgaaagtggctttaacatatctgaacacacaatagctaagacccaaactgggattagataccccactatgcttagccctaaacctcaacagttaaatcaacaaaactgctcgccagaacactacgagccacagcttaaaactcaaaggacctggcggtgcttcatatccctctagaggagcctgttctgtaatcgataaaccccgatcaacctcaccacctcttgctcagcctatataccgccatcttcagcaaaccctgatgaaggctacaaagtaagcgcaagtacccacgtaaagacgttaggtcaaggtgtagcccatgaggtggcaagaaatgggctacattttctaccccagaaaactacgatagcccttatgaaacttaagggtcgaaggtggatttagcagtaaactgagagtagagtgcttagttgaacagggccctgaagcgcgtacacaccgcccgtcaccctcctcaagtatacttcaaaggacatttaactaaaacccctacgcatttatatagaggagacaagtcgtaacatggtaagtgtactggaaagtgcacttggacgaaccagagtgtagcttaacacaaagcacccaacttacacttaggagatttcaacttaacttgaccgctctgagctaaacctagccccaaacccactccaccttactaccagacaaccttagccaaaccatttacccagataaagtataggcgatagaaattgaaacctggcgcaatagatatagtaccgcaagggaaagatgaaaaattataaccaagcataatatagcaaggactaacccctataccttctgcataatgaattaactagaaataactttgcaaggagagccaaagctaagacccccgaaaccagacgagctacctaagaacagctaaaagagcacacccgtctatgtagcaaaatagtgggaagatttataggtagaggcgacaaacctaccgagcctggtgatagctggttgtccaagatagaatcttagttcaactttaaatttgcccacagaaccctctaaatccccttgtaaatttaactgttagtccaaagaggaacagctctttggacactaggaaaaaaccttgtagagagagtaaaaaatttaacacccatagtaggcctaaaagcagccaccaattaagaaagcgttcaagctcaacacccactacctaaaaaatcccaaacatataactgaactcctcacacccaattggaccaatctatcaccctatagaagaactaatgttagtataagtaacatgaaaacattctcctccgcataagcctgcgtcagattaaaacactgaactgacaattaacagcccaatatctacaatcaaccaacaagtcattattaccctcactgtcaacccaacacaggcatgctcataaggaaaggttaaaaaaagtaaaaggaactcggcaaatcttaccccgcctgtttaccaaaaacatcacctctagcatcaccagtattagaggcaccgcctgcccagtgacacatgtttaacggccgcggtaccctaaccgtgcaaaggtagcataatcacttgttccttaaatagggacctgtatgaatggctccacgagggttcagctgtctcttacttttaaccagtgaaattgacctgcccgtgaagaggcgggcatgacacagcaagacgagaagaccctatggagctttaatttattaatgcaaacagtacctaacaaacccacaggtcctaaactaccaaacctgcattaaaaatttcggttggggcgacctcggagcagaacccaacctccgagcagtacatgctaagacttcaccagtcaaagcgaactactatactcaattgatccaataacttgaccaacggaacaagttaccctagggataacagcgcaatcctattctagagtccatatcaacaatagggtttacgacctcgatgttggatcaggacatcccgatggtgcagccgctattaaaggttcgtttgttcaacgattaaagtcctacgtgatctgagttcagaccggagtaatccaggtcggtttctatctacnttcaaattcctccctgtacgaaaggacaagagaaataaggcctacttcacaaagcgccttcccccgtaaatgatatcatctcaacttagtattatacccacacccacccaagaacagggtttgttaagatggcagagcccggtaatcgcataaaacttaaaactttacagtcagaggttcaattcctcttcttaacaacatacccatggccaacctcctactcctcattgtacccattctaatcgcaatggcattcctaatgcttaccgaacgaaaaattctaggctatatacaactacgcaaaggccccaacgttgtaggcccctacgggctactacaacccttcgctgacgccataaaactcttcaccaaagagcccctaaaacccgccacatctaccatcaccctctacatcaccgccccgaccttagctctcaccatcgctcttctactatgaacccccctccccatacccaaccccctggtcaacctcaacctaggcctcctatttattctagccacctctagcctagccgtttactcaatcctctgatcagggtgagcatcaaactcaaactacgccctgatcggcgcactgcgagcagtagcccaaacaatctcatatgaagtcaccctagccatcattctactatcaacattactaataagtggctcctttaacctctccacccttatcacaacacaagaacacctctgattactcctgccatcatgacccttggccataatatgatttatctccacactagcagagaccaaccgaacccccttcgaccttgccgaaggggagtccgaactagtctcaggcttcaacatcgaatacgccgcaggccccttcgccctattcttcatagccgaatacacaaacattattataataaacaccctcaccactacaatcttcctaggaacaacatatgacgcactctcccctgaactctacacaacatattttgtcaccaagaccctacttctaacctccctgttcttatgaattcgaacagcatacccccgattccgctacgaccaactcatacacctcctatgaaaaaacttcctaccactcaccctagcattacttatatgatatgtctccatacccattacaatctccagcatcccccctcaaacctaagaaatatgtctgataaaagagttactttgatagagtaaataataggagcttaaacccccttatttctaggactatgagaatcgaacccatccctgagaatccaaaattctccgtgccacctatcacaccccatcctaaagtaaggtcagctaaataagctatcgggcccataccccgaaaatgttggttatacccttcccgtactaattaatcccctggcccaacccgtcatctactctaccatctttgcaggcacactcatcacagcgctaagctcgcactgattttttacctgagtaggcctagaaataaacatgctagcttttattccagttctaaccaaaaaaataaaccctcgttccacagaagctgccatcaagtatttcctcacgcaagcaaccgcatccataatccttctaatagctatcctcttcaacaatatactctccggacaatgaaccataaccaatactaccaatcaatactcatcattaataatcataatggctatagcaataaaactaggaatagccccctttcacttctgagtcccagaggttgcccaaggcacccctctgacatccggcctgcttcttctcacatgacaaaaactagcccccatctcaatcatataccaaatctctccctcactaaacgtaagccttctcctcactctctcaatcttatccatcatagcaggcagttggggtggattaaaccaaacccagctacgcaaaatcttagcatactcctcaattacccacataggatgaataatagcagttctaccgtacaaccctaacataaccattcttaatttaactatttatattatcctaactactaccgcattcctactactcaacttaaactccagcaccacgaccctactactatctcgcacctgaaacaagctaacatgactaacacccttaattccatccaccctcctctccctaggaggcctgcccccgctaaccggctttttgcccaaatgggccattatcgaagaattcacaaaaaacaatagcctcatcatccccaccatcatagccaccatcaccctccttaacctctacttctacctacgcctaatctactccacctcaatcacactactccccatatctaacaacgtaaaaataaaatgacagtttgaacatacaaaacccaccccattcctccccacactcatcgcccttaccacgctactcctacctatctccccttttatactaataatcttatagaaatttaggttaaatacagaccaagagccttcaaagccctcagtaagttgcaatacttaatttctgtaacagctaaggactgcaaaaccccactctgcatcaactgaacgcaaatcagccactttaattaagctaagcccttactagaccaatgggacttaaacccacaaacacttagttaacagctaagcaccctaatcaactggcttcaatctacttctcccgccgccgggaaaaaaggcgggagaagccccggcaggtttgaagctgcttcttcgaatttgcaattcaatatgaaaatcacctcggagctggtaaaaagaggcctaacccctgtctttagatttacagtccaatgcttcactcagccattttacctcacccccactgatgttcgccaaccgttgactattctctacaaaccacaaagacattggaacactatacctattattcggcgcatgagctggagtcctaggcacagctctaagcctccttattcgagccgagctgggccagccaggcaaccttctaggtaacgaccacatctacaacgttatcgtcacagcccatgcatttgtaataatcttcttcatagtaatacccatcataatcggaggctttggcaactgactagttcccctaataatcggtgcccccgatatggcgtttccccgcataaacaacataagcttctgactcttacctccctctctcctactcctgctcgcatctgctatagtggaggccggagcaggaacaggttgaacagtctaccctcccttagcagggaactactcccaccctggagcctccgtagacctaaccatcttctccttacacctagcaggtgtctcctctatcttaggggccatcaatttcatcacaacaattatcaatataaaaccccctgccataacccaataccaaacgcccctcttcgtctgatccgtcctaatcacagcagtcctacttctcctatctctcccagtcctagctgctggcatcactatactactaacagaccgcaacctcaacaccaccttcttcgaccccgccggaggaggagaccccattctataccaacacctattctgatttttcggtcaccctgaagtttatattcttatcctaccaggcttcggaataatctcccatattgtaacttactactccggaaaaaaagaaccatttggatacataggtatggtctgagctatgatatcaattggcttcctagggtttatcgtgtgagcacaccatatatttacagtaggaatagacgtagacacacgagcatatttcacctccgctaccataatcatcgctatccccaccggcgtcaaagtatttagctgactcgccacactccacggaagcaatatgaaatgatctgctgcagtgctctgagccctaggattcatctttcttttcaccgtaggtggcctgactggcattgtattagcaaactcatcactagacatcgtactacacgacacgtactacgttgtagctcacttccactatgtcctatcaataggagctgtatttgccatcataggaggcttcattcactgatttcccctattctcaggctacaccctagaccaaacctacgccaaaatccatttcactatcatattcatcggcgtaaatctaactttcttcccacaacactttctcggcctatccggaatgccccgacgttactcggactaccccgatgcatacaccacatgaaacatcctatcatctgtaggctcattcatttctctaacagcagtaatattaataattttcatgatttgagaagccttcgcttcgaagcgaaaagtcctaatagtagaagaaccctccataaacctggagtgactatatggatgccccccaccctaccacacattcgaagaacccgtatacataaaatctagacaaaaaaggaaggaatcgaaccccccaaagctggtttcaagccaaccccatggcctccatgactttttcaaaaaggtattagaaaaaccatttcataactttgtcaaagttaaattataggctaaatcctatatatcttaatggcacatgcagcgcaagtaggtctacaagacgctacttcccctatcatagaagagcttatcacctttcatgatcacgccctcataatcattttccttatctgcttcctagtcctgtatgcccttttcctaacactctcaacaaaactaactaatactaacatctcagacgctcaggaaatagaaaccgtctgaactatcctgcccgccatcatcctagtcctcatcgccctcccatccctacgcatcctttacataacagacgaggtcaacgatccctcccttaccatcaaatcaattggccaccaatggtactgaacctacgagtacaccgactacggcggactaatcttcaactcctacatacttcccccattattcctagaaccaggcgacctgcgactccttgacgttgacaatcgagtagtactcccgattgaaacccccattcgtataataattacatcacaagacgtcttgcactcatgagctgtccccacattaggcttaaaaacagatgcaattcccggacgtctaaaccaaaccactttcaccgctacacgaccgggggtatactacggtcaatgctctgaaatctgtggagcaaaccacagtttcatgcccatcgtcctagaattaattcccctaaaaatctttgaaatagggcccgtatttaccctatagcaccccctctaccccctctagagcccactgtaaagctaacttagcattaaccttttaagttaaagattaagagaaccaacacctctttacagtgaaatgccccaactaaatactaccgtatggcccaccataattacccccatactccttacactattcctcatcacccaactaaaaatattaaacacaaactaccacctacctccctcaccaaagcccataaaaataaaaaattataacaaaccctgagaaccaaaatgaacgaaaatctgttcgcttcattcattgcccccacaatcctaggcctacccgccgcagtactgatcattctatttccccctctattgatccccacctccaaatatctcatcaacaaccgactaatcaccacccaacaatgactaatcaaactaacctcaaaacaaatgataaccatacacaacactaaaggacgaacctgatctcttatactagtatccttaatcatttttattgccacaactaacctcctcggactcctgccttactcatttacaccaaccacccaactatctataaacctagccatggccatccccttatgagcgggcgcagtgattataggctttcgctctaagattaaaaatgccctagcccacttcttaccacaaggcacacctacaccccttatccccatactagttattatcgaaaccatcagcctactcattcaaccaatagccctggccgtacgcctaaccgctaacattactgcaggccacctactcatgcacctaattggaagcgccaccctagcaatatcaaccattaaccttccctctacacttatcatcttcacaattctaattctactgactatcctagaaatcgctgtcgccttaatccaagcctacgttttcacacttctagtaagcctctacctgcacgacaacacataatgacccaccaatcacatgcctatcatatagtaaaacccagcccatgacccctaacaggggccctctcagccctcctaatgacctccggcctagccatgtgatttcacttccactccataacgctcctcatactaggcctactaaccaacacactaaccatataccaatgatggcgcgatgtaacacgagaaagcacataccaaggccaccacacaccacctgtccaaaaaggccttcgatacgggataatcctatttattacctcagaagtttttttcttcgcaggatttttctgagccttttaccactccagcctagcccctaccccccaattaggagggcactggcccccaacaggcatcaccccgctaaatcccctagaagtcccactcctaaacacatccgtattactcgcatcaggagtatcaatcacctgagctcaccatagtctaatagaaaacaaccgaaaccaaataattcaagcactgcttattacaattttactgggtctctattttaccctcctacaagcctcagagtacttcgagtctcccttcaccatttccgacggcatctacggctcaacattttttgtagccacaggcttccacggacttcacgtcattattggctcaactttcctcactatctgcttcatccgccaactaatatttcactttacatccaaacatcactttggcttcgaagccgccgcctgatactggcattttgtagatgtggtttgactatttctgtatgtctccatctattgatgagggtcttactcttttagtataaatagtaccgttaacttccaattaactagttttgacaacattcaaaaaagagtaataaacttcgccttaattttaataatcaacaccctcctagccttactactaataattattacattttgactaccacaactcaacggctacatagaaaaatccaccccttacgagtgcggcttcgaccctatatcccccgcccgcgtccctttctccataaaattcttcttagtagctattaccttcttattatttgatctagaaattgccctccttttacccctaccatgagccctacaaacaactaacctgccactaatagttatgtcatccctcttattaatcatcatcctagccctaagtctggcctatgagtgactacaaaaaggattagactgaaccgaattggtatatagtttaaacaaaacgaatgatttcgactcattaaattatgataatcatatttaccaaatgcccctcatttacataaatattatactagcatttaccatctcacttctaggaatactagtatatcgctcacacctcatatcctccctactatgcctagaaggaataatactatcgctgttcattatagctactctcataaccctcaacacccactccctcttagccaatattgtgcctattgccatactagtctttgccgcctgcgaagcagcggtgggcctagccctactagtctcaatctccaacacatatggcctagactacgtacataacctaaacctactccaatgctaaaactaatcgtcccaacaattatattactaccactgacatgactttccaaaaaacacataatttgaatcaacacaaccacccacagcctaattattagcatcatccctctactattttttaaccaaatcaacaacaacctatttagctgttccccaaccttttcctccgaccccctaacaacccccctcctaatactaactacctgactcctacccctcacaatcatggcaagccaacgccacttatccagtgaaccactatcacgaaaaaaactctacctctctatactaatctccctacaaatctccttaattataacattcacagccacagaactaatcatattttatatcttcttcgaaaccacacttatccccaccttggctatcatcacccgatgaggcaaccagccagaacgcctgaacgcaggcacatacttcctattctacaccctagtaggctcccttcccctactcatcgcactaatttacactcacaacaccctaggctcactaaacattctactactcactctcactgcccaagaactatcaaactcctgagccaacaacttaatatgactagcttacacaatagcttttatagtaaagatacctctttacggactccacttatgactccctaaagcccatgtcgaagcccccatcgctgggtcaatagtacttgccgcagtactcttaaaactaggcggctatggtataatacgcctcacactcattctcaaccccctgacaaaacacatagcctaccccttccttgtactatccctatgaggcataattataacaagctccatctgcctacgacaaacagacctaaaatcgctcattgcatactcttcaatcagccacatagccctcgtagtaacagccattctcatccaaaccccctgaagcttcaccggcgcagtcattctcataatcgcccacggacttacatcctcattactattctgcctagcaaactcaaactacgaacgcactcacagtcgcatcataatcctctctcaaggacttcaaactctactcccactaatagctttttgatgacttctagcaagcctcgctaacctcgccttaccccccactattaacctactgggagaactctctgtgctagtaaccacgttctcctgatcaaatatcactctcctacttacaggactcaacatactagtcacagccctatactccctctacatatttaccacaacacaatgaggctcactcacccaccacattaacaacataaaaccctcattcacacgagaaaacaccctcatgttcatacacctatcccccattctcctcctatccctcaaccccgacatcattaccgggttttcctcttgtaaatatagtttaaccaaaacatcagattgtgaatctgacaacagaggcttacgaccccttatttaccgagaaagctcacaagaactgctaactcatgcccccatgtctaacaacatggctttctcaacttttaaaggataacagctatccattggtcttaggccccaaaaattttggtgcaactccaaataaaagtaataaccatgcacactactataaccaccctaaccctgacttccctaattccccccatccttaccaccctcgttaaccctaacaaaaaaaactcatacccccattatgtaaaatccattgtcgcatccacctttattatcagtctcttccccacaacaatattcatgtgcctagaccaagaagttattatctcgaactgacactgagccacaacccaaacaacccagctctccctaagcttcaaactagactacttctccataatattcatccctgtagcattgttcgttacatggtccatcatagaattctcactgtgatatataaactcagacccaaacattaatcagttcttcaaatatctactcattttcctaattaccatactaatcttagttaccgctaacaacctattccaactgttcatcggctgagagggcgtaggaattatatccttcttgctcatcagttgatgatacgcccgagcagatgccaacacagcagccattcaagcaatcctatacaaccgtatcggcgatatcggtttcatcctcgccttagcatgatttatcctacactccaactcatgagacccacaacaaatagcccttctaaacgctaatccaagcctcaccccactactaggcctcctcctagcagcagcaggcaaatcagcccaattaggtctccacccctgactcccctcagccatagaaggccccaccccagtctcagccctactccactcaagcactatagttgtagcaggaatcttcttactcatccgcttccaccccctagcagaaaatagcccactaatccaaactctaacactatgcttaggcgctatcaccactctgttcgcagcagtctgcgcccttacacaaaatgacatcaaaaaaatcgtagccttctccacttcaagtcaactaggactcataatagttacaatcggcatcaaccaaccacacctagcattcctgcacatctgtacccacgccttcttcaaagccatactatttatgtgctccgggtccatcatccacaaccttaacaatgaacaagatattcgaaaaataggaggactactcaaaaccatacctctcacttcaacctccctcaccattggcagcctagcattagcaggaatacctttcctcacaggtttctactccaaagaccacatcatcgaaaccgcaaacatatcatacacaaacgcctgagccctatctattactctcatcgctacctccctgacaagcgcctatagcactcgaataattcttctcaccctaacaggtcaacctcgcttccccacccttactaacattaacgaaaataaccccaccctactaaaccccattaaacgcctggcagccggaagcctattcgcaggatttctcattactaacaacatttcccccgcatcccccttccaaacaacaatccccctctacctaaaactcacagccctcgctgtcactttcctaggacttctaacagccctagacctcaactacttaaccaacaaacttaaaataaaatccccactatgcacattttatttctccaacatactcggattctaccctagcatcacacaccgcacaatcccctatctaggccttcttacgagccaaaacctgcccctactcctcctagacctaacctgactagaaaagctattacctaaaacaatttcacagcaccaaatctccacctccatcatcacctcaacccaaaaaggcataattaaactttacttcctctctttcttcttcccactcatcctaaccctactcctaatcacataacctattcccccgagcaatctcaattacaatatatacaccaacaaacaatgttcaaccagtaactactactaatcaacgcccataatcatacaaagcccccgcaccaataggatcctcccgaatcaaccctgacccctctccttcataaattattcagcttcctacactattaaagtttaccacaaccaccaccccatcatactctttcacccacagcaccaatcctacctccatcgctaaccccactaaaacactcaccaagacctcaacccctgacccccatgcctcaggatactcctcaatagccatcgctgtagtatatccaaagacaaccatcattccccctaaataaattaaaaaaactattaaacccatataacctcccccaaaattcagaataataacacacccgaccacaccgctaacaatcaatactaaacccccataaataggagaaggcttagaagaaaaccccacaaaccccattactaaacccacactcaacagaaacaaagcatacatcattattctcgcacggactacaaccacgaccaatgatatgaaaaaccatcgttgtatttcaactacaagaacaccaatgaccccaatacgcaaaattaaccccctaataaaattaattaaccactcattcatcgacctccccaccccatccaacatctccgcatgatgaaacttcggctcactccttggcgcctgcctgatcctccaaatcaccacaggactattcctagccatgcactactcaccagacgcctcaaccgccttttcatcaatcgcccacatcactcgagacgtaaattatggctgaatcatccgctaccttcacgccaatggcgcctcaatattctttatctgcctcttcctacacatggggcgaggcctatattacggatcatttctctactcagaaacctgaaacatcggcattatcctcctgcttgcaactatagcaacagccttcataggctatgtcctcccgtgaggccaaatatcattctgaggggccacagtaattacaaacttactatccgccatcccatacattgggacagacctagttcaatgaatctgaggaggctactcagtagacagtcccaccctcacacgattctttacctttcacttcatcttgcccttcattattgcagccctagcagcactccacctcctattcttgcacgaaacgggatcaaacaaccccctaggaatcacctcccattccgataaaatcaccttccacccttactacacaatcaaagacgccctcggcttacttctcttccttctctccttaatgacattaacactattctcaccagacctcctaggcgacccagacaattataccctagccaaccccttaaacacccctccccacatcaagcccgaatgatatttcctattcgcctacacaattctccgatccgtccctaacaaactaggaggcgtccttgccctattactatccatcctcatcctagcaataatccccatcctccatatatccaaacaacaaagcataatatttcgcccactaagccaatcactttattgactcctagccgcagacctcctcattctaacctgaatcggaggacaaccagtaagctacccttttaccatcattggacaagtagcatccgtactatacttcacaacaatcctaatcctaataccaactatctccctaattgaaaacaaaatactcaaatgggcctgtccttgtagtataaactaatacaccagtcttgtaaaccggagatgaaaacctttttccaaggacaaatcagagaaaaagtctttaactccaccattagcacccaaagctaagattctaatttaaactattctctgttctttcatggggaagcagatttgggtaccacccaagtattgactcacccatcaacaaccgctatgtatttcgtacattactgccagtcaccatgaatattgtacggtaccataaatacttgaccacctgtagtacataaaaacccaatccacatcaaaaccccctccccatgcttacaagcaagtacagcaatcaaccttcaactatcacacatcaactgcaactccaaagccacccctcacccactaggataccaacaaacctatccacccttaacagtacatagtacataaaaccatttaccgtacatagcacattacagtcaaatcccttctcgcccccatggatgacccccctcagatagggatcccttgaccaccatcctccgtgaaatcaatatcccgcacaagagtgctactctcctcgctccgggcccataacacttgggggtagctaaagtgaactgtatccgacatctggttcctacttcagggtcataaagcctaaatagcccacacgttccccttaaataagacatcacgatg

SEQ ID NO: 331 - DNA, 16569 bp, Homo sapiens mitochondrial
  3107: "n" refers to a nucleotide at position 3107 of the Cambridge Reference Sequence (CRS, Anderson et al. 1981 Nature 290:457-465), later determined to be absent from the human mtDNA sequence according to the revised CRS (rCRS, Andrews et al. 1999 Nature Genetics 23:147); "n" therefore represents a single nucleotide deletion at a position corresponding to nucleotide 3107 of SEQ ID NO:1 as provided herein.
gatcacaggtctatcaccctattaaccactcacgggagctctccatgcatttggtattttcgtttggggggtgtgcacgcgatagcattgcgagacgctggagccggagcaccctatgtcgcagtatctgtctttgattcctgccccatcctgttatttatcgcacctacgttcaatattacaggcgaacatacttactaaagtgtgttaattagttaatgcttgtaggacatagtaataacaattgaatgtctgcacagccgctttccacacagacatcataacaaaaaatttccaccaaaccccccctcccccccgcttctggccacagcacttaaacacatctctgccaaaccccaaaaacaaagaaccctaacaccagcctaaccagatttcaaattttatcttttggcggtatgcacttttaacagtcaccccccaactaacacattattttcccctcccactcccatactactaatctcatcaatacaacccccgcccatcctacccagcacacacaccgctgctaaccccataccccgaaccaaccaaaccccaaagacaccccccacagtttatgtagcttacctcctcaaagcaatacactgaaaatgtttagacgggctcacatcaccccataaacaaataggtttggtcctggcctttctattagctcttagtaagattacacatgcaagcatccccgttccagtgagttcaccctctaaatcaccacgatcaaaagggacaagcatcaagcacgcagcaatgcagctcaaaacgcttagcctagccacacccccacgggaaacagcagtgattaacctttagcaataaacgaaagtttaactaagctatactaaccccagggttggtcaatttcgtgccagccaccgcggtcacacgattaacccaagtcaatagaagccggcgtaaagagtgttttagatcaccccctccccaataaagctaaaactcacctgagttgtaaaaaactccagttgacacaaaatagactacgaaagtggctttaacatatctgaacacacaatagctaagacccaaactgggattagataccccactatgcttagccctaaacctcaacagttaaatcaacaaaactgctcgccagaacactacgagccacagcttaaaactcaaaggacctggcggtgcttcatatccctctagaggagcctgttctgtaatcgataaaccccgatcaacctcaccacctcttgctcagcctatataccgccatcttcagcaaaccctgatgaaggctacaaagtaagcgcaagtacccacgtaaagacgttaggtcaaggtgtagcccatgaggtggcaagaaatgggctacattttctaccccagaaaactacgatagcccttatgaaacttaagggtcgaaggtggatttagcagtaaactgagagtagagtgcttagttgaacagggccctgaagcgcgtacacaccgcccgtcaccctcctcaagtatacttcaaaggacatttaactaaaacccctacgcatttatatagaggagacaagtcgtaacatggtaagtgtactggaaagtgcacttggacgaaccagagtgtagcttaacacaaagcacccaacttacacttaggagatttcaacttaacttgaccgctctgagctaaacctagccccaaacccactccaccttactaccagacaaccttagccaaaccatttacccagataaagtataggcgatagaaattgaaacctggcgcaatagatatagtaccgcaagggaaagatgaaaaattataaccaagcataatatagcaaggactaacccctataccttctgcataatgaattaactagaaataactttgcaaggagagccaaagctaagacccccgaaaccagacgagctacctaagaacagctaaaagagcacacccgtctatgtagcaaaatagtgggaagatttataggtagaggcgacaaacctaccgagcctggtgatagctggttgtccaagatagaatcttagttcaactttaaatttgcccacagaaccctctaaatccccttgtaaatttaactgttagtccaaagaggaacagctctttggacactaggaaaaaaccttgtagagagagtaaaaaatttaacacccatagtaggcctaaaagcagccaccaattaagaaagcgttcaagctcaacacccactacctaaaaaatcccaaacatataactgaactcctcacacccaattggaccaatctatcaccctatagaagaactaatgttagtataagtaacatgaaaacattctcctccgcataagcctgcgtcagattaaaacactgaactgacaattaacagcccaatatctacaatcaaccaacaagtcattattaccctcactgtcaacccaacacaggcatgctcataaggaaaggttaaaaaaagtaaaaggaactcggcaaatcttaccccgcctgtttaccaaaaacatcacctctagcatcaccagtattagaggcaccgcctgcccagtgacacatgtttaacggccgcggtaccctaaccgtgcaaaggtagcataatcacttgttccttaaatagggacctgtatgaatggctccacgagggttcagctgtctcttacttttaaccagtgaaattgacctgcccgtgaagaggcgggcatgatacagcaagacgagaagaccctatggagctttaatttattaatgcaaacagtacctaacaaacccacaggtcctaaactaccaaacctgcattaaaaatttcggttggggcgacctcggagcagaacccaacctccgagcagtacatgctaagacttcaccagtcaaagcgaactactatactcaattgatccaataacttgaccaacggaacaagttaccctagggataacagcgcaatcctattctagagtccatatcaacaatagggtttacgacctcgatgttggatcaggacatcccgatggtgcagccgctattaaaggttcgtttgttcaacgattaaagtcctacgtgatctgagttcagaccggagtaatccaggtcggtttctatctacnttcaaattcctccctgtacgaaaggacaagagaaataaggcctacttcacaaagcgccttcccccgtaaatgatatcatctcaacttagtattatacccacacccacccaagaacagggtttgttaagatggcagagcccggtaatcgcataaaacttaaaactttacagtcagaggttcaattcctcttcttaacaacatacccatggccaacctcctactcctcattgtacccattctaatcgcaatggcattcctaatgcttaccgaacgaaaaattctaggctatatacaactacgcaaaggccccaacgttgtaggcccctacgggctactacaacccttcgctgacgccataaaactcttcaccaaagagcccctaaaacccgccacatctaccatcaccctctacatcaccgccccgaccttagctctcaccatcgctcttctactatgaacccccctccccatacccaaccccctagtcaacctcaacctaggcctcctatttattctagccacctctagcctagccgtttactcaatcctctgatcagggtgagcatcaaactcaaactacgccctgatcggcgcactgcgagcagtagcccaaacaatctcatatgaagtcaccctagccatcattctactatcaacattactaataagtggctcctttaacctctccacccttatcacaacacaagaacacctctgattactcctgccatcatgacccttggccataatatgatttatctccacactagcagagaccaaccgaacccccttcgaccttgccgaaggggagtccgaactagtctcaggcttcaacatcgaatacgccgcaggccccttcgccctattcttcatagccgaatacacaaacattattataataaacaccctcaccactacaatcttcctaggaacaacatatgacgcactctcccctgaactctacacaacatattttgtcaccaagaccctacttctaacctccctgttcttatgaattcgaacagcatacccccgattccgctacgaccaactcatacacctcctatgaaaaaacttcctaccactcaccctagcattacttatatgatatgtctccatacccattacaatctccagcatcccccctcaaacctaagaaatatgtctgataaaagagttactttgatagagtaaataataggagcttaaacccccttatttctaggactatgagaatcgaacccatccctgagaatccaaaattctccgtgccacctatcacaccccatcctaaagtaaggtcagctaaataagctatcgggcccataccccgaaaatgttggttatacccttcccgtactaattaatcccctggcccaacccgtcatctactctaccatctttgcaggcacactcatcacagcgctaagctcgcactgattttttacctgagtaggcctagaaataaacatgctagcttttattccagttctaaccaaaaaaataaaccctcgttccacagaagctgccatcaagtatttcctcacgcaagcaaccgcatccataatccttctaatagctatcctcttcaacaatatactctccggacaatgaaccataaccaatactaccaatcaatactcatcattaataatcataatggctatagcaataaaactaggaatagccccctttcacttctgagtcccagaggttgcccaaggcacccctctgacatccggcctgcttcttctcacatgacaaaaactagcccccatctcaatcatataccaaatctctccctcactaaacgtaagccttctcctcactctctcaatcttatccatcatagcaggcagttgaggtggattaaaccaaacccagctacgcaaaatcttagcatactcctcaattacccacataggatgaataatagcagttctaccgtacaaccctaacataaccattcttaatttaactatttatattatcctaactactaccgcattcctactactcaacttaaactccagcaccacgaccctactactatctcgcacctgaaacaagctaacatgactaacacccttaattccatccaccctcctctccctaggaggcctgcccccgctaaccggctttttgcccaaatgggccattatcgaagaattcacaaaaaacaatagcctcatcatccccaccatcatagccaccatcaccctccttaacctctacttctacctacgcctaatctactccacctcaatcacactactccccatatctaacaacgtaaaaataaaatgacagtttgaacatacaaaacccaccccattcctccccacactcatcgcccttaccacgctactcctacctatctccccttttatactaataatcttatagaaatttaggttaaatacagaccaagagccttcaaagccctcagtaagttgcaatacttaatttctgtaacagctaaggactgcaaaaccccactctgcatcaactgaacgcaaatcagccactttaattaagctaagcccttactagaccaatgggacttaaacccacaaacacttagttaacagctaagcaccctaatcaactggcttcaatctacttctcccgccgccgggaaaaaaggcgggagaagccccggcaggtttgaagctgcttcttcgaatttgcaattcaatatgaaaatcacctcggagctggtaaaaagaggcctaacccctgtctttagatttacagtccaatgcttcactcagccattttacctcacccccactgatgttcgccgaccgttgactattctctacaaaccacaaagacattggaacactatacctattattcggcgcatgagctggagtcctaggcacagctctaagcctccttattcgagccgagctgggccagccaggcaaccttctaggtaacgaccacatctacaacgttatcgtcacagcccatgcatttgtaataatcttcttcatagtaatacccatcataatcggaggctttggcaactgactagttcccctaataatcggtgcccccgatatggcgtttccccgcataaacaacataagcttctgactcttacctccctctctcctactcctgctcgcatctgctatagtggaggccggagcaggaacaggttgaacagtctaccctcccttagcagggaactactcccaccctggagcctccgtagacctaaccatcttctccttacacctagcaggtgtctcctctatcttaggggccatcaatttcatcacaacaattatcaatataaaaccccctgccataacccaataccaaacgcccctcttcgtctgatccgtcctaatcacagcagtcctacttctcctatctctcccagtcctagctgctggcatcactatactactaacagaccgcaacctcaacaccaccttcttcgaccccgccggaggaggagaccccattctataccaacacctattctgatttttcggtcaccctgaagtttatattcttatcctaccaggcttcggaataatctcccatattgtaacttactactccggaaaaaaagaaccatttggatacataggtatggtctgagctatgatatcaattggcttcctagggtttatcgtgtgagcacaccatatatttacagtaggaatagacgtagacacacgagcatatttcacctccgctaccataatcatcgctatccccaccggcgtcaaagtatttagctgactcgccacactccacggaagcaatatgaaatgatctgctgcagtgctctgagccctaggattcatctttcttttcaccgtaggtggcctgactggcattgtattagcaaactcatcactagacatcgtactacacgacacgtactacgttgtagctcacttccactatgtcctatcaataggagctgtatttgccatcataggaggcttcattcactgatttcccctattctcaggctacaccctagaccaaacctacgccaaaatccatttcactatcatattcatcggcgtaaatctaactttcttcccacaacactttctcggcctatccggaatgccccgacgttactcggactaccccgatgcatacaccacatgaaacatcctatcatctgtaggctcattcatttctctaacagcagtaatattaataattttcatgatttgagaagccttcgcttcgaagcgaaaagtcctaatagtagaagaaccctccataaacctggagtgactatatggatgccccccaccctaccacacattcgaagaacccgtatacataaaatctagacaaaaaaggaaggaatcgaaccccccaaagctggtttcaagccaaccccatggcctccatgactttttcaaaaaggtattagaaaaaccatttcataactttgtcaaagttaaattataggctaaatcctatatatcttaatggcacatgcagcgcaagtaggtctacaagacgctacttcccctatcatagaagagcttatcacctttcatgatcacgccctcataatcattttccttatctgcttcctagtcctgtatgcccttttcctaacactcacaacaaaactaactaatactaacatctcagacgctcaggaaatagaaaccgtctgaactatcctgcccgccatcatcctagtcctcatcgccctcccatccctacgcatcctttacataacagacgaggtcaacgatccctcccttaccatcaaatcaattggccaccaatggtactgaacctacgagtacaccgactacggcggactaatcttcaactcctacatacttcccccattattcctagaaccaggcgacctgcgactccttgacgttgacaatcgagtagtactcccgattgaaacccccattcgtataataattacatcacaagacgtcttgcactcatgagctgtccccacattaggcttaaaaacagatgcaattcccggacgtctaaaccaaaccactttcaccgctacacgaccgggggtatactacggtcaatgctctgaaatctgtggagcaaaccacagtttcatgcccatcgtcctagaattaattcccctaaaaatctttgaaatagggcccgtatttaccctatagcaccccctctaccccctctagagcccactgtaaagctaacttagcattaaccttttaagttaaagattaagagaaccaacacctctttacagtgaaatgccccaactaaatactaccgtatggcccaccataattacccccatactccttacactattcctcatcacccaactaaaaatattaaacacaaactaccacctacctccctcaccaaagcccataaaaataaaaaattataacaaaccctgagaaccaaaatgaacgaaaatctgttcgcttcattcattgcccccacaatcctaggcctacccgccgcagtactgatcattctatttccccctctattgatccccacctccaaatatctcatcaacaaccgactaatcaccacccaacaatgactaatcaaactaacctcaaaacaaatgataaccatacacaacactaaaggacgaacctgatctcttatactagtatccttaatcatttttattgccacaactaacctcctcggactcctgccttactcatttacaccaaccacccaactatctataaacctagccatggccatccccttatgagcgggcgcagtgattataggctttcgctctaagattaaaaatgccctagcccacttcttaccacaaggcacacctacaccccttatccccatactagttattatcgaaaccatcagcctactcattcaaccaatagccctggccgtacgcctaaccgctaacattactgcaggccacctactcatgcacctaattggaagcgccaccctagcaatatcaaccattaaccttccctctacacttatcatcttcacaattctaattctactgactatcctagaaatcgctgtcgccttaatccaagcctacgttttcacacttctagtaagcctctacctgcacgacaacacataatgacccaccaatcacatgcctatcatatagtaaaacccagcccatgacccctaacaggggccctctcagccctcctaatgacctccggcctagccatgtgatttcacttccactccataacgctcctcatactaggcctactaaccaacacactaaccatataccaatgatggcgcgatgtaacacgagaaagcacataccaaggccaccacacaccacctgtccaaaaaggccttcgatacgggataatcctatttattacctcagaagtttttttcttcgcaggatttttctgagccttttaccactccagcctagcccctaccccccaattaggagggcactggcccccaacaggcatcaccccgctaaatcccctagaagtcccactcctaaacacatccgtattactcgcatcaggagtatcaatcacctgagctcaccatagtctaatagaaaacaaccgaaaccaaataattcaagcactgcttattacaattttactgggtctctattttaccctcctacaagcctcagagtacttcgagtctcccttcaccatttccgacggcatctacggctcaacattttttgtagccacaggcttccacggacttcacgtcattattggctcaactttcctcactatctgcttcatccgccaactaatatttcactttacatccaaacatcactttggcttcgaagccgccgcctgatactggcattttgtagatgtggtttgactatttctgtatgtctccatctattgatgagggtcttactcttttagtataaatagtaccgttaacttccaattaactagttttgacaacattcaaaaaagagtaataaacttcgccttaattttaataatcaacaccctcctagccttactactaataattattacattttgactaccacaactcaacggctacatagaaaaatccaccccttacgagtgcggcttcgaccctatatcccccgctcgcgtccctttctccataaaattcttcttagtagctattaccttcttattatttgatctagaaattgccctccttttacccctaccatgagccctacaaacaactaacctgccactaatagttatgtcatccctcttattaatcatcatcctagccctaagtctggcctatgagtgactacaaaaaggattagactgaaccgaattggtatatagtttaaacaaaacgaatgatttcgactcattaaattatgataatcatatttaccaaatgcccctcatttacataaatattatactagcatttaccatctcacttctaggaatactagtatatcgctcacacctcatatcctccctactatgcctagaaggaataatactatcgctgttcattatagctactctcataaccctcaacacccactccctcttagccaatattgtgcctattgccatactagtctttgccgcctgcgaagcagcggtgggcctagccctactagtctcaatctccaacacatatggcctagactacgtacataacctaaacctactccaatgctaaaactaatcgtcccaacaattatattactaccactgacatgactttccaaaaaacacataatttgaatcaacacaaccacccacagcctaattattagcatcatccctctactattttttaaccaaatcaacaacaacctatttagctgttccccaaccttttcctccgaccccctaacaacccccctcctaatactaactacctgactcctacccctcacaatcatggcaagccaacgccacttatccagtgaaccactatcacgaaaaaaactctacctctctatactaatctccctacaaatctccttaattataacattcacagccacagaactaatcatattttatatcttcttcgaaaccacacttatccccaccttggctatcatcacccgatgaggcaaccagccagaacgcctgaacgcaggcacatacttcctattctacaccctagtaggctcccttcccctactcatcgcactaatttacactcacaacaccctaggctcactaaacattctactactcactctcactgcccaagaactatcaaactcctgagccaacaacttaatatgactagcttacacaatagcttttatagtaaagatacctctttacggactccacttatgactccctaaagcccatgtcgaagcccccatcgctgggtcaatagtacttgccgcagtactcttaaaactaggcggctatggtataatacgcctcacactcattctcaaccccctgacaaaacacatagcctaccccttccttgtactatccctatgaggcataattataacaagctccatctgcctacgacaaacagacctaaaatcgctcattgcatactcttcaatcagccacatagccctcgtagtaacagccattctcatccaaaccccctgaagcttcaccggcgcagtcattctcataatcgcccacggacttacatcctcattactattctgcctagcaaactcaaactacgaacgcactcacagtcgcatcataatcctctctcaaggacttcaaactctactcccactaatagctttttgatgacttctagcaagcctcgctaacctcgccttaccccccactattaacctactgggagaactctctgtgctagtaaccacgttctcctgatcaaatatcactctcctacttacaggactcaacatactagtcacagccctatactccctctacatatttaccacaacacaatgaggctcactcacccaccacattaacaacataaaaccctcattcacacgagaaaacaccctcatgttcatacacctatcccccattctcctcctatccctcaaccccgacatcattaccgggttttcctcttgtaaatatagtttaaccaaaacatcagattgtgaatctgacaacagaggcttacgaccccttatttaccgagaaagctcacaagaactgctaactcatgcccccatgtctaacaacatggctttctcaacttttaaaggataacagctatccattggtcttaggccccaaaaattttggtgcaactccaaataaaagtaataaccatgcacactactataaccaccctaaccctgacttccctaattccccccatccttaccaccctcgttaaccctaacaaaaaaaactcatacccccattatgtaaaatccattgtcgcatccacctttattatcagtctcttccccacaacaatattcatgtgcctagaccaagaagttattatctcgaactgacactgagccacaacccaaacaacccagctctccctaagcttcaaactagactacttctccataatattcatccctgtagcattgttcgttacatggtccatcatagaattctcactgtgatatataaactcagacccaaacattaatcagttcttcaaatatctactcattttcctaattaccatactaatcttagttaccgctaacaacctattccaactgttcatcggctgagagggcgtaggaattatatccttcttgctcatcagttgatgatacgcccgagcagatgccaacacagcagccattcaagcaatcctatacaaccgtatcggcgatatcggtttcatcctcgccttagcatgatttatcctacactccaactcatgagacccacaacaaatagcccttctaaacgctaatccaagcctcaccccactactaggcctcctcctagcagcagcaggcaaatcagcccaattaggtctccacccctgactcccctcagccatagaaggccccaccccagtctcagccctactccactcaagcactatagttgtagcaggaatcttcttactcatccgcttccaccccctagcagaaaatagcccactaatccaaactctaacactatgcttaggcgctatcaccactctgttcgcagcagtctgcgcccttacacaaaatgacatcaaaaaaatcgtagccttctccacttcaagtcaactaggactcataatagttacaatcggcatcaaccaaccacacctagcattcctgcacatctgtacccacgccttcttcaaagccatactatttatgtgctccgggtccatcatccacaaccttaacaatgaacaagatattcgaaaaataggaggactactcaaaaccatacctctcacttcaacctccctcaccattggcagcctagcattagcaggaatacctttcctcacaggtttctactccaaagaccacatcatcgaaaccgcaaacatatcatacacaaacgcctgagccctatctattactctcatcgctacctccctgacaagcgcctatagcactcgaataattcttctcaccctaacaggtcaacctcgcttccccacccttactaacattaacgaaaataaccccaccctactaaaccccattaaacgcctggcagccggaagcctattcgcaggatttctcattactaacaacatttcccccgcatcccccttccaaacaacaatccccctctacctaaaactcacagccctcgctgtcactttcctaggacttctaacagccctagacctcaactacctaaccaacaaacttaaaataaaatccccactatgcacattttatttctccaacatactcggattctaccctagcatcacacaccgcacaatcccctatctaggccttcttacgagccaaaacctgcccctactcctcctagacctaacctgactagaaaagctattacctaaaacaatttcacagcaccaaatctccacctccatcatcacctcaacccaaaaaggcataattaaactttacttcctctctttcttcttcccactcatcctaaccctactcctaatcacataacctattcccccgagcaatctcaattacaatatatacaccaacaaacaatgttcaaccagtaactactactaatcaacgcccataatcatacaaagcccccgcaccaataggatcctcccgaatcaaccctgacccctctccttcataaattattcagcttcctacactattaaagtttaccacaaccaccaccccatcatactctttcacccacagcaccaatcctacctccatcgctaaccccactaaaacactcaccaagacctcaacccctgacccccatgcctcaggatactcctcaatagccatcgctgtagtatatccaaagacaaccatcattccccctaaataaattaaaaaaactattaaacccatataacctcccccaaaattcagaataataacacacccgaccacaccgctaacaatcaatactaaacccccataaataggagaaggcttagaagaaaaccccacaaaccccattactaaacccacactcaacagaaacaaagcatacatcattattctcgcacggactacaaccacgaccaatgatatgaaaaaccatcgttgtatttcaactacaagaacaccaatgaccccaatacgcaaaattaaccccctaataaaattaattaatcactcattcatcgacctccccaccccatccaacatctccgcatgatgaaacttcggctcactccttggcgcctgcctgatcctccaaatcaccacaggactattcctagccatgcactactcaccagacgcctcaaccgccttttcatcaatcgcccacatcactcgagacgtaaattatggctgaatcatccgctaccttcacgccaatggcgcctcaatattctttatctgcctcttcctacacatcgggcgaggcctatattacggatcatttctctactcagaaacctgaaacatcggcattatcctcctgcttgcaactatagcaacagccttcataggctatgtcctcccgtgaggccaaatatcattctgaggggccacagtaattacaaacttactatccgccatcccatacattgggacagacctagttcaatgaatctgaggaggctactcagtagacagtcccaccctcacacgattctttacctttcacttcatcttgcccttcattattgcagccctagcagcactccacctcctattcttgcacgaaacgggatcaaacaaccccctaggaatcacctcccattccgataaaatcaccttccacccttactacacaatcaaagacgccctcggcttacttctcttccttctctccttaatgacattaacactattctcaccagacctcctaggcgacccagacaattataccctagccaaccccttaaacacccctccccacatcaagcccgaatgatatttcctattcgcctacacaattctccgatccgtccctaacaaactaggaggcgtccttgccctattactatccatcctcatcctagcaataacccccatcctccatatatccaaacaacaaagcataatatttcgcccactaagccaatcactttattgactcctagccgcagacctcctcattctaacctgaatcggaggacaaccagtaagctacccttttaccatcattggacaagtagcatccgtactatacttcacaacaatcctaatcctaataccaactatctccctaattgaaaacaaaatactcaaatgggcctgtccttgtagtataaactaatacaccagtcttgtaaaccggagatgaaaacctttttccaaggacaaatcagagaaaaagtctttaactccaccattagcacccaaagctaagattctaatttaaactattctctgttctttcatggggaagcagatttgggtaccacccaagtattgactcacccatcaacaaccgctatgtatttcgtacattactgccagtcaccatgaatattgtacagtaccataaatacttgaccacctgtagtacataaaaacccaatccacagcaaaaccccctccccatgcttacaagcaagtacagcaatcaaccttcaactatcacacatcaactgcaactccaaagccacccctcacccactaggataccaacaaacctatccacccttaacagtacatagtacataaaaccatttaccgtacatagcacattacagtcaaatcccttctcgcccccatggatgacccccctcagataggggtcccttgaccaccatcctccgtgaaatcaatatcccgcacaagagtgctactctcctcgctccgggcccataacacttgggggtagctaaagtgaactgtatccgacatctggttcctacttcagggccataaagcctaaatagcccacacgttccccttaaataagacatcacgatg

SEQ ID NO: 332 - DNA, 16569 bp, Homo sapiens mitochondrial
  3107: "n" refers to a nucleotide at position 3107 of the Cambridge Reference Sequence (CRS, Anderson et al. 1981 Nature 290:457-465), later determined to be absent from the human mtDNA sequence according to the revised CRS (rCRS, Andrews et al. 1999 Nature Genetics 23:147); "n" therefore represents a single nucleotide deletion at a position corresponding to nucleotide 3107 of SEQ ID NO:1 as provided herein.
gatcacaggtctatcaccctattaaccactcacgggagctctccatgcatttggtattttcgtttggggggtgtgcacgcgatagcattgcgagacgctggagccggagcaccctatgtcgcagtatctgtctttgattcctgccccatcccgttatttatcgcacctacgttcaatattacaggcgaacatacttactaaagtgtgttaattaattaatgcttgtaggacatagtaataacaattgaatgtctgcacagccgctttccacacagacatcataacaaaaaatttccaccaaaccccccctcccccccgcttctggccacagcacttaaacacatctctgccaaaccccaaaaacaaagaaccctaacaccagcctaaccagatttcaaattttatcttttggcggtatgcacttttaacagtcaccccccaactaacacattattttcccctcccactcccatactactaatctcatcaatacaacccccgcccatcctacccagcacacacaccgctgctaaccccataccccgaaccaaccaaaccccaaagacaccccccacagtttatgtagcttacctcctcaaagcaatacactgaaaatgtttagacgggcccacatcaccccataaacaaataggtttggtcctggcctttctattagctcttagtaagattacacatgcaagcatccccgttccagtgagttcaccctctaaatcaccacgatcaaaagggacaagcatcaagcacgcagcaatgcagctcaaaacgcttagcctagccacacccccacgggaaacagcagtgattaacctttagcaataaacgaaagtttaactaagctatactaaccccagggttggtcaatttcgtgccagccaccgcggtcacacgattaacccaagtcaatagaagccggcgtaaagagtgttttagatcaccccctccccaataaagctaaaactcacctgagttgtaaaaaactccagttgacacaaaatagactacgaaagtggctttaacatatctgaacacacaatagctaagacccaaactgggattagataccccactatgcttagccctaaacctcaacagttaaatcaacaaaactgctcgccagaacactacgagccacagcttaaaactcaaaggacctggcggtgcttcatatccctctagaggagcctgttctgtaatcgataaaccccgatcaacctcaccacctcttgctcagcctatataccgccatcttcagcaaaccctgatgaaggctacaaagtaagcgcaagtacccacgtaaagacgttaggtcaaggtgtagcccatgaggtggcaagaaatgggctacattttctaccccagaaaactacgatagcccttatgaaacttaagggtcgaaggtggatttagcagtaaactgagagtagagtgcttagttgaacagggccctgaagcgcgtacacaccgcccgtcaccctcctcaagtatacttcaaaggacatttaactaaaacccctacgcatttatatagaggagacaagtcgtaacatggtaagtgtactggaaagtgcacttggacgaaccagagtgtagcttaacacaaagcacccaacttacacttaggagatttcaacttaacttgaccgctctgagctaaacctagccccaaacccactccaccttactaccagacaaccttagccaaaccatttacccagataaagtataggcgatagaaattgaaacctggcgcaatagatatagtaccgcaagggaaagatgaaaaattataaccaagcataatatagcaaggactaacccctataccttctgcataatgaattaactagaaataactttgcaaggagagccaaagctaagacccccgaaaccagacgagctacctaagaacagctaaaagagcacacccgtctatgtagcaaaatagtgggaagatttataggtagaggcgacaaacctaccgagcctggtgatagctggttgtccaagatagaatcttagttcaactttaaatttgcccacagaaccctctaaatccccttgtaaatttaactgttagtccaaagaggaacagctctttggacactaggaaaaaaccttgtagagagagtaaaaaatttaacacccatagtaggcctaaaagcagccaccaattaagaaagcgttcaagctcaacacccactacctaaaaaatcccaaacatataactgaactcctcacacccaattggaccaatctatcaccctatagaagaactaatgttagtataagtaacatgaaaacattctcctccgcataagcctgcgtcagattaaaacactgaactgacaattaacagcccaatatctacaatcaaccaacaagtcattattaccctcactgtcaacccaacacaggcatgctcataaggaaaggttaaaaaaagtaaaaggaactcggcaaatcttaccccgcctgtttaccaaaaacatcacctctagcatcaccagtattagaggcaccgcctgcccagtgacacatgtttaacggccgcggtaccctaaccgtgcaaaggtagcataatcacttgttccttaaatagggacctgtatgaatggctccacgagggttcagctgtctcttacttttaaccagtgaaattgacctgcccgtgaagaggcgggcatgacacagcaagacgagaagaccctatggagctttaatttattaatgcaaacagtacctaacaaacccacaggtcctaaactaccaaacctgcattaaaaatttcggttggggcgacctcggagcagaacccaacctccgagcagtacatgctaagacttcaccagtcaaagcgaactactatactcaattgatccaataacttgaccaacggaacaagttaccctagggataacagcgcaatcctattctagagtccatatcaacaatagggtttacgacctcgatgttggatcaggacatcccgatggtgcagccgctattaaaggttcgtttgttcaacgattaaagtcctacgtgatctgagttcagaccggagtaatccaggtcggtttctatctacnttcaaattcctccctgtacgaaaggacaagagaaataaggcctacttcacaaagcgccttcccccgtaaatgatatcatctcaacttagtattatacccacacccacccaagaacagggtttgttaagatggcagagcccggtaatcgcataaaacttaaaactttacagtcagaggttcaattcctcttcttaacaacatacccatggccaacctcctactcctcattgtacccattctaatcgcaatggcattcctaatgcttaccgaacgaaaaattctaggctatatacaactacgcaaaggccccaacgttgtaggcccctacgggctactacaacccttcgctgacgccataaaactcttcaccaaagagcccctaaaacccgccacatctaccatcaccctctacatcaccgccccgaccttagctctcaccatcgctcttctactatgaacccccctccccatacccaaccccctggtcaacctcaacctaggcctcctatttattctagccacctctagcctagccgtttactcaatcctctgatcagggtgagcatcaaactcaaactacgccctgatcggcgcactgcgagcagtagcccaaacaatctcatatgaagtcaccctagccatcattctactatcaacattactaataagtggctcctttaacctctccacccttatcacaacacaagaacacctctgattactcctgccatcatgacccttggccataatatgatttatctccacactagcagagaccaaccgaacccccttcgaccttgccgaaggggagtccgaactagtctcaggcttcaacatcgaatacgccgcaggccccttcgccctattcttcatagccgaatacacaaacattattataataaacaccctcaccactacaatcttcctaggaacaacatatgacgcactctcccctgaactctacacaacatattttgtcaccaagaccctacttctaacctccctgttcttatgaattcgaacagcatacccccgattccgctacgaccaactcatacacctcctatgaaaaaacttcctaccactcaccctagcattacttatatgatatgtctccatacccattacaatctccagcatcccccctcaaacctaagaaatatgtctgataaaagagttactttgatagagtaaataataggagcttaaacccccttatttctaggactatgagaatcgaacccatccctgagaatccaaaattctccgtgccacctatcacaccccatcctaaagtaaggtcagctaaataagctatcgggcccataccccgaaaatgttggttatacccttcccgtactaattaatcccctggcccaacccgtcatctactctaccatctttgcaggcacactcatcacagcgctaagctcgcactgattttttacctgagtaggcctagaaataaacatgctagcttttattccagttctaaccaaaaaaataaaccctcgttccacagaagctgccatcaagtatttcctcacgcaagcaaccgcatccataatccttctaatagctatcctcttcaacaatatactctccggacaatgaaccataaccaatactaccaatcaatactcatcattaataatcataatggctatagcaataaaactaggaatagccccctttcacttctgagtcccagaggttgcccaaggcacccctctgacatccggcctgcttcttctcacatgacaaaaactagcccccatctcaatcatataccaaatctctccctcactaaacgtaagccttctcctcactctctcaatcttatccatcatagcaggcagttgaggtggattaaaccaaacccagctacgcaaaatcttagcatactcctcaattacccacataggatgaataatagcagttctaccgtacaaccctaacataaccattcttaatttaactatttatattatcctaactactaccgcattcctactactcaacttaaactccagcaccacgaccctactactatctcgcacctgaaacaagctaacgtgactaacacccttaattccatccaccctcctctccctaggaggcctgcccccgctaaccggctttttgcccaaatgggccattatcgaagaattcacaaaaaacaatagcctcatcatccccaccatcatagccaccatcaccctccttaacctctacttctacctacgcctaatctactccacctcaatcacactactccccatatctaacaacgtaaaaataaaatgacagtttgaacatacaaaacccaccccattcctccccacactcatcgcccttaccacgctactcctacctatctccccttttatactaataatcttatagaaatttaggttaaatacagaccaagagccttcaaagccctcagtaagttgcaatacttaatttctgtaacagctaaggactgcaaaaccccactctgcatcaactgaacgcaaatcagccactttaattaagctaagcccttactagaccaatgggacttaaacccacaaacacttagttaacagctaagcaccctaatcaactggcttcaatctacttctcccgccgccgggaaaaaaggcgggagaagccccggcaggtttgaagctgcttcttcgaatttgcaattcaatatgaaaatcacctcggagctggtaaaaagaggcctaacccctgtctttagatttacagtccaatgcttcactcagccattttacctcacccccactgatgttcgccgaccgttgactattctctacaaaccacaaagacattggaacactatacctattattcggcgcatgagctggagtcctaggcacagctctaagcctccttattcgagccgagctgggccagccaggcaaccttctaggtaacgaccacatctacaacgttatcgtcacagcccatgcatttgtaataatcttcttcatagtaatacccatcataatcggaggctttggcaactgactagttcccctaataatcggtgcccccgatatggcgtttccccgcataaacaacataagcttctgactcttacctccctctctcctactcctgctcgcatctgctatagtggaggccggagcaggaacaggttgaacagtctaccctcccttagcagggaattactcccaccctggagcctccgtagacctaaccatcttctccttacacctagcaggtgtctcctctatcttaggggccatcaatttcatcacaacaattatcaatataaaaccccctgccataacccaataccaaacgcccctcttcgtctgatccgtcctaatcacagcagtcctacttctcctatctctcccagtcctagctgctggcatcactatactactaacagaccgcaacctcaacaccaccttcttcgaccccgccggaggaggagaccccattctataccaacacctattctgatttttcggtcaccctgaagtttatattcttatcctaccaggcttcggaataatctcccatattgtaacttactactccggaaaaaaagaaccatttggatacataggtatggtctgagctatgatatcaattggcttcctagggtttatcgtgtgagcacaccatatatttacagtaggaatagacgtagacacacgagcatatttcacctccgctaccataatcatcgctatccccaccggcgtcaaagtatttagctgactcgccacactccacggaagcaatatgaaatgatctgctgcagtgctctgagccctaggattcatctttcttttcaccgtaggtggcctgactggcattgtattagcaaactcatcactagacatcgtactacacgacacgtactacgttgtagctcacttccactatgtcctatcaataggagctgtatttgccatcataggaggcttcattcactgatttcccctattctcaggctacaccctagaccaaacctacgccaaaatccatttcactatcatattcatcggcgtaaatctaactttcttcccacaacactttctcggcctatccggaatgccccgacgttactcggactaccccgatgcatacaccacatgaaacatcctatcatctgtaggctcattcatttctctaacagcagtaatattaataattttcatgatttgagaagccttcgcttcgaagcgaaaagtcctaatagtagaagaaccctccataaacctggagtgactatatggatgccccccaccctaccacacattcgaagaacccgtatacataaaatctagacaaaaaaggaaggaatcgaaccccccaaagctggtttcaagccaaccccatggcctccatgactttttcaaaaaggtattagaaaaaccatttcataactttgtcaaagttaaattataggctaaatcctatatatcttaatggcacatgcagcgcaagtaggtctacaagacgctacttcccctatcatagaagagcttatcacctttcatgatcacgccctcataatcattttccttatctgcttcctagtcctgtatgcccttttcctaacactcacaacaaaactaactaatactaacatctcagacgctcaggaaatagaaaccgtctgaactatcctgcccgccatcatcctagtcctcatcgccctcccatccctacgcatcctttacataacagacgaggtcaacgatccctcccttaccatcaaatcaattggccaccaatggtactgaacctacgagtacaccgactacggcggactaatcttcaactcctacatacttcccccattattcctagaaccaggcgacctgcgactccttgacgttgacaatcgagtagtactcccgattgaaacccccattcgtataataattacatcacaagacgtcttgcactcatgagctgtccccacattaggcttaaaaacagatgcaattcccggacgtctaaaccaaaccactttcaccgctacacgaccgggggtatactacggtcaatgctctgaaatctgtggagcaaaccacagtttcatgcccatcgtcctagaattaattcccctaaaaatctttgaaatagggcccgtatttaccctatagcaccccctctaccccctctagagcccactgtaaagctaacttagcattaaccttttaagttaaagattaagagaaccaacacctctttacagtgaaatgccccaactaaatactaccgtatggcccaccataattacccccatactccttacactattcctcatcacccaactaaaaatattaaacacaaactaccacctacctccctcaccaaagcccataaaaataaaaaattataacaaaccctgagaaccaaaatgaacgaaaatctgttcgcttcattcattgcccccacaatcctaggcctacccgccgcagtactgatcattctatttccccctctattgatccccacctccaaatatctcatcaacaaccgactaatcaccacccaacaatgactaatcaaactaacctcaaaacaaatgataaccatacacaacactaaaggacgaacctgatctcttatactagtagccttaatcatttttattgccacaactaacctcctcggactcctgccttactcatttacaccaaccacccaactatctataaacctagccatggccatccccttatgagcgggcgcagtgattataggctttcgctctaagattaaaaatgccctagcccacttcttaccacaaggcacacctacaccccttatccccatactagttattatcgaaaccatcagcctactcattcaaccaatagccctggccgtacgcctaaccgctaacattactgcaggccacctactcatgcacctaattggaagcgccaccctagcaatatcaaccattaaccttccctctacacttatcatcttcacaattctaattctactgactatcctagaaatcgctgtcgccttaatccaagcctacgttttcacacttctagtaagcctctacctgcacgacaacacataatgacccaccaatcacatgcctatcatatagtaaaacccagcccatgacccctaacaggggccctctcagccctcctaatgacctccggcctagccatgtgatttcacttccactccataacgctcctcatactaggcctactaaccaacacactaaccatataccaatgatggcgcgatgtaacacgagaaagcacataccaaggccaccacacaccacctgtccaaaaaggccttcgatacgggataatcctatttattacctcagaagtttttttcttcgcaggatttttctgagccttttaccactccagcctagcccctaccccccaattaggagggcactggcccccaacaggcatcaccccgctaaatcccctagaagtcccactcctaaacacatccgtattactcgcatcaggagtatcaatcacctgagctcaccatagtctaatagaaaacaaccgaaaccaaataattcaagcactgcttattacaattttactgggtctctattttaccctcctacaagcctcagagtacttcgagtctcccttcaccatttccgacggcatctacggctcaacattttttgtagccacaggcttccacggacttcacgtcattattggctcaactttcctcactatctgcttcatccgccaactaatatttcactttacatccaaacatcactttggcttcgaagccgccgcctgatactggcattttgtagatgtggtttgactatttctgtatgtctccatctattgatgagggtcttactcttttagtataaatagtaccgttaacttccaattaactagttttgacaacattcaaaaaagagtaataaacttcgccttaattttaataatcaacaccctcctagccttactactaataattattacattttgactaccacaactcaacggctacatagaaaaatccaccccttacgagtgcggcttcgaccctatatcccccgcccgcgtccctttctccataaaattcttcttagtagctattaccttcttattatttgatctagaaattgccctccttttacccctaccatgagccctacaaacaactaacctgccactaatagttatgtcatccctcttattaatcatcatcctagccctaagtctggcctatgagtgactacaaaaaggattagactgaaccgaattggtatatagtttaaacaaaacgaatgatttcgactcattaaattatgataatcatatttaccaaatgcccctcatttacataaatattatactagcatttaccatctcacttctaggaatactagtatatcgctcacacctcatatcctccctactatgcctagaaggaataatactatcgctgttcattatagctactctcataaccctcaacacccactccctcttagccaatattgtgcctattgccatactagtctttgccgcctgcgaagcagcggtgggcctagccctactagtctcaatctccaacacatatggcctagactacgtacataacctaaacctactccaatgctaaaactaatcgtcccaacaattatattactaccactgacatgactttccaaaaaacacataatttgaatcaacacaaccacccacagcctaattattagcatcatccctctactattttttaaccaaatcaacaacaacctatttagctgttccccaaccttttcctccgaccccctaacaacccccctcctaatactaactacctgactcctacccctcacaatcatggcaagccaacgccacttatccagtgaaccactatcacgaaaaaaactctacctctctatactaatctccctacaaatctccttaattataacattcacagccacagaactaatcatattttatatcttcttcgaaaccacacttatccccaccttggctatcatcacccgatgaggcaaccagccagaacgcctgaacgcaggcacatacttcctattctacaccctagtaggctcccttcccctactcatcgcactaatttacactcacaacaccctaggctcactaaacattctactactcactctcactgcccaagaactatcaaactcctgagccaacaacttaatatgactagcttacacaatagcttttatagtaaagatacctctttacggactccacttatgactccctaaagcccatgtcgaagcccccatcgctgggtcaatagtacttgccgcagtactcttaaaactaggcggctatggtataatacgcctcacactcattctcaaccccctgacaaaacacatagcctaccccttccttgtactatccctatgaggcataattataacaagctccatctgcctacgacaaacagacctaaaatcgctcattgcatactcttcaatcagccacatagccctcgtagtaacagccattctcatccaaaccccctgaagcttcaccggcgcagtcattctcataatcgcccacggacttacatcctcattactattctgcctagcaaactcaaactacgaacgcactcacagtcgcatcataatcctctctcaaggacttcaaactctactcccactaatagctttttgatgacttctagcaagcctcgctaacctcgccttaccccccactattaacctactgggagaactctctgtgctagtaaccacgttctcctgatcaaatatcactctcctacttacaggactcaacatactagtcacagccctatactccctctacatatttaccacaacacaatggggctcactcacccaccacattaacaacataaaaccctcattcacacgagaaaacaccctcatgttcatacacctatcccccattctcctcctatccctcaaccccgacatcattaccgggttttcctcttgtaaatatagtttaaccaaaacatcagattgtgaatctgacaacagaggcttacgaccccttatttaccgagaaagctcacaagaactgctaactcatgcccccatgtctaacaacatggctttctcaacttttaaaggataacagctatccattggtcttaggccccaaaaattttggtgcaactccaaataaaagtaataaccatgcacactactataaccaccctaaccctgacttccctaattccccccatccttaccaccctcgttaaccctaacaaaaaaaactcatacccccattatgtaaaatccattgtcgcatccacctttattatcagtctcttccccacaacaatattcatgtgcctagaccaagaagttattatctcgaactgacactgagccacaacccaaacaacccagctctccctaagcttcaaactagactacttctccataatattcatccctgtagcattgttcgttacatggtccatcatagaattctcactgtgatatataaactcagacccaaacattaatcagttcttcaaatatctactcattttcctaattaccatactaatcttagttaccgctaacaacctattccaactgttcatcggctgagagggcgtaggaattatatccttcttgctcatcagttgatgatacgcccgagcagatgccaacacagcagccattcaagcaatcctatacaaccgtatcggcgatatcggtttcatcctcgccttagcatgatttatcctacactccaactcatgagacccacaacaaatagcccttctaaacgctaatccaagcctcaccccactactaggcctcctcctagcagcagcaggcaaatcagcccaattaggtctccacccctgactcccctcagccatagaaggccccaccccagtctcagccctactccactcaagcactatagttgtagcaggaatcttcttactcatccgcttccaccccctagcagaaaatagcccactaatccaaactctaacactatgcttaggcgctatcaccactctgttcgcagcagtctgcgcccttacacaaaatgacatcaaaaaaatcgtagccttctccacttcaagtcaactaggactcataatagttacaatcggcatcaaccaaccacacctagcattcctgcacatctgtacccacgccttcttcaaagccatactatttatgtgctccgggtccatcatccacaaccttaacaatgaacaagatattcgaaaaataggaggactactcaaaaccatacctctcacttcaacctccctcaccattggcagcctagcattagcaggaatacctttcctcacaggtttctactccaaagaccacatcatcgaaaccgcaaacatatcatacacaaacgcctgagccctatctattactctcatcgctacctccctgacaagcgcctatagcactcgaataattcttctcaccctaacaggtcaacctcgcttccccacccttactaacattaacgaaaataaccccaccctactaaaccccattaaacgcctggcagccggaagcctattcgcaggatttctcattactaacaacatttcccccgcatcccccttccaaacaacaatccccctctacctaaaactcacagccctcgctgtcactttcctaggacttctaacagccctagacctcaactacctaaccaacaaacttaaaataaaatccccactatgcacattttatttctccaacatactcggattctaccctagcatcacacaccgcacaatcccctatctaggccttcttacgagccaaaacctgcccctactcctcctagacctaacctgactagaaaagctattacctaaaacaatttcacagcaccaaatctccacctccatcatcacctcaacccaaaaaggcataattaaactttacttcctctctttcttcttcccactcatcctaaccctactcctaatcacataacctattcccccgagcaatctcaattacaatatatacaccaacaaacaatgttcaaccagtaactactactaatcaacgcccataatcatacaaagcccccgcaccaataggatcctcccgaatcaaccctgacccctctccttcataaattattcagcttcctacactattaaagtttaccacaaccaccaccccatcatactctttcacccacagcaccaatcctacctccatcgctaaccccactaaaacactcaccaagacctcaacccctgacccccatgcctcaggatactcctcaatagccatcgctgtagtatatccaaagacaaccatcattccccctaaataaattaaaaaaactattaaacccatataacctcccccaaaattcagaataataacacacccgaccacaccgctaacaatcaatactaaacccccataaataggagaaggcttagaagaaaaccccacaaaccccattactaaacccacactcaacagaaacaaagcatacatcattattctcgcacggactacaaccacgaccaatgatatgaaaaaccatcgttgtatttcaactacaagaacaccaatgaccccaatacgcaaaattaaccccctaataaaattaattaaccactcattcatcgacctccccaccccatccaacatctccgcatgatgaaacttcggctcactccttggcgcctgcctgatcctccaaatcaccacaggactattcctagccatgcactactcaccagacgcctcaaccgccttttcatcaatcgcccacatcactcgagacgtaaattatggctgaatcatccgctaccttcacgccaatggcgcctcaatattctttatctgcctcttcctacacatcgggcgaggcctatattacggatcatttctctactcagaaacctgaaacatcggcattatcctcctgcttgcaactatagcaacagccttcataggctatgtcctcccgtgaggccaaatatcattctgaggggccacagtaattacaaacttactatccgccatcccatacattgggacagacctagttcaatgaatctgaggaggctactcagtagacagtcccaccctcacacgattctttacctttcacttcatcttgcccttcattattgcagccctagcagcactccacctcctattcttgcacgaaacgggatcaaacaaccccctaggaatcacctcccattccgataaaatcaccttccacccttactacacaatcaaagacgccctcggcttacttctcttccttctctccttaatgacattaacactattctcaccagacctcctaggcgacccagacaattataccctagccaaccccttaaacacccctccccacatcaagcccgaatgatatttcctattcgcctacacaattctccgatccgtccctaacaaactaggaggcgtccttgccctattactatccatcctcatcctagcaataatccccatcctccatatatccaaacaacaaagcataatatttcgcccactaagccaatcactttattgactcctagccgcagacctcctcattctaacctgaatcggaggacaaccagtaagctacccttttaccatcattggacaagtagcatccgtactatacttcacaacaatcctaatcctaataccaactatctccctaattgaaaacaaaatactcaaatgggcctgtccttgtagtataaactaatacaccagtcttgtaaaccggagatgaaaacctttttccaaggacaaatcagagaaaaagtctttaactccaccattagcacccaaagctaagattctaatttaaactattctctgttctttcatggggaagcagatttgggtaccacccaagtattgactcacccatcaacaaccgctatgtatttcgtacattactgccagccaccatgaatattgtacggtaccataaatacttgaccacctgtagtacataaaaacccaatccacatcaaaaccccctccccatgcttacaagcaagtacagcaatcaaccttcaactatcacacatcaactgcaactccaaagccacccctcacccactaggataccaacaaacctatccacccttaacagtacatagtacataaaaccatttaccgtacatagcacattacagtcaaatcccttctcgcccccatggatgacccccctcagataggggtcccttgaccaccatcctccgtgaaatcaatatcccgcacaagagtgctactctcctcgctccgggcccataacacttgggggtagctaaagtgaactgtatccgacatctggttcctacttcagggtcataaagcctaaatagcccacacgttccccttaaataagacatcacgatg

SEQ ID NO: 333 - DNA, 16570 bp, Homo sapiens mitochondrial
  3108: "n" refers to a nucleotide at position 3107 of the Cambridge Reference Sequence (CRS, Anderson et al. 1981 Nature 290:457-465), later determined to be absent from the human mtDNA sequence according to the revised CRS (rCRS, Andrews et al. 1999 Nature Genetics 23:147); "n" therefore represents a single nucleotide deletion at a position corresponding to nucleotide 3107 of SEQ ID NO:1 as provided herein.
gatcacaggtctatcaccctattaaccactcacgggagctctccatgcatttggtattttcgtttggggggtgtgcacgcgatagcattgcgagacgctggagccggagcaccctatgtcgcagtatctgtctttgattcctgccccatcctgttatttatcgcacctacgttcaatattacaggcgaacatacttactaaagtgtgttaattaattaatgcttgtaggacatagtaataacaattgaatgtctgcacagccgctttccacacagacatcataacaaaaaatttccaccaaaccccccctcccccgccttctggccacagcacttaaacacatctctgccaaaccccaaaaacaaagaaccctaacaccagcctaaccagatttcaaattttatcttttggcggtatgcacttttaacagtcaccccccaactaacacattattttcccctcccactcccatactactaatctcatcaatacaacccccgcccatcctacccagcacacacaccgctgctaaccccataccccgaaccaaccaaaccccaaagacaccccccacagtttatgtagcttacctcctcaaagcaatacactgaaaatgtttagacgggctcacatcaccccataaacaaataggtttggtcctggcctttctattagctcttagtaagattacacatgcaagcatccccgttccagtgagttcaccctctaaatcaccacgatcaaaagggacaagcatcaagcacgcagcaatgcagctcaaaacgcttagcctagccacacccccacgggaaacagcagtgattaacctttagcaataaacgaaagtttaactaagctatactaaccccagggttggtcaatttcgtgccagccaccgcggtcacacgattaacccaagtcaatagaagccggcgtaaagagtgttttagatcaccccccccccaccataaagctaaaactcacctgagttgtaaaaaactccagttgacacaaaatagactacgaaagtggctttaacatatctgaacacacaatagctaagacccaaactgggattagataccccactatgcttagccctaaacctcaacagttaaatcaacaaaactgctcgccagaacactacgagccacagcttaaaactcaaaggacctggcggtgcttcatatccctctagaggagcctgttctgtaatcgataaaccccgatcaacctcaccacctcttgctcagcctatataccgccatcttcagcaaaccctgatgaaggctacaaagtaagcgcaagtacccacgtaaagacgttaggtcaaggtgtagcccatgaggtggcaagaaatgggctacattttctaccccagaaaactacgatagcccttatgaaacttaagggtcgaaggtggatttagcagtaaactgagagtagagtgcttagttgaacagggccctgaagcgcgtacacaccgcccgtcaccctcctcaagtatacttcaaaggacatttaactaaaacccctacgcatttatatagaggagacaagtcgtaacatggtaagtgtactggaaagtgcacttggacgaaccagagtgtagcttaacacaaagcacccaacttacacttaggagatttcaacttaacttgaccgctctgagctaaacctagccccaaacccactccaccttactaccagacaaccttagccaaaccatttacccagataaagtataggcgatagaaattgaaacctggcgcaatagatatagtaccgcaagggaaagatgaaaaattataaccaagcataatatagcaaggactaacccctataccttctgcataatgaattaactagaaataactttgcaaggagagccaaagctaagacccccgaaaccagacgagctacctaagaacagctaaaagagcacacccgtctatgtagcaaaatagtgggaagatttataggtagaggcgacaaacctaccgagcctggtgatagctggttgtccaagatagaatcttagttcaactttaaatttgcccacagaaccctctaaatccccttgtaaatttaactgttagtccaaagaggaacagctctttggacactaggaaaaaaccttgtagagagagtaaaaaatttaacacccatagtaggcctaaaagcagccaccaattaagaaagcgttcaagctcaacacccactacctaaaaaatcccaaacatataactgaactcctcacacccaattggaccaatctatcaccctatagaagaactaatgttagtataagtaacatgaaaacattctcctccgcataagcctgcgtcagattaaaacactgaactgacaattaacagcccaatatctacaatcaaccaacaagtcattattaccctcactgtcaacccaacacaggcatgctcataaggaaaggttaaaaaaagtaaaaggaactcggcaaatcttaccccgcctgtttaccaaaaacatcacctctagcatcaccagtattagaggcaccgcctgcccagtgacacatgtttaacggccgcggtaccctaaccgtgcaaaggtagcataatcacttgttccttaaatagggacctgtatgaatggctccacgagggttcagctgtctcttacttttaaccagtgaaattgacctgcccgtgaagaggcgggcatgacacagcaagacgagaagaccctatggagctttaatttattaatgcaaacagtacctaacaaacccacaggtcctaaactaccaaacctgcattaaaaatttcggttggggcgacctcggagcagaacccaacctccgagcagtacatgctaagacttcaccagtcaaagcgaactactatactcaattgatccaataacttgaccaacggaacaagttaccctagggataacagcgcaatcctattctagagtccatatcaacaatagggtttacgacctcgatgttggatcaggacatcccgatggtgcagccgctattaaaggttcgtttgttcaacgattaaagtcctacgtgatctgagttcagaccggagtaatccaggtcggtttctatctacnttcaaattcctccctgtacgaaaggacaagagaaataaggcctacttcacaaagcgccttcccccgtaaatgatatcatctcaacttagtattatacccacacccacccaagaacagggtttgttaagatggcagagcccggtaatcgcataaaacttaaaactttacagtcagaggttcaattcctcttcttaacaacatacccatggccaacctcctactcctcattgtacccattctaatcgcaatggcattcctaatgcttaccgaacgaaaaattctaggctatatacaactacgcaaaggccccaacgttgtaggcccctacgggctactacaacccttcgctgacgccataaaactcttcaccaaagagcccctaaaacccgccacatctaccatcaccctctacatcaccgccccgaccttagctctcaccatcgctcttctactatgaacccccctccccatacccaaccccctggtcaacctcaacctaggcctcctatttattctagccacctctagcctagccgtttactcaatcctctgatcagggtgagcatcaaactcaaactacgccctgatcggcgcactgcgagcagtagcccaaacaatctcatatgaagtcaccctagccatcattctactatcaacattactaataagtggctcctttaacctctccacccttatcacaacacaagaacacctctgattactcctgccatcatgacccttggccataatatgatttatctccacactagcagagaccaaccgaacccccttcgaccttgccgaaggggagtccgaactagtctcaggcttcaacatcgaatacgccgcaggccccttcgccctattcttcatagccgaatacacaaacattattataataaacaccctcaccactacaatcttcctaggaacaacatatgacgcactctcccctgaactctacacaacatattttgtcaccaagaccctacttctaacctccctgttcttatgaattcgaacagcatacccccgattccgctacgaccaactcatacacctcctatgaaaaaacttcctaccactcaccctagcattacttatatgatatgtctccatacccattacaatctccagcatcccccctcaaacctaagaaatatgtctgataaaagagttactttgatagagtaaataataggagcttaaacccccttatttctaggactatgagaatcgaacccatccctgagaatccaaaattctccgtgccacctatcacaccccatcctaaagtaaggtcagctaaataagctatcgggcccataccccgaaaatgttggttatacccttcccgtactaattaatcccctggcccaacccgtcatctactctaccatctttgcaggcacactcatcacagcgctaagctcgcactgattttttacctgagtaggcctagaaataaacatgctagcttttattccagttctaaccaaaaaaataaaccctcgttccacagaagctgccatcaagtatttcctcacgcaagcaaccgcatccataatccttctaatagctatcctcttcaacaatatactctccggacaatgaaccataaccaatactaccaatcaatactcatcattaataatcataatggctatagcaataaaactaggaatagccccctttcacttctgagtcccagaggttgcccaaggcacccctctgacatccggcctgcttcttctcacatgacaaaaactagcccccatctcaatcatataccaaatctctccctcactaaacgtaagccttctcctcactctctcaatcttatccatcatagcaggcagttgaggtggattaaaccaaacccagctacgcaaaatcttagcatactcctcaattacccacataggatgaataatagcagttctaccgtacaaccctaacataaccattcttaatttaactatttatattatcctaactactaccgcattcctactactcaacttaaactccagcaccacgaccctactactatctcgcacctgaaacaagctaacatgactaacacccttaattccatccaccctcctctccctaggaggcctgcccccgctaaccggctttttgcccaaatgggccattatcgaagaattcacaaaaaacaatagcctcatcatccccaccatcatagccaccatcaccctccttaacctctacttctacctacgcctaatctactccacctcaatcacactactccccatatctaacaacgtaaaaataaaatgacagtttgaacatacaaaacccaccccattcctccccacactcatcgcccttaccacgctactcctacctatctccccttttatactaataatcttatagaaatttaggttaaatacagaccaagagccttcaaagccctcagtaagttgcaatacttaatttctgtaacagctaaggactgcaaaaccccactctgcatcaactgaacgcaaatcagccactttaattaagctaagcccttactagaccaatgggacttaaacccacaaacacttagttaacagctaagcaccctaatcaactggcttcaatctacttctcccgccgccgggaaaaaaggcgggagaagccccggcaggtttgaagctgcttcttcgaatttgcaattcaatatgaaaatcacctcggagctggtaaaaagaggcctaacccctgtctttagatttacagtccaatgcttcactcagccattttacctcacccccactgatgttcgccgaccgttgactattctctacaaaccacaaagacattggaacactatacctattattcggcgcatgagctggagtcctaggcacagctctaagcctccttattcgagccgagctgggccagccaggcaaccttctaggtaacgaccacatctacaacgttatcgtcacagcccatgcatttgtaataatcttcttcatagtaatacccatcataatcggaggctttggcaactgactagttcccctaataatcggtgcccccgatatggcgtttccccgcataaacaacataagcttctgactcttacctccctctctcctactcctgctcgcatctgctatagtggaggccggagcaggaacaggttgaacagtctaccctcccttagcagggaactactcccaccctggagcctccgtagacctaaccatcttctccttacacctagcaggtgtctcctctatcttaggggccatcaatttcatcacaacaattatcaatataaaaccccctgccataacccaataccaaacgcccctcttcgtctgatccgtcctaatcacagcagtcctacttctcctatctctcccagtcctagctgctggcatcactatactactaacagaccgcaacctcaacaccaccttcttcgaccccgccggaggaggagaccccattctataccaacacctattctgatttttcggtcaccctgaagtttatattcttatcctaccaggcttcggaataatctcccatattgtaacttactactccggaaaaaaagaaccatttggatacataggtatggtctgagctatgatatcaattggcttcctagggtttatcgtgtgagcacaccatatatttacagtaggaatagacgtagacacacgagcatatttcacctccgctaccataatcatcgctatccccaccggcgtcaaagtatttagctgactcgccacactccacggaagcaatatgaaatgatctgctgcagtgctctgagccctaggattcatctttcttttcaccgtaggtggcctgactggcattgtattagcaaactcatcactagacatcgtactacacgacacgtactacgttgtagctcacttccactatgtcctatcaataggagctgtatttgccatcataggaggcttcattcactgatttcccctattctcaggctacaccctagaccaaacctacgccaaaatccatttcactatcatattcatcggcgtaaatctaactttcttcccacaacactttctcggcctatccggaatgccccgacgttactcggactaccccgatgcatacaccacatgaaacatcctatcatctgtaggctcattcatttctctaacagcagtaatattaataattttcatgatttgagaagccttcgcttcgaagcgaaaagtcctaatagtagaagaaccctccataaacctggagtgactatatggatgccccccaccctaccacacattcgaagaacccgtatacataaaatctagacaaaaaaggaaggaatcgaaccccccaaagctggtttcaagccaaccccatggcctccatgactttttcaaaaaggtattagaaaaaccatttcataactttgtcaaagttaaattataggctaaatcctatatatcttaatggcacatgcagcgcaagtaggtctacaagacgctacttcccctatcatagaagagcttatcacctttcatgatcacgccctcataatcattttccttatctgcttcctagtcctgtatgcccttttcctaacactcacaacaaaactaactaatactaacatctcagacgctcaggaaatagaaaccgtctgaactatcctgcccgccatcatcctagtcctcatcgccctcccatccctacgcatcctttacataacagacgaggtcaacgatccctcccttaccatcaaatcaattggccaccaatggtactgaacctacgagtacaccgactacggcggactaatcttcaactcctacatacttcccccattattcctagaaccaggcgacctgcgactccttgacgttgacaatcgagtagtactcccgattgaaacccccattcgtataataattacatcacaagacgtcttgcactcatgagctgtccccacattaggcttaaaaacagatgcaattcccggacgtctaaaccaaaccactttcaccgctacacgaccgggggtatactacggtcaatgctctgaaatctgtggagcaaaccacagtttcatgcccatcgtcctagaattaattcccctaaaaatctttgaaatagggcccgtatttaccctatagcaccccctctaccccctctagagcccactgtaaagctaacttagcattaaccttttaagttaaagattaagagaaccaacacctctttacagtgaaatgccccaactaaatactaccgtatggcccaccataattacccccatactccttacactattcctcatcacccaactaaaaatattaaacacaaactaccacctacctccctcaccaaagcccataaaaataaaaaattataacaaaccctgagaaccaaaatgaacgaaaatctgttcgcttcattcattgcccccacaatcctaggcctacccgccgcagtactgatcattctatttccccctctattgatccccacctccaaatatctcatcaacaaccgactaatcaccacccaacaatgactaatcaaactaacctcaaaacaaatgataaccatacacaacactaaaggacgaacctgatctcttatactagtatccttaatcatttttattgccacaactaacctcctcggactcctgccttactcatttacaccaaccacccaactatctataaacctagccatggccatccccttatgagcgggcgcagtgattataggctttcgctctaagattaaaaatgccctagcccacttcttaccacaaggcacacctacaccccttatccccatactagttattatcgaaaccatcagcctactcattcaaccaatagccctggccgtacgcctaaccgctaacattactgcaggccacctactcatgcacctaattggaagcgccaccctagcaatatcaaccattaaccttccctctacacttatcatcttcacaattctaattctactgactatcctagaaatcgctgtcgccttaatccaagcctacgttttcacacttctagtaagcctctacctgcacgacaacacataatgacccaccaatcacatgcctatcatatagtaaaacccagcccatgacccctaacaggggccctctcagccctcctaatgacctccggcctagccatgtgatttcacttccactccataacgctcctcatactaggcctactaaccaacacactaaccatataccaatgatggcgcgatgtaacacgagaaagcacataccaaggccaccacacaccacctgtccaaaaaggccttcgatacgggataatcctatttattacctcagaagtttttttcttcgcaggatttttctgagccttttaccactccagcctagcccctaccccccaattaggagggcactggcccccaacaggcatcaccccgctaaatcccctagaagtcccactcctaaacacatccgtattactcgcatcaggagtatcaatcacctgagctcaccatagtctaatagaaaacaaccgaaaccaaataattcaagcactgcttattacaattttactgggtctctattttaccctcctacaagcctcagagtacttcgagtctcccttcaccatttccgacggcatctacggctcaacattttttgtagccacaggcttccacggacttcacgtcattattggctcaactttcctcactatctgcttcatccgccaactaatatttcactttacatccaaacatcactttggcttcgaagccgccgcctgatactggcattttgtagatgtggtttgactatttctgtatgtctccatctattgatgagggtcttactcttttagtataaatagtaccgttaacttccaattaactagttttgacaacattcaaaaaagagtaataaacttcgccttaattttaataatcaacaccctcctagccttactactaataattattacattttgactaccacaactcaacggctacatagaaaaatccaccccttacgagtgcggcttcgaccctatatcccccgcccgcgtccctttctccataaaattcttcttagtagctattaccttcttattatttgatctagaaattgccctccttttacccctaccatgagccctacaaacaactaacctgccactaatagttatgtcatccctcttattaatcatcatcctagccctaagtctggcctatgagtgactacaaaaaggattagactgaaccgaattggtatatagtttaaacaaaacgaatgatttcgactcattaaattatgataatcatatttaccaaatgcccctcatttacataaatattatactagcatttaccatctcacttctaggaatactagtatatcgctcacacctcatatcctccctactatgcctagaaggaataatactatcgctgttcattatagctactctcataaccctcaacacccactccctcttagccaatattgtgcctattgccatactagtctttgccgcctgcgaagcagcggtgggcctagccctactagtctcaatctccaacacatatggcctagactacgtacataacctaaacctactccaatgctaaaactaatcgtcccaacaattatattactaccactgacatgactttccaaaaaacacataatttgaatcaacacaaccacccacagcctaattattagcatcatccctctactattttttaaccaaatcaacaacaacctatttagctgttccccaaccttttcctccgaccccctaacaacccccctcctaatactaactacctgactcctacccctcacaatcatggcaagccaacgccacttatccagtgaaccactatcacgaaaaaaactctacctctctatactaatctccctacaaatctccttaattataacattcacagccacagaactaatcatattttatatcttcttcgaaaccacacttatccccaccttggctatcatcacccgatgaggcaaccagccagaacgcctgaacgcaggcacatacttcctattctacaccctagtaggctcccttcccctactcatcgcactaatttacactcacaacaccctaggctcactaaacattctactactcactctcactgcccaagaactatcaaactcctgagccaacaacttaatatgactagcttacacaatagcttttatagtaaagatacctctttacggactccacttatgactccctaaagcccatgtcgaagcccccatcgctgggtcaatagtacttgccgcagtactcttaaaactaggcggctatggtataatacgcctcacactcattctcaaccccctgacaaaacacatagcctaccccttccttgtactatccctatgaggcataattataacaagctccatctgcctacgacaaacagacctaaaatcgctcattgcatactcttcaatcagccacatagccctcgtagtaacagccattctcatccaaaccccctgaagcttcaccggcgcagtcattctcataatcgcccacggacttacatcctcattactattctgcctagcaaactcaaactacgaacgcactcacagtcgcatcataatcctctctcaaggacttcaaactctactcccactaatagctttttgatgacttctagcaagcctcgctaacctcgccttaccccccactattaacctactgggagaactctctgtgctagtaaccacgttctcctgatcaaatatcactctcctacttacaggactcaacatactagtcacagccctatactccctctacatatttaccacaacacaatgaggctcactcacccaccacattaacaacataaaaccctcattcacacgagaaaacaccctcatgttcatacacctatcccccattctcctcctatccctcaaccccgacatcattaccgggttttcctcttgtaaatatagtttaaccaaaacatcagattgtgaatctgacaacagaggcttacgaccccttatttaccgagaaagctcacaagaactgctaactcatgcccccatgtctaacaacatggctttctcaacttttaaaggataacagctatccattggtcttaggccccaaaaattttggtgcaactccaaataaaagtaataaccatgcacactactataaccaccctaaccctgacttccctaattccccccatccttaccaccctcgttaaccctaacaaaaaaaactcatacccccattatgtaaaatccattgtcgcatccaccttcattatcagtctcttccccacaacaatattcatgtgcctagaccaagaagttattatctcgaactgacactgagccacaacccaaacaacccagctctccctaagcttcaaactagactacttctccataatattcatccctgtagcattgttcgttacatggtccatcatagaattctcactgtgatatataaactcagacccaaacattaatcagttcttcaaatatctactcattttcctaattaccatactaatcttagttaccgctaacaacctattccaactgttcatcggctgagagggcgtaggaattatatccttcttgctcatcagttgatgatacgcccgagcagatgccaacacagcagccattcaagcaatcctatacaaccgtatcggcgatatcggtttcatcctcgccttagcatgatttatcctacactccaactcatgagacccacaacaaatagcccttctaaacgctaatccaagcctcaccccactactaggcctcctcctagcagcagcaggcaaatcagcccaattaggtctccacccctgactcccctcagccatagaaggccccaccccagtctcagccctactccactcaagcactatagttgtagcaggaatcttcttactcatccgcttccaccccctagcagaaaatagcccactaatccaaactctaacactatgcttaggcgctatcaccactctgttcgcagcagtctgcgcccttacacaaaatgacatcaaaaaaatcgtagccttctccacttcaagtcaactaggactcataatagttacaatcggcatcaaccaaccacacctagcattcctgcacatctgtacccacgccttcttcaaagccatactatttatgtgctccgggtccatcatccacaaccttaacaatgaacaagatattcgaaaaataggaggactactcaaaaccatacctctcacttcaacctccctcaccattggcagcctagcattagcaggaatacctttcctcacaggtttctactccaaagaccacatcatcgaaaccgcaaacatatcatacacaaacgcctgagccctatctattactctcatcgctacctccctgacaagcgcctatagcactcgaataattcttctcaccctaacaggtcaacctcgcttccccacccttactaacattaacgaaaataaccccaccctactaaaccccattaaacgcctagcagccggaagcctattcgcaggatttctcattactaacaacatttcccccgcatcccccttccaaacaacaatccccctctacctaaaactcacagccctcgctgtcactttcctaggacttctaacagccctagacctcaactacctaaccaacaaacttaaaataaaatccccactatgcacattttatttctccaacatactcggattctaccctagcatcacacaccgcacaatcccctatctaggccttcttacgagccaaaacctgcccctactcctcctagacctaacctgactagaaaagctattacctaaaacaatttcacagcaccaaatctccacctccatcatcacctcaacccaaaaaggcataattaaactttacttcctctctttcttcttcccactcatcctaaccctactcctaatcacataacctattcccccgagcaatctcaattacaatatatacaccaacaaacaatgttcaaccagtaactactactaatcaacgcccataatcatacaaagcccccgcaccaataggatcctcccgaatcaaccctgacccctctccttcataaattattcagcttcctacactattaaagtttaccacaaccaccaccccatcatactctttcacccacaacaccaatcctacctccatcgctaaccccactaaaacactcaccaagacctcaacccctgacccccatgcctcaggatactcctcaatagccatcgctgtagtatatccaaagacaaccatcattccccctaaataaattaaaaaaactattaaacccatataacctcccccaaaattcagaataataacacacccgaccacaccgctaacaatcaatactaaacccccataaataggagaaggcttagaagaaaaccccacaaaccccattactaaacccacactcaacagaaacaaagcatacatcattattctcgcacggactacaaccacgaccaatgatatgaaaaaccatcgttgtatttcaactacaagaacaccaatgaccccaatacgcaaaattaaccccctaataaaattaattaaccactcattcatcgacctccccaccccatccaacatctccgcatgatgaaacttcggctcactccttggcgcctgcctgatcctccaaatcaccacaggactattcctagccatgcactactcaccagacgcctcaaccgccttttcatcaatcgcccacatcactcgagacgtaaattatggctgaatcatccgctaccttcacgccaatggcgcctcaatattctttatctgcctcttcctacacatcgggcgaggcctatattacggatcatttctctactcagaaacctgaaacatcggcattatcctcctgcttgcaactatagcaacagccttcataggctatgtcctcccgtgaggccaaatatcattctgaggggccacagtaattacaaacttactatccgccatcccatacattgggacagacctagttcaatgaatctgaggaggctactcagtagacagtcccaccctcacacgattctttacctttcacttcatcttgcccttcattattgcagccctagcagcactccacctcctattcttgcacgaaacgggatcaaacaaccccctaggaatcacctcccattccgataaaatcaccttccacccttactacacaatcaaagacgccctcggcttacttctcttccttctctccttaatgacattaacactattctcaccagacctcctaggcgacccagacaattataccctagccaaccccttaaacacccctccccacatcaagcccgaatgatatttcctattcgcctacacaattctccgatccgtccctaacaaactaggaggcgtccttgccctattactatccatcctcatcctagcaataatccccatcctccatatatccaaacaacaaagcataatatttcgcccactaagccaatcactttattgactcctagccgcagacctcctcattctaacctgaatcggaggacaaccagtaagctacccttttaccatcattggacaagtagcatccgtactatacttcacaacaatcctaatcctaataccaactatctccctaattgaaaacaaaatactcaaatgggcctgtccttgtagtataaactaatacaccagtcttgtaaaccggagatgaaaacctttttccaaggacaaatcagagaaaaagtctttaactccaccattagcacccaaagctaagattctaatttaaactattctctgttctttcatggggaagcagatttgggtaccacccaagtattgactcacccatcaacaaccgctatgtatttcgtacattactgccagtcaccatgaatattgtacggtaccataaatacttgaccacctgtagtacataaaaacccaatccacatcaaaaccccctccccatgcttacaagcaagtacagcaatcaaccttcaactatcacacatcaactgcaactccaaagccacccctcacccactaggataccaacaaacctatccacccttaacagtacatagtacataaaaccatttaccgtacatagcacattacagtcaaatcccttctcgcccccatggatgacccccctcagataggggtcccttgaccaccatcctccgtgaaatcaatatcccgcacaagagtgctactctcctcgctccgggcccataacacttgggggtagctaaagtgaactgtatccgacatctggttcctacttcagggtcataaagcctaaatagcccacacgttccccttaaataagacatcacgatg

SEQ ID NO: 334 - DNA, 16570 bp, Homo sapiens mitochondrial
  3108: "n" refers to a nucleotide at position 3107 of the Cambridge Reference Sequence (CRS, Anderson et al. 1981 Nature 290:457-465), later determined to be absent from the human mtDNA sequence according to the revised CRS (rCRS, Andrews et al. 1999 Nature Genetics 23:147); "n" therefore represents a single nucleotide deletion at a position corresponding to nucleotide 3107 of SEQ ID NO:1 as provided herein.
gatcacaggtctatcaccctattaaccactcacgggagctctccatgcatttggtattttcgtctggggggtatgcacgcgatagcattgcgagacgctggagccggagcaccctatgtcgcagtatctgtctttgattcctgcctcatcctattatttatcgcacctacgttcaatattacaggcgaacatacttactaaagtgtgttaattaattaatgcttgtaggacataataataacaattgaatgtctgcacagccgctttccacacagacatcataacaaaaaatttccaccaaaccccccctcccccgccttctggccacagcacttaaacacatctctgccaaaccccaaaaacaaagaaccctaacaccagcctaaccagatttcaaattttatcttttggcggtatgcacttttaacagtcaccccccaactaacacattattttcccctcccactcccatactactaatctcatcaatacaacccccgcccatcctacccagcacacacacaccgctgctaaccccataccccgaaccaaccaaaccccaaagacaccccccacagtttatgtagcttacctcctcaaagcaatacactgaaaatgtttagacgggctcacatcaccccataaacaaataggtttggtcctagcctttctattagctcttagtaagattacacatgcaagcatccccgttccagtgagttcaccctctaaatcaccacgatcaaaagggacaagcatcaagcacgcagcaatgcagctcaaaacgcttagcctagccacacccccacgggaaacagcagtgattaacctttagcaataaacgaaagtttaactaagctatactaaccccagggttggtcaatttcgtgccagccaccgcggtcacacgattaacccaagtcaatagaagccggcgtaaagagtgttttagatcaccccctccccaataaagctaaaactcacctgagttgtaaaaaactccagttgacacaaaatagactacgaaagtggctttaacatatctgaacacacaatagctaagacccaaactgggattagataccccactatgcttagccctaaacctcaacagttaaatcaacaaaactgctcgccagaacactacgagccacagcttaaaactcaaaggacctggcggtgcttcatatccctctagaggagcctgttctgtaatcgataaaccccgatcaacctcaccacctcttgctcagcctatataccgccatcttcagcaaaccctgatgaaggctacaaagtaagcgcaagtacccacgtaaagacgttaggtcaaggtgtagcccatgaggtggcaagaaatgggctacattttctaccccagaaaactacgatagcccttatgaaacttaagggtcgaaggtggatttagcagtaaactgagagtagagtgcttagttgaacagggccctgaagcgcgtacacaccgcccgtcaccctcctcaagtatacttcaaaggacatttaactaaaacccctacgcatttatatagaggagacaagtcgtaacatggtaagtgtactggaaagtgcacttggacgaaccagagtgtagcttaacacaaagcacccaacttacacttaggagatttcaacttaacttgaccgctctgagctaaacctagccccaaacccactccaccttactaccagacaaccttagccaaaccatttacccaaataaagtataggcgatagaaattgaaacctggcgcaatagatatagtaccgcaagggaaagatgaaaaattataaccaagcataatatagcaaggactaacccctataccttctgcataatgaattaactagaaataactttgcaaggagagccaaagctaagacccccgaaaccagacgagctacctaagaacagctaaaagagcacacccgtctatgtagcaaaatagtgggaagatttataggtagaggcgacaaacctaccgagcctggtgatagctggttgtccaagatagaatcttagttcaactttaaatttgcccacagaaccctctaaatccccttgtaaatttaactgttagtccaaagaggaacagctctttggacactaggaaaaaaccttgtagagagagtaaaaaatttaacacccatagtaggcctaaaagcagccaccaattaagaaagcgttcaagctcaacacccactacctaaaaaatcccaaacatataactgaactcctcacacccaattggaccaatctatcaccctatagaagaactaatgttagtataagtaacatgaaaacattctcctccgcataagcctgcgtcagattaaaacactgaactgacaattaacagcccaatatctacaatcaaccaacaagtcattattaccctcactgtcaacccaacacaggcatgctcataaggaaaggttaaaaaaagtaaaaggaactcggcaaatcttaccccgcctgtttaccaaaaacatcacctctagcatcaccagtattagaggcaccgcctgcccagtgacacatgtttaacggccgcggtaccctaaccgtgcaaaggtagcataatcacttgttccttaaatagggacctgtatgaatggctccacgagggttcagctgtctcttacttttaaccagtgaaattgacctgcccgtgaagaggcgggcataacacagcaagacgagaagaccctatggagctttaatttattaatgcaaacagtacctaacaaacccacaggtcctaaactaccaaacctgcattaaaaatttcggttggggcgacctcggagcagaacccaacctccgagcagtacatgctaagacttcaccagtcaaagcgaactactatactcaattgatccaataacttgaccaacggaacaagttaccctagggataacagcgcaatcctattctagagtccatatcaacaatagggtttacgacctcgatgttggatcaggacatcccgatggtgcagccgctattaaaggttcgtttgttcaacgattaaagtcctacgtgatctgagttcagaccggagtaatccaggtcggtttctatctacnttcaaattcctccctgtacgaaaggacaagagaaataaggcctacttcacaaagcgccttcccccgtaaatgatatcatctcaacttagtattatacccacacccacccaagaacagggtttgttaagatggcagagcccggtaatcgcataaaacttaaaactttacagtcagaggttcaattcctcttcttaacaacatacccatggccaacctcctactcctcattgtacccattctaatcgcaatggcattcctaatgcttaccgaacgaaaaattctaggctatatacaactacgcaaaggccccaacgttgtaggcccctacgggctactacaacccttcgctgacgccataaaactcttcaccaaagagcccctaaaacccgccacatctaccatcaccctctacatcaccgccccgaccttagctctcaccatcgctcttctactatgaacccccctccccatacccaaccccctggtcaacctcaacctaggcctcctatttattctagccacctctagcctagccgtttactcaatcctctgatcagggtgagcatcaaactcaaactacgccctgatcggcgcactgcgagcagtagcccaaacaatctcatatgaagtcaccctagccatcattctactatcaacattactaataagtggctcctttaacctctccacccttatcacaacacaagaacacctctgattactcctgccatcatgacccttggccataatatgatttatctccacactagcagagaccaaccgaacccccttcgaccttgccgaaggagagtccgaactagtctcaggcttcaacatcgaatacgccgcaggccccttcgccctattcttcatagccgaatacacaaacattattataataaacaccctcaccactacaatcttcctaggaacaacatatgacgcactctcccctgaactctacacaacatattttgtcaccaagaccctacttctaacctccctgttcttatgaattcgaacagcatacccccgattccgctacgaccaactcatacacctcctatgaaaaaacttcctaccactcaccctagcattacttatatgatatgtctccatacccattacaatctccagcattccccctcaaacctaagaaatatgtctgataaaagagttactttgatagagtaaataataggagcttaaacccccttatttctaggactatgagaatcgaacccatccctgagaatccaaaattctccgtgccacctatcacaccccatcctaaagtaaggtcagctaaataagctatcgggcccataccccgaaaatgttggttatacccttcccgtactaattaatcccctggcccaacccgtcatctactctaccatctttgcaggcacactcatcacagcgctaagctcgcactgattttttacctgagtaggcctagaaataaacatgctagcttttattccagttctaaccaaaaaaataaaccctcgttccacagaagctgccatcaagtatttcctcacgcaagcaaccgcatccataatccttctaatagctatcctcttcaacaatatactctccggacaatgaaccataaccaatactaccaatcaatactcatcattaataatcataatggctatagcaataaaactaggaatagccccctttcacttctgagtcccagaggttacccaaggcacccctctgacatccggcctgcttcttctcacatgacaaaaactagcccccatctcaatcatataccaaatctctccctcactaaacgtaagccttctcctcactctctcaatcttatccatcatagcaggcagttgaggtggattaaaccaaacccagctacgcaaaatcttagcatactcctcaattacccacataggatgaataatagcagttctaccgtacaaccctaacataaccattcttaatttaactatttatattatcctaactactaccgcattcctactactcaacttaaactccagcaccacgaccctactactatctcgcacctgaaacaagctaacatgactaacacccttaattccatccaccctcctctccctaggaggcctgcccccgctaaccggctttttgcccaaatgggccattatcgaagaattcacaaaaaacaatagcctcatcatccccaccatcatagccaccatcaccctccttaacctctacttctacctacgcctaatctactccacctcaatcacactactccccatatctaacaacgtaaaaataaaatgacagtttgaacatacaaaacccaccccattcctccccacactcatcgcccttaccacgctactcctacctatctccccttttatactaataatcttatagaaatttaggttaaatacagaccaagagccttcaaagccctcagtaagttgcaatacttaatttctgtaacagctaaggactgcaaaaccccactctgcatcaactgaacgcaaatcagccactttaattaagctaagcccttactagaccaatgggacttaaacccacaaacacttagttaacagctaagcaccctaatcaactggcttcaatctacttctcccgccgccgggaaaaaaggcgggagaagccccggcaggtttgaagctgcttcttcgaatttgcaattcaatatgaaaatcacctcggagctggtaaaaagaggcctaacccctgtctttagatttacagtccaatgcttcactcagccattttacctcacccccactgatgttcgccgaccgttgactattctctacaaaccacaaagacattggaacactatacctattattcggcgcatgagctggagtcctaggcacagctctaagcctccttattcgagccgagctgggccagccaggcaaccttctaggtaacgaccacatctacaacgttatcgtcacagcccatgcatttgtaataatcttcttcatagtaatacccatcataatcggaggctttggcaactgactagttcccctaataatcggtgcccccgatatggcgtttccccgcataaacaacataagcttctgactcttacctccctctctcctactcctgctcgcatctgctatagtggaggccggagcaggaacaggttgaacagtctaccctcccttagcagggaactactcccaccctggagcctccgtagacctaaccatcttctccttacacctagcaggtgtctcctctatcttaggggccatcaatttcatcacaacaattatcaatataaaaccccctgccataacccaataccaaacgcccctcttcgtctgatccgtcctaatcacagcagtcctacttctcctatctctcccagtcctagctgctggcatcactatactactaacagaccgcaacctcaacaccaccttcttcgaccccgccggaggaggagaccccattctataccaacacctattctgatttttcggtcaccctgaagtttatattcttatcctaccaggcttcggaataatctcccatattgtaacttactactccggaaaaaaagaaccatttggatacataggtatggtctgagctatgatatcaattggcttcctagggtttatcgtgtgagcacaccatatatttacagtaggaatagacgtagacacacgagcatatttcacctccgctaccataatcatcgctatccccaccggcgtcaaagtatttagctgactcgccacactccacggaagcaatatgaaatgatctgctgcagtgctctgagccctaggattcatctttcttttcaccgtaggtggcctgactggcattgtattagcaaactcatcactagacatcgtactacacgacacgtactacgttgtagcccacttccactatgtcctatcaataggagctgtatttgccatcataggaggcttcattcactgatttcccctattctcaggctacaccctagaccaaacctacgccaaaatccatttcactatcatattcatcggcgtaaatctaactttcttcccacaacactttctcggcctatccggaatgccccgacgttactcggactaccccgatgcatacaccacatgaaacatcctatcatctgtaggctcattcatttctctaacagcagtaatattaataattttcatgatttgagaagccttcgcttcgaagcgaaaagtcctaatagtagaagaaccctccataaacctggagtgactatatggatgccccccaccctaccacacattcgaagaacccgtatacataaaatctagacaaaaaaggaaggaatcgaaccccccaaagctggtttcaagccaaccccatggcctccatgactttttcaaaaaggtattagaaaaaccatttcataactttgtcaaagttaaattataggctaaatcctatatatcttaatggcacatgcagcgcaagtaggtctacaagacgctacttcccctatcatagaagagcttatcacctttcatgatcacgccctcataatcattttccttatctgcttcctagtcctgtatgcccttttcctaacactcacaacaaaactaactaatactaacatctcagacgctcaggaaatagaaaccgtctgaactatcctgcccgccatcatcctagtcctcatcgccctcccatccctacgcatcctttacataacagacgaggtcaacgatccctcccttaccatcaaatcaattggccaccaatggtactgaacctacgagtacaccgactacggcggactaatcttcaactcctacatacttcccccattattcctagaaccaggcgacctgcgactccttgacgttgacaatcgagtagtactcccgattgaagcccccattcgtataataattacatcacaagacgtcttgcactcatgagctgtccccacattaggcttaaaaacagatgcaattcccggacgtctaaaccaaaccactttcaccgctacacgaccgggggtatactacggtcaatgctctgaaatctgtggagcaaaccacagtttcatgcccatcgtcctagaattaattcccctaaaaatctttgaaatagggcccgtatttaccctatagcaccccctctaccccctctagagcccactgtaaagctaacttagcattaaccttttaagttaaagattaagagaaccaacacctctttacagtgaaatgccccaactaaatactaccgtatggcccaccataattacccccatactccttacactattcctcatcacccaactaaaaatattaaacacaaactaccacctacctccctcaccaaagcccataaaaataaaaaattataacaaaccctgagaaccaaaatgaacgaaaatctgttcgcttcattcattgcccccacaatcctaggcctacccgccgcagtactgatcattctatttccccctctattgatccccacctccaaatatctcatcaacaaccgactaatcaccacccaacaatgactaatcaaactaacctcaaaacaaatgataaccatacacaacactaaaggacgaacctgatctcttatactagtatccttaatcatttttattgccacaactaacctcctcggactcctgcctcactcatttacaccaaccacccaactatctataaacctagccatggccatccccttatgagcgggcgcagtgattataggctttcgctctaagattaaaaatgccctagcccacttcttaccacaaggcacacctacaccccttatccccatactagttattatcgaaaccatcagcctactcattcaaccaatagccctggccgtacgcctaaccgctaacattactgcaggccacctactcatgcacctaattggaagcgccaccctagcaatatcaaccattaaccttccctctacacttatcatcttcacaattctaattctactgactatcctagaaatcgctgtcgccttaatccaagcctacgttttcacacttctagtaagcctctacctgcacgacaacacataatgacccaccaatcacatgcctatcatatagtaaaacccagcccatgacccctaacaggggccctctcagccctcctaatgacctccggcctagccatgtgatttcacttccactccataacgctcctcatactaggcctactaaccaacacactaaccatataccaatgatggcgcgatgtaacacgagaaagcacataccaaggccaccacacaccacctgtccaaaaaggccttcgatacgggataatcctatttattacctcagaagtttttttcttcgcaggatttttctgagccttttaccactccagcctagcccctaccccccaattaggagggcactggcccccaacaggcatcaccccgctaaatcccctagaagtcccactcctaaacacatccgtattactcgcatcaggagtatcaatcacctgagctcaccatagtctaatagaaaacaaccgaaaccaaataattcaagcactgcttattacaattttactgggtctctattttaccctcctacaagcctcagagtacttcgagtctcccttcaccatttccgacggcatctacggctcaacattttttgtagccacaggcttccacggacttcacgtcattattggctcaactttcctcactatctgcttcatccgccaactaatatttcactttacatccaaacatcactttggcttcgaagccgccgcctgatactggcattttgtagatgtggtttgactatttctgtatgtctccatctattgatgagggtcttactcttttagtataaatagtaccgttaacttccaattaactagttttgacaacattcaaaaaagagtaataaacttcgccttaattttaataatcaacaccctcctagccttactactaataattattacattttgactaccacaactcaacggctacatagaaaaatccaccccttacgagtgcggcttcgaccctatatcccccgcccgcgtccctttctccataaaattcttcttagtagctattaccttcttattatttgatctagaaattgccctccttttacccctaccatgagccctacaaacaactaacctgccactaatagttatgtcatccctcttattaatcatcatcctagccctaagtctggcctatgagtgactacaaaaaggattagactgaaccgaattggtatatagtttaaacaaaacgaatgatttcgactcattaaattatgataatcatatttaccaaatgcccctcatttacataaatattatactagcatttaccatctcacttctaggaatactagtatatcgctcacacctcatatcctccctactatgcctagaaggaataatactatcgctgttcattatagctactctcataaccctcaacacccactccctcttagccaatattgtgcctattgccatactagtctttgccgcctgcgaagcagcggtgggcctagccctactagtctcaatctccaacacatatggcctagactacgtacataacctaaacctactccaatgctaaaactaatcgtcccaacaattatattactaccactgacatgactttccaaaaaacacataatttgaatcaacacaaccacccacagcctaattattagcatcatccctctactattttttaaccaaatcaacaacaacctatttagctgttccccaaccttttcctccgaccccctaacaacccccctcctaatactaactacctgactcctacccctcacaatcatggcaagccaacgccacttatccagtgaaccactatcacgaaaaaaactctacctctctatactaatctccctacaaatctccttaattataacattcacagccacagaactaatcatattttatatcttcttcgaaaccacacttatccccaccttggctatcatcacccgatgaggcaaccagccagaacgcctgaacgcaggcacatacttcctattctacaccctagtaggctcccttcccctactcatcgcactaatttacactcacaacaccctaggctcactaaacattctactactcactctcactgcccaagaactatcaaactcctgagccaacaacttaatatgactagcttacacaatagcttttatagtaaagatacctctttacggactccacttatgactccctaaagcccatgtcgaagcccccatcgctgggtcaatagtacttgccgcagtactcttaaaactaggcggctatggtataatacgcctcacactcattctcaaccccctgacaaaacacatagcctaccccttccttgtactatccctatgaggcataattataacaagctccatctgcctacgacaaacagacctaaaatcgctcattgcatactcttcaatcagccacatagccctcgtagtaacagccattctcatccaaaccccctgaagcttcaccggcgcagtcattctcataatcgcccacgggcttacatcctcattactattctgcctagcaaactcaaactacgaacgcactcacagtcgcatcataatcctctctcaaggacttcaaactctactcccactaatagctttttgatgacttctagcaagcctcgctaacctcgccttaccccccactattaacctactgggagaactctctgtgctagtaaccacgttctcctgatcaaatatcactctcctacttacaggactcaacatactagtcacagccctatactccctctacatatttaccacaacacaatggggctcactcacccaccacattaacaacataaaaccctcattcacacgagaaaacaccctcatgttcatacacctatcccccattctcctcctatccctcaaccccgacatcattaccgggttttcctcttgtaaatatagtttaaccaaaacatcagattgtgaatctgacaacagaggcttacgaccccttatttaccgagaaagctcacaagaactgctaactcatgcccccatgtctaacaacatggctttctcaacttttaaaggataacagctatccattggtcttaggccccaaaaattttggtgcaactccaaataaaagtaataaccatgcacactactataaccaccctaaccctgacttccctaattccccccatccttaccaccctcgttaaccctaacaaaaaaaactcatacccccattatgtaaaatccattgtcgcatccacctttattatcagtctcttccccacaacaatattcatgtgcctagaccaagaagttattatctcgaactgacactgagccacaacccaaacaacccagctctccctaagcttcaaactagactacttctccataatattcatccctgtagcattgttcgttacatggtccatcatagaattctcactgtgatatataaactcagacccaaacattaatcagttcttcaaatatctactcatcttcctaattaccatactaatcttagttaccgctaacaacctattccaactgttcatcggctgagagggcgtaggaattatatccttcttgctcatcagttgatgatacgcccgagcagatgccaacacagcagccattcaagcaatcctatacaaccgtatcggcgatatcggtttcatcctcgccttagcatgatttatcctacactccaactcatgagacccacaacaaatagcccttctaaacgctaatccaagcctcaccccactactaggcctcctcctagcagcagcaggcaaatcagcccaattaggtctccacccctgactcccctcagccatagaaggccccaccccagtctcagccctactccactcaagcactatagttgtagcaggaatcttcttactcatccgcttccaccccctagcagaaaatagcccactaatccaaactctaacactatgcttaggcgctatcaccactctgttcgcagcagtctgcgcccttacacaaaatgacatcaaaaaaatcgtagccttctccacttcaagtcaactaggactcataatagttacaatcggcatcaaccaaccacacctagcattcctgcacatctgtacccacgccttcttcaaagccatactatttatgtgctccgggtccatcatccacaaccttaacaatgaacaagatattcgaaaaataggaggactactcaaaaccatacctctcacttcaacctccctcaccattggcagcctagcattagcaggaatacctttcctcacaggtttctactccaaagaccacatcatcgaaaccgcaaacatatcatacacaaacgcctgagccctatctattactctcatcgctacctccctgacaagcgcctatagcactcgaataattcttctcaccctaacaggtcaacctcgcttccccacccttactaacattaacgaaaataaccccaccctactaaaccccattaaacgcctggcagccggaagcctattcgcaggatttctcattactaacaacatttcccccgcatcccccttccaaacaacaatccccctctacctaaaactcacagccctcgctgtcactttcctaggacttctaacagccctagacctcaactacctaaccaacaaacttaaaataaaatccccactatgcacattttatttctccaacatactcggattctaccctagcatcacacaccgcacaatcccctatctaggccttcttacgagccaaaacctgcccctactcctcctagacctaacctgactagaaaagctattacctaaaacaatttcacagcaccaaatctccacctccatcatcacctcaacccaaaaaggcataattaaactttacttcctctctttcttcttcccactcatcctaaccctactcctaatcacataacctattcccccgagcaatctcaattacaatatatacaccaacaaacaatgttcaaccagtaactactactaatcaacgcccataatcatacaaagcccccgcaccaataggatcctcccgaatcaaccctgacccctctccttcataaattattcagcttcctacactattaaagtttaccacaaccaccaccccatcatactctttcacccacagcaccaatcctacctccatcgctaaccccactaaaacactcaccaagacctcaacccctgacccccatgcctcaggatactcctcaatagccatcgctgtagtatatccaaagacaaccatcattccccctaaataaattaaaaaaactattaaacccatataacctcccccaaaattcagaataataacacacccgaccacaccgctaacaatcaatactaaacccccataaataggagaaggcttagaagaaaaccccacaaaccccattactaaacccacactcaacagaaacaaagcatacatcattattctcgcacggactacaaccacgaccaatgatatgaaaaaccatcgttgtatttcaactacaagaacaccaatgaccccaatacgcaaaactaaccccctaataaaattaattaaccactcattcatcgacctccccaccccatccaacatctccgcatgatgaaacttcggctcactccttggcgcctgcctgatcctccaaatcaccacaggactattcctagccatgcactactcaccagacgcctcaaccgccttttcatcaatcgcccacatcactcgagacgtaaattatggctgaatcatccgctaccttcacgccaatggcgcctcaatattctttatctgcctcttcctacacatcgggcgaggcctatattacggatcatttctctactcagaaacctgaaacatcggcattatcctcctgcttgcaactatagcaacagccttcataggctatgtcctcccgtgaggccaaatatcattctgaggggccacagtaattacaaacttactatccgccatcccatacattgggacagacctagttcaatgaatctgaggaggctactcagtagacagtcccaccctcacacgattctttacctttcacttcatcttgcccttcattattgcagccctagcagcactccacctcctattcttgcacgaaacgggatcaaacaaccccctaggaatcacctcccattccgataaaatcaccttccacccttactacacaatcaaagacgccctcggcttacttctcttccttctctccttaatgacattaacactattctcaccagacctcctaggcgacccagacaattataccctagccaaccccttaaacacccctccccacatcaagcccgaatgatatttcctattcgcctacacaattctccgatccgtccctaacaaactaggaggcgtccttgccctattactatccatcctcatcctagcaataatccccatcctccatatatccaaacaacaaagcataatatttcgcccactaagccaatcactttattgactcctagccgcagacctcctcattctaacctgaatcggaggacaaccagtaagctacccttttaccatcattggacaagtagcatccgtactatacttcacaacaatcctaatcctaataccaactatctccctaattgaaaacaaaatactcaaatgggcctgtccttgtagtataaactaatacaccagtcttgtaaaccggagatgaaaacctttttccaaggacaaatcagagaaaaagtctttaactccaccattagcacccaaagctaagattctaatttaaactattctctgttctttcatggggaagcagatttgggtaccacccaagtattgactcacccatcaacaaccgctatgtatttcgtacattactgccagccaccatgaatattgtacagtaccataaatacttgaccacctgtagtacataaaaacccaatccacatcaaaaccccctccccatgcttacaagcaagtacagcaatcaaccctcaactatcacacatcaactgcaactccaaagccacccctcacccactaggataccaacaaacctacccacccttaacagtacatagtacataaagccatttaccgtacatagcacattacagtcaaatcccttctcgtccccatggatgacccccctcagataggggtcccttgaccaccatcctccgtgaaatcaatatcccgcacaagagtgctactctcctcgctccgggcccataacacttgggggtagctaaagtgaactgtatccgacatctggttcctacttcagggtcataaagcctaaatagcccacacgttccccttaaataagacatcacgatg

SEQ ID NO: 335 - DNA, 16570 bp, Homo sapiens mitochondrial
  3108: "n" refers to a nucleotide at position 3107 of the Cambridge Reference Sequence (CRS, Anderson et al. 1981 Nature 290:457-465), later determined to be absent from the human mtDNA sequence according to the revised CRS (rCRS, Andrews et al. 1999 Nature Genetics 23:147); "n" therefore represents a single nucleotide deletion at a position corresponding to nucleotide 3107 of SEQ ID NO:1 as provided herein.
gatcacaggtctatcaccctattaaccactcacgggagctctccatgcatttggtattttcgtctggggggtgtgcacgcgatagcattgcgagacgctggagccggagcaccctatgtcgcagtatctgtctttgattcctgcctcatcctattatttatcgcacctacgttcaatattacaggcgaacatacttactaaagtgtgttaattaattaatgcttgtaggacataataataacaattgaatgtctgcacagccgctttccacacagacatcataacaaaaaatttccaccaaaccccccctcccccgccttctggccacagcacttaaacacatctctgccaaaccccaaaaacaaagaaccctaacaccagcctaaccagatttcaaattttatcttttggcggtatgcacttttaacagtcaccccccaactaacacattattttcccctcccactcccatactactaatctcatcaatacaacccccgcccatcctacccaacacacacacaccgctgctaaccccataccccgaaccaaccaaaccccaaagacaccccccacagtttatgtagcttacctcctcaaagcaatacactgaaaatgtttagacgggctcacatcaccccataaacaaataggtttggtcctagcctttctattagctcttagtaagattacacatgcaagcatccccattccagtgagttcaccctctaaatcaccacgatcaaaagggacaagcatcaagcacgcagcaatgcagctcaaaacgcttagcctagccacacccccacgggaaacagcagtgattaacctttagcaataaacgaaagtttaactaagctatactaaccccagggttggtcaatttcgtgccagccaccgcggtcacacgattaacccaagtcaatagaagccggcgtaaagagtgttttagatcaccccctccccaataaagctaaaactcacctgagttgtaaaaaactccagttgacacaaaatagactacgaaagtggctttaacatatctgaacacacaatagctaagacccaaactgggattagataccccactatgcttagccctaaacctcaacagttaaatcaacaaaactgctcgccagaacactacgagccacagcttaaaactcaaaggacctggcggtgcttcatatccctctagaggagcctgttctgtaatcgataaaccccgatcaacctcaccacctcttgctcagcctatataccgccatcttcagcaaaccctgatgaaggctacaaagtaagcgcaagtacccacgtaaagacgttaggtcaaggtgtagcccatgaggtggcaagaaatgggctacattttctaccccagaaaactacgatagcccttatgaaacttaagggtcgaaggtggatttagcagtaaactgagagtagagtgcttagttgaacagggccctgaagcgcgtacacaccgcccgtcaccctcctcaagtatacttcaaaggacatttaactaaaacccctacgcatttatatagaggagacaagtcgtaacatggtaagtgtactggaaagtgcacttggacgaaccagagtgtagcttaacacaaagcacccaacttacacttaggagatttcaacttaacttgaccgctctgagctaaacctagccccaaacccactccaccttactaccagacaaccttagccaaaccatttacccaaataaagtataggcgatagaaattgaaacctggcgcaatagatatagtaccgcaagggaaagatgaaaaattataaccaagcataatatagcaaggactaacccctataccttctgcataatgaattaactagaaataactttgcaaggagaaccaaagctaagacccccgaaaccagacgagctacctaagaacagctaaaagagcacacccgtctatgtagcaaaatagtgggaagatttataggtagaggcgacaaacctaccgagcctggtgatagctggttgtccaagatagaatcttagttcaactttaaatttgcccacagaaccctctaaatccccttgtaaatttaactgttagtccaaagaggaacagctctttggacactaggaaaaaaccttgtagagagagtaaaaaatttaacacccatagtaggcctaaaagcagccaccaattaagaaagcgttcaagctcaacacccactacctaaaaaatcccaaacatataactgaactcctcacacccaattggaccaatctatcaccctatagaagaactaatgttagtataagtaacatgaaaacattctcctccgcataagcctgcgtcagattaaaacactgaactgacaattaacagcccaatatctacaatcaaccaacaagtcattattaccctcactgtcaacccaacacaggcatgctcataaggaaaggttaaaaaaagtaaaaggaactcggcaaatcttaccccgcctgtttaccaaaaacatcacctctagcatcaccagtattagaggcaccgcctgcccagtgacacatgtttaacggccgcggtaccctaaccgtgcaaaggtagcataatcacttgttccttaaatagggacctgtatgaatggctccacgagggttcagctgtctcttacttttaaccagtgaaattgacctgcccgtgaagaggcgggcatgacacagcaagacgagaagaccctatggagctttaatttattaatgcaaacagtacctaacaaacccacaggtcctaaactaccaaacctgcattaaaaatttcggttggggcgacctcggagcagaacccaacctccgagcagtacatgctaagacttcaccagtcaaagcgaactactatactcaattgatccaataacttgaccaacggaacaagttaccctagggataacagcgcaatcctattctagagtccatatcaacaatagggtttacgacctcgatgttggatcaggacatcccgatggtgcagccgctattaaaggttcgtttgttcaacgattaaagtcctacgtgatctgagttcagaccggagtaatccaggtcggtttctatctacnttcaaattcctccctgtacgaaaggacaagagaaataaggcctacttcacaaagcgccttcccccgtaaatgatatcatctcaacttagtattatacccacacccacccaagaacagggtttgttaagatggcagagcccggtaatcgcataaaacttaaaactttacagtcagaggttcaattcctcttcttaacaacatacccatggccaacctcctactcctcattgtacccattctaatcgcaatggcattcctaatgcttaccgaacgaaaaattctaggctatatacaactacgcaaaggccccaacgttgtaggcccctacgggctactacaacccttcgctgacgccataaaactcttcaccaaagagcccctaaaacccgccacatctaccatcaccctctacatcaccgccccgaccttagctctcaccatcgctcttctactatgaacccccctccccatacccaaccccctggtcaacctcaacctaggcctcctatttattctagccacctctagcctagccgtttactcaatcctctgatcagggtgagcatcaaactcaaactacgccctgatcggcgcactgcgagcagtagcccaaacaatctcatatgaagtcaccctagccatcattctactatcaacattactaataagtggctcctttaacctctccacccttatcacaacacaagaacacctctgattactcctgccatcatgacccttggccataatatgatttatctccacactagcagagaccaaccgaacccccttcgaccttgccgaaggggaatccgaactagtctcaggcttcaacatcgaatacgccgcaggccccttcgccctattcttcatagccgaatacacaaacattattataataaacaccctcaccactacaatcttcctaggaacaacatatgacgcactctcccctgaactctacacaacatattttgtcaccaagaccctacttctaacctccctgttcttatgaattcgaacagcatacccccgattccgctacgaccaactcatacacctcctatgaaaaaacttcctaccactcaccctagcattacttatatgacatgtctccatacccattacaatctccagcattccccctcaaacctaagaaatatgtctgataaaagagttactttgatagagtaaataataggagcttaaacccccttatttctaggactatgagaatcgaacccatccctgagaatccaaaattctccgtgccacctatcacaccccatcctaaagtaaggtcagctaaataagctatcgggcccataccccgaaaatgttggttatacccttcccgtactaattaatcccctggcccaacccgtcatctactctaccatctttgcaggcacactcatcacagcgctaagctcgcactgattttttacctgagtaggcctagaaataaacatgctagcttttattccagttctaaccaaaaaaataaaccctcgttccacagaagctgccatcaagtatttcctcacgcaagcaaccgcatccataatccttctaatagctatcctcttcaacaatatactctccggacaatgaaccataaccaatactaccaatcaatactcatcattaataatcataatggctatagcaataaaactaggaatagccccctttcacttctgagtcccagaggttacccaaggcacccctctgacatccggcctgcttcttctcacatgacaaaaactagcccccatctcaatcatataccaaatctctccctcactagacgtaagccttctcctcactctctcaatcttatccatcatagcaggcagttgaggtggattaaaccaaacccagctacgcaaaatcttagcatactcctcaattacccacataggatgaataatagcagttctaccgtacaaccctaacataaccattcttaatttaactatttatattatcctaactactaccgcattcctactactcaacttaaactccagcaccacgaccctactactatctcgcacctgaaacaagctaacatgactaacacccttaattccatccaccctcctctccctaggaggcctgcccccgctaaccggctttttgcccaaatgggccattatcgaagaattcacaaaaaacaatagcctcatcatccccaccatcatagccaccatcaccctccttaacctctacttctacctacgcctaatctactccacctcaatcacactactccccatatctaacaacgtaaaaataaaatgacagtttgaacatacaaaacccaccccattcctccccacactcatcgcccttaccacgctactcctacctatctccccttttatactaataatcttatagaaatttaggttaaatacagaccaagagccttcaaagccctcagtaagttgcaatacttaatttctgtaacagctaaggactgcaaaaccccactctgcatcaactgaacgcaaatcagccactttaattaagctaagcccttactagaccaatgggacttaaacccacaaacacttagttaacagctaagcaccctaatcaactggcttcaatctacttctcccgccgccgggaaaaaaggcgggagaagccccggcaggtttgaagctgcttcttcgaatttgcaattcaatatgaaaatcacctcggagctggtaaaaagaggcctaacccctgtctttagatttacagtccaatgcttcactcagccattttacctcacccccactgatgttcgccgaccgttgactattctctacaaaccacaaagacattggaacactatacctattattcggcgcatgagctggagtcctaggcacagctctaagcctccttattcgagccgagctgggccagccaggcaaccttctaggtaacgaccacatctacaacgttatcgtcacagcccatgcatttgtaataatcttcttcatagtaatacccatcataatcggaggctttggcaactgactagttcccctaataatcggtgcccccgatatggcgtttccccgcataaacaacataagcttctgactcttacctccctctctcctactcctgctcgcatctgctatagtggaggccggagcaggaacaggttgaacagtctaccctcccttagcagggaactactcccaccctggagcctccgtagacctaaccatcttctccttacacctagcaggtgtctcctctatcttaggggccatcaatttcatcacaacaattatcaatataaaaccccctgccataacccaataccaaacgcccctcttcgtctgatccgtcctaatcacagcagtcctacttctcctatctctcccagtcctagctgctggcatcactatactactaacagaccgcaacctcaacaccaccttcttcgaccccgccggaggaggagaccccattctataccaacacctattctgatttttcggtcaccctgaagtttatattcttatcctaccaggcttcggaataatctcccatattgtaacttactactccggaaaaaaagaaccatttggatacataggtatggtctgagctatgatatcaattggcttcctagggtttatcgtgtgagcacaccatatatttacagtaggaatagacgtagacacacgagcatatttcacctccgctaccataatcatcgctatccccaccggcgtcaaagtatttagctgactcgccacactccacggaagcaatatgaaatgatctgctgcagtgctctgagccctaggattcatctttcttttcaccgtaggtggcctgactggcattgtattagcaaactcatcactagacatcgtactacacgacacgtactacgttgtagctcacttccactatgtcctatcaataggagctgtatttgccatcataggaggcttcattcactgatttcccctattctcaggctacaccctagaccaaacctacgccaaaatccatttcactatcatattcatcggcgtaaatctaactttcttcccacaacactttctcggcctatccggaatgccccgacgttactcggactaccccgatgcatacaccacatgaaacatcctatcatctgtaggctcattcatttctctaacagcagtaatattaataattttcatgatttgagaagccttcgcttcgaagcgaaaagtcctaatagtagaagaaccctccataaacctggagtgactatatggatgccccccaccctaccacacattcgaagaacccgtatacataaaatctagacaaaaaaggaaggaatcgaaccccccaaagctggtttcaagccaaccccatggcctccatgactttttcaaaaaggtattagaaaaaccatttcataactttgtcaaagttaaattataggctaaatcctatatatcttaatggcacatgcagcgcaagtaggtctacaagacgctacttcccctatcatagaagagcttatcacctttcatgatcacgccctcataatcattttccttatctgcttcctagtcctgtatgcccttttcctaacactcacaacaaaactaactaatactaacatctcagacgctcaggaaatagaaaccgtctgaactatcctgcccgccatcatcctagtcctcatcgccctcccatccctacgcatcctttacataacagacgaggtcaacgatccctcccttaccatcaaatcaattggccaccaatggtactgaacctacgagtacaccgactacggcggactaatcttcaactcctacatacttcccccattattcctagaaccaggcgacctgcgactccttgacgttgacaatcgagtagtactcccgattgaagcccccattcgtataataattacatcacaagacgtcttgcactcatgagctgtccccacattaggcttaaaaacagatgcaattcccggacgtctaaaccaaaccactttcaccgctacacgaccgggggtatactacggtcaatgctctgaaatctgtggagcaaaccacagtttcatgcccatcgtcctagaattaattcccctaaaaatctttgaaatagggcccgtatttaccctatagcaccccctctaccccctctagagcccactgtaaagctaacttagcattaaccttttaagttaaagattaagagaaccaacacctctttacagtgaaatgccccaactaaatactaccgtatggcccaccataattacccccatactccttacactattcctcatcacccaactaaaaatattaaacacaaactaccacctacctccctcaccaaagcccataaaaataaaaaattataacaaaccctgagaaccaaaatgaacgaaaatctgttcgcttcattcattgcccccacaatcctaggcctacccgccgcagtactgatcattctatttccccctctattgatccccacctccaaatatctcatcaacaaccgactaatcaccacccaacaatgactaatcaaactaacctcaaaacaaataataaccatacacaacactaaaggacgaacctgatctcttatactagtatccttaatcatttttattgccacaactaacctcctcggactcctgcctcactcatttacaccaaccacccaactatctataaacctagccatggccatccccttatgagcgggcgcagtgattataggctttcgctctaagattaaaaatgccctagcccacttcttaccacaaggcacacctacaccccttatccccatactagttattatcgaaaccatcagcctactcattcaaccaatagccctggccgtacgcctaaccgctaacattactgcaggccacctactcatgcacctaattggaagcgccaccctagcaatatcaaccattaaccttccctctacacttatcatcttcacaattctaattctactgactatcctagaaatcgctgtcgccttaatccaagcctacgttttcacacttctagtaagcctctacctgcacgacaacacataatgacccaccaatcacatgcctatcatatagtaaaacccagcccatgacccctaacaggggccctctcagccctcctaatgacctccggcctagccatgtgatttcacttccactccataacgctcctcatactaggcctactaaccaacacactaaccatataccaatgatggcgcgatgtaacacgagaaagcacataccaaggccaccacacaccacctgtccaaaaaggccttcgatacgggataatcctatttattacctcagaagtttttttcttcgcaggatttttctgagccttttaccactccagcctagcccctaccccccaattaggagggcactggcccccaacaggcatcaccccgctaaatcccctagaagtcccactcctaaacacatccgtattactcgcatcaggagtatcaatcacctgagctcaccatagtctaatagaaaacaaccgaaaccaaataattcaagcactgcttattacaattttactgggtctctattttaccctcctacaagcctcagagtacttcgagtctcccttcaccatttccgacggcatctacggctcaacattttttgtagccacaggcttccacggacttcacgtcattattggctcaactttcctcactatctgcttcatccgccaactaatatttcactttacatccaaacatcactttggcttcgaagccgccgcctgatactggcattttgtagacgtggtttgactatttctgtatgtctccatctattgatgagggtcttactcttttagtataaatagtaccgttaacttccaattaactagttttgacaacattcaaaaaagagtaataaacttcgccttaattttaataatcaacaccctcctagccttactactaataattattacattttgactaccacaactcaacggctacatagaaaaatccaccccttacgagtgcggcttcgaccctatatcccccgcccgcgtccctttctccataaaattcttcttagtagctattaccttcttattatttgatctagaaattgccctccttttacccctaccatgagccctacaaacaactaacctgccactaatagttatgtcatccctcttattaatcatcatcctagccctaagtctggcctatgagtgactacaaaaaggattagactgaaccgaattggtatatagtttaaacaaaacgaatgatttcgactcattaaattatgataatcatatctaccaaatgcccctcatttacataaatattatactagcatttaccatctcacttctaggaatactagtatatcgctcacacctcatatcctccctactatgcctagaaggaataatactatcgctgttcattatagctactctcataaccctcaacacccactccctcttagccaatattgtgcctattgccatactagtctttgccgcctgcgaagcagcggtgggcctagccctactagtctcaatctccaacacatatggcctagactacgtacataacctaaacctactccaatgctaaaactaatcgtcccaacaattatattactaccactgacatgactttccaaaaaacacataatttgaatcaacacaaccacccacagcctaattattagcatcatccctctactattttttaaccaaatcaacaacaacctatttagctgttccccaaccttttcctccgaccccctaacaacccccctcctaatactaactacctgactcctacccctcacaatcatggcaagccaacgccacttatccagtgaaccactatcacgaaaaaaactctacctctctatactaatctccctacaaatctccttaattataacattcacagccacagaactaatcatattttatatcttcttcgaaaccacacttatccccaccttggctatcatcacccgatgaggcaaccagccagaacgcctgaacgcaggcacatacttcctattctacaccctagtaggctcccttcccctactcatcgcactgatttacactcacaacaccctaggctcactaaacattctactactcactctcactgcccaagaactatcaaactcctgagccaacaacttaatatgactagcttacacaatagcttttatagtaaagatacctctttacggactccacttatgactccctaaagcccatgtcgaagcccccatcgctgggtcaatagtacttgccgcagtactcttaaaactaggcggctatggtataatacgcctcacactcattctcaaccccctgacaaaacacatagcctaccccttccttgtactatccctatgaggcataattataacaagctccatctgcctacgacaaacagacctaaaatcgctcattgcatactcttcaatcagccacatagccctcgtagtaacagccattctcatccaaaccccctgaagcttcaccggcgcagtcattctcataatcgcccacggacttacatcctcattactattctgcctagcaaactcaaactacgaacgcactcacagtcgcatcataatcctctctcaaggacttcaaactctgctcccactaatagctttttgatgacttctagcaagcctcgctaacctcgccttaccccccactattaacctactgggagaactctctgtgctagtaaccacgttctcctgatcaaatatcactctcctacttacaggactcaacatactagtcacagccctatactccctctacatatttaccacaacacaatggggctcactcacccaccacattaacaacataaaaccctcattcacacgagaaaacaccctcatgttcatacacctatcccccattctcctcctatccctcaaccccgacatcattaccgggttttcctcttgtaaatatagtttaaccaaaacatcagattgtgaatctgacaacagaggcttacgaccccttatttaccgagaaagctcacaagaactgctaactcatgcccccatgtctaacaacatggctttctcaacttttaaaggataacagctatccattggtcttaggccccaaaaattttggtgcaactccaaataaaagtaataaccatgcacactactataaccaccctaaccctgacttccctaattccccccatccttaccaccctcgttaaccctaacaaaaaaaactcatacccccattatgtaaaatccattgtcgcatccacctttattatcagtctcttccccacaacaatattcatgtgcctagaccaagaagttattatctcgaactgacactgagccacaacccaaacaacccagctctccctaagcttcaaactagactacttctccataatattcatccctgtagcattgttcgttacatggtccatcatagaattctcactgtgatatataaactcagacccaaacattaatcagttcttcaaatatctactcatcttcctaattaccatactaatcttagttaccgctaacaacctattccaactgttcattggctgagagggcgtaggaattatatccttcttgctcatcagttgatgatacgcccgagcagatgccaacacagcagccattcaagcaatcctatacaaccgtatcggcgatatcggtttcatcctcgccttagcatgatttatcctacactccaactcatgagacccacaacaaatagcccttctaaacgctaatccaagcctcaccccactactaggcctcctcctagcagcagcaggcaaatcagcccaattaggtctccacccctgactcccctcagccatagaaggccccaccccagtctcagccctactccactcaagcactatagttgtagcaggaatcttcttactcatccgcttccaccccctagcagaaaatagcccactaatccaaactctaacactatgcttaggcgctatcaccactctgttcgcagcagtctgcgcccttacacaaaatgacatcaaaaaaatcgtagccttctccacttcaagtcaactaggactcataatagttacaatcggcatcaaccaaccacacctagcattcctgcacatctgtacccacgccttcttcaaagccatactatttatgtgctccggatccatcatccacaaccttaacaatgaacaagatattcgaaaaataggaggactactcaaaaccatacctctcacttcaacctccctcaccattggcagcctagcattagcaggaatacctttcctcacaggtttctactccaaagaccacatcatcgaaaccgcaaacatatcatacacaaacgcctgagccctatctattactctcatcgctacctccctgacaagcgcctatagcactcgaataattcttctcaccctaacaggtcaacctcgcttccccacccttactaacattaacgaaaataaccccaccctactaaaccccattaaacgcctggcagccggaagcctattcgcaggatttctcattactaacaacatttcccccgcatcccccttccaaacaacaatccccctctacctaaaactcacagccctcgctgtcactttcctaggacttctaacagccctagacctcaactacctaaccaacaaacttaaaataaaatccccactatgcacattttatttctccaacatactcggattctaccctagcatcacacaccgcacaatcccctatctaggccttcttacgagccaaaacctgcccctactcctcctagacctaacctgactagaaaagctattacctaaaacaatttcacagcaccaaatctccacctccatcatcacctcaacccaaaaaggcataattaaactttacttcctctctttcttcttcccactcatcctaaccctactcctaatcacataacctattcccccgagcaatctcaattacaatatatacaccaacaaacaatgttcaaccagtaactactactaatcaacgcccatagtcatacaaagcccccgcaccaataggatcctcccgaatcaaccctgacccctctccttcataaattattcagcttcctacactattaaagtttaccacaaccaccaccccatcatactctttcacccacagcaccaatcctacctccatcgctaaccccactaaaacactcaccaagacctcaacccctgacccccatgcctcaggatactcctcaatagccatcgctgtagtatatccaaagacaaccatcattccccctaaataaattaaaaaaactattaaacccatataacctcccccaaaattcagaataataacacacccgaccacaccgctaacaatcaatactaaacccccataaataggagaaggcttagaagaaaaccccacaaaccccattactaaacccacactcaacagaaacaaagcatacatcattattctcgcacggactacaaccacgaccaatgatatgaaaaaccatcgttgtatttcaactacaagaacaccaatgaccccaatacgcaaaattaaccccctaataaaattaattaaccactcattcatcgacctccccaccccatccaacatctccgcatgatgaaacttcggctcactccttggcgcctgcctgatcctccaaatcaccacaggactattcctagccatacactactcaccagacgcctcaaccgccttttcatcaatcgcccacatcactcgagacgtaaattatggctgaatcatccgctaccttcacgccaatggcgcctcaatattctttatctgcctcttcctacacatcgggcgaggcctatattacggatcatttctctactcagaaacctgaaacatcggcattatcctcctgcttgcaactatagcaacagccttcataggctatgtcctcccgtgaggccaaatatcattctgaggggccacagtaattacaaacttactatccgccatcccatacattgggacagacctagttcaatgaatctgaggaggctactcagtagacagtcccaccctcacacgattctttacctttcacttcatcttgcccttcattattgcagccctagcagcactccacctcctattcttgcacgaaacgggatcaaacaaccccctaggaatcacctcccattccgataaaatcaccttccacccttactacacaatcaaagacgccctcggcttacttctcttcattctctccttaatgacattaacactattctcaccagacctcctaggcgacccagacaattataccctagccaaccccttaaacacccctccccacatcaagcccgaatgatatttcctattcgcctacacaattctccgatccgtccctaacaagctaggaggcgtccttgccctattactatccatcctcatcctagcaataatccccatcctccatatatccaaacaacaaagcataatatttcgcccactaagccaatcactttattgactcctagccgcagacctcctcattctaacctgaatcggaggacaaccagtaagctacccttttaccatcattggacaagtagcatccgtactatacttcacaacaatcctaatcctaataccaactatctccctaattgaaaacaaaatactcaaatgggcctgtccttgtagtataaactaatacaccagtcttgtaaaccgaagatgaaaacctttttccaaggacaaatcagagaaaaagtctttaactccaccattagcacccaaagctaagattctaatttaaactattctctgttctttcatggggaagcagatttgggtaccacccaagtattgactcacccatcaacaaccgctatgtatttcgtacattactgccagccaccatgaatattgcacggtaccataaatacttgaccacctgtagtacataaaaacccaatccacatcaaaaccccctccccatgcttacaagcaagtacagcaatcaaccctcaactatcacacatcaactgcaactccaaagccacccctcacccactaggataccaacaaacctacccatctttaacagtacatagtacataaagccatttaccgtacatagcacattacagtcaaatcccttctcgtccccatggatgacccccctcagataggggtcccttgaccaccatcctccgtgaaatcaatatcccgcacaagagtgctactctcctcgctccgggcccataacacttgggggtagctaaagtgaactgtatccgacatctggttcctacttcagggccataaagcctaaatagcccacacgttccccttaaataagacatcacgatg

SEQ ID NO: 336 - DNA, 16570 bp, Homo sapiens mitochondrial
  3108: "n" refers to a nucleotide at position 3107 of the Cambridge Reference Sequence (CRS, Anderson et al. 1981 Nature 290:457-465), later determined to be absent from the human mtDNA sequence according to the revised CRS (rCRS, Andrews et al. 1999 Nature Genetics 23:147); "n" therefore represents a single nucleotide deletion at a position corresponding to nucleotide 3107 of SEQ ID NO:1 as provided herein.
gatcacaggtctatcaccctattaaccactcacgggagctctccatgcatttggtattttcgtctggggggtgtgcacgcgatagcattgcgagacgctggagccggagcaccctatgtcgcagtatctgtctttgattcctgccccatcctattatttatcgcacctacgttcaatattacaggcgaacatacttactaaagtgtgttaattaattaatgcttgtaggacataataataacaattgaatgtctgcacagccgctttccacacagacatcataacaaaaaatttccaccaaaccccccctcccccgccttctggccacagcacttaaacacatctctgccaaaccccaaaaacaaagaaccctaacaccagcctaaccagatttcaaattttatcttttggcggtatgcacttttaacagtcaccccccaactaacacattattttcccctcccactcccatactactaatctcatcaatacaacccccgcccatcctacccagcacacacacaccgctgctaaccccataccccgaaccaaccaaaccccaaagacaccccccacagtttatgtagcttacctcctcaaagcaatacactgaaaatgtttagacgggctcacatcaccccataaacaaataggtttggtcctagcctttctattagctcttagtaagattacacatgcaagcatccccgttccagtgagttcaccctctaaatcaccacgatcaaaagggacaagcatcaagcacgcagcaatgcagctcaaaacgcttagcctagccacacccccacgggaaacagcagtgattaacctttagcaataaacgaaagtttaactaagctatactaaccccagggttggtcaatttcgtgccagccaccgcggtcacacgattaacccaagtcaatagaagccggcgtaaagagtgttttagatcaccccctccccaataaagctaaaactcacctgagttgtaaaaaactccagttgacacaaaatagactacgaaagtggctttaacatatctgaacacacaatagctaagacccaaactgggattagataccccactatgcttagccctaaacctcaacagttaaatcaacaaaactgctcgccagaacactacgagccacagcttaaaactcaaaggacctggcggtgcttcatatccctctagaggagcctgttctgtaatcgataaaccccgatcaacctcaccacctcttgctcagcctatataccgccatcttcagcaaaccctgatgaaggctacaaagtaagcgcaagtacccacgtaaagacgttaggtcaaggtgtagcccatgaggtggcaagaaatgggctacattttctaccccagaaaactacgatagcccttatgaaacttaagggtcgaaggtggatttagcagtaaactgagagtagagtgcttagttgaacagggccctgaagcgcgtacacaccgcccgtcaccctcctcaagtatacttcaaaggacatttaactaaaacccctacgcatttatatagaggagacaagtcgtaacatggtaagtgtactggaaagtgcacttggacgaaccagagtgtagcttaacacaaagcacccaacttacacttaggagatttcaacttaacttgaccgctctgagctaaacctagccccaaacccactccaccttactaccagacaaccttagccaaaccatttacccaaataaagtataggcgatagaaattgaaacctggcgcaatagatatagtaccgcaagggaaagatgaaaaattatagccaagcataatatagcaaggactaacccctataccttctgcataatgaattaactagaaataactttgcaaggagagccaaagctaagacccccgaaaccagacgagctacctaagaacagctaaaagagcacacccgtctatgtagcaaaatagtgggaagatttataggtagaggcgacaaacctaccgagcctggtgatagctggttgtccaagatagaatcttagttcaactttaaatttgcccacagaaccctctaaatccccttgtaaatttaactgttagtccaaagaggaacagctctttggacactaggaaaaaaccttgtagagagagtaaaaaatttaacacccatagtaggcctaaaagcagccaccaattaagaaagcgttcaagctcaacatccactacctaaaaaatcccaaacatataactgaactcctcacacccaattggaccaatctatcaccctatagaagaactaatgttagtataagtaacatgaaaacattctcctccgcataagcctgcgtcagattaaaacactgaactgacaattaacagcccaatatctacaatcaaccaacaagtcattattaccctcactgtcaacccaacacaggcatgctcataaggaaaggttaaaaaaagtaaaaggaactcggcaaatcttaccccgcctgtttaccaaaaacatcacctctagcatcaccagtattagaggcaccgcctgcccagtgacacatgtttaacggccgcggtaccctaaccgtgcaaaggtagcataatcacttgttccttaaatagggacctgtatgaatggctccacgagggttcagctgtctcttacttttaaccagtgaaattgacctgcccgtgaagaggcgggcatgacacagcaagacgagaagaccctatggagctttaatttattaatgcaaacagtacctaacaaacccacaggtcctaaactaccaaacctgcattaaaaatttcggttggggcgacctcggagcagaacccaacctccgagcagtacatgctaagacttcaccagtcaaagcgaactactatactcaattgatccaataacttgaccaacggaacaagttaccctagggataacagcgcaatcctattctagagtccatatcaacaatagggtttacgacctcgatgttggatcaggacatcccgatggtgcagccgctattaaaggttcgtttgttcaacgattaaagtcctacgtgatctgagttcagaccggagtaatccaggtcggtttctatctacnttcaaattcctccctgtacgaaaggacaagagaaataaggcctacttcacaaagcgccttcccccgtaaatgatatcatctcaacttagtattatacccacacccacccaagaacagggtttgttaagatggcagagcccggtaatcgcataaaacttaaaactttacagtcagaggttcaattcctcttcttaacaacatacccatggccaacctcctactcctcattgtacccattctaatcgcaatggcattcctaatgcttaccgaacgaaaaattctaggctatatacaactacgcaaaggccccaacgttgtaggcccctacgggctactacaacccttcgctgacgccataaaactcttcaccaaggagcccctaaaacccgccacatctaccatcaccctctacatcaccgccccgaccttagctctcaccatcgctcttctactatgaacccccctccccatacccaaccccctggtcaacctcaacctaggcctcctatttattctagccacctctagcctagccgtttactcaatcctctgatcagggtgagcatcaaactcaaactacgccctgatcggcgcactgcgagcagtagcccaaacaatctcatatgaagtcaccctagccatcattctactatcaacattactaataagtggctcctttaacctctccacccttatcacaacacaagaacacctctgattactcctgccatcatgacccttggccataatatgatttatctccacactagcagagaccaaccgaacccccttcgaccttgccgaaggggagtccgaactagtctcaggcttcaacatcgaatacgccgcaggccccttcgccctattcttcatagccgaatacacaaacattattataataaacaccctcaccactacaatcttcctaggaacaacatatgacgcactctcccctgaactctacacaacatattttgtcaccaagaccctacttctaacctccctgttcttatgaattcgaacagcatacccccgattccgctacgaccaactcatacacctcctatgaaaaaacttcctaccactcaccctagcattacttatatgatatgtctccatacccattacaatctccagcattccccctcaaacctaagaaatatgtctgataaaagagttactttgatagagtaaataataggagcttaaacccccttatttctaggactatgagaatcgaacccatccctgagaatccaaaattctccgtgccacctatcacaccccatcctaaagtaaggtcagctaaataagctatcgggcccataccccgaaaatgttggttatacccttcccgtactaattaatcccctggcccaacccgtcatctactctaccatctttgcaggcacactcatcacagcgctaagctcgcactgattttttacctgagtaggcctagaaataaacatgctagcttttattccagttctaaccaaaaaaataaaccctcgttccacagaagctgccatcaagtatttcctcacgcaagcaaccgcatccataatccttctaatagctatcctcttcaacaatatactctccggacaatgaaccataaccaatactaccaatcaatactcatcattaataatcataatggctatagcaataaaactaggaatagccccctttcacttctgagtcccagaggttacccaaggcacccctctgacatccggcctgcttcttctcacatgacaaaaactagcccccatctcaatcatataccaaatctctccctcactaaacgtaagccttctcctcactctctcaatcttatccatcatagcaggcagttgaggtggattaaaccaaacccagctacgcaaaatcttagcatactcctcaattacccacataggatgaataatagcagttctaccgtacaaccctaacataaccattcttaatttaactatttatattatcctaactactaccgcattcctactactcaacttaaactccagcaccacgaccctactactatctcgcacctgaaacaagctaacatgactaacacccttaattccatccaccctcctctccctaggaggcctacccccgctaaccggctttttgcccaaatgggccattatcgaagaattcacaaaaaacaatagcctcatcatccccaccatcatagccaccatcaccctccttaacctctacttctacctacgcctaatctactccacctcaatcacactactccccatatctaacaacgtaaaaataaaatgacagtttgaacatacaaaacccaccccattcctccccacactcatcgcccttaccacgctactcctacctatctccccttttatactaataatcttatagaaatttaggttaaatacagaccaagagccttcaaagccctcagtaagttgcaatacttaatttctgtaacagctaaggactgcaaaaccccactctgcatcaactgaacgcaaatcagccactttaattaagctaagcccttactagaccaatgggacttaaacccacaaacacttagttaacagctaagcaccctaatcaactggcttcaatctacttctcccgccgccgggaaaaaaggcgggagaagccccggcaggtttgaagctgcttcttcgaatttgcaattcaatatgaaaatcacctcggagctggtaaaaagaggcctaacccctgtctttagatttacagtccaatgcttcactcagccattttacctcacccccactgatgttcgccgaccgttgactattctctacaaaccacaaagacattggaacactatacctattattcggcgcatgagctggagtcctaggcacagctctaagcctccttattcgagccgagctgggccagccaggcaaccttctaggtaacgaccacatctacaacgttatcgtcacagcccatgcatttgtaataatcttcttcatagtaatacccatcataatcggaggctttggcaactgactagttcccctaataatcggtgcccccgatatggcgtttccccgcataaacaacataagcttctgactcttacctccctctctcctactcctgctcgcatctgctatagtggaggccggagcaggaacaggttgaacagtctaccctcccttagcagggaactactcccaccctggagcctccgtagacctaaccatcttctccttacacctagcaggtgtctcctctatcttaggggccatcaatttcatcacaacaattatcaatataaaaccccctgccataacccaataccaaacgcccctcttcgtctgatccgtcctaatcacagcagtcctacttctcctatctctcccagtcctagctgctggcatcactatactactaacagaccgcaacctcaacaccaccttcttcgaccccgccggaggaggagaccccattctataccaacacctattctgatttttcggtcaccctgaagtttatattcttatcctaccaggcttcggaataatctcccatattgtaacttactactccggaaaaaaagaaccatttggatacataggtatggtctgagctatgatatcaattggcttcctagggtttatcgtgtgagcacaccatatatttacagtaggaatagacgtagacacacgagcatatttcacctccgctaccataatcatcgctatccccaccggcgtcaaagtatttagctgactcgccacactccacggaagcaatatgaaatgatctgctgcagtgctctgagccctaggattcatctttcttttcaccgtaggtggcctgactggcattgtattagcaaactcatcactagacatcgtactacacgacacgtactacgttgtagctcacttccactatgtcctatcaataggagctgtatttgccatcataggaggcttcattcactgatttcccctattctcaggctacaccctagaccaaacctacgccaaaatccatttcactatcatattcatcggcgtaaatctaactttcttcccacaacactttctcggcctatccggaatgccccgacgttactcggactaccccgatgcatacaccacatgaaacatcctatcatctgtaggctcattcatttctctaacagcagtaatattaataattttcatgatttgagaagccttcgcttcgaagcgaaaagtcctaatagtagaagaaccctccataaacctggagtgactatatggatgccccccaccctaccacacattcgaagaacccgtatacataaaatctagacaaaaaaggaaggaatcgaaccccccaaagctggtttcaagccaaccccatggcctccatgactttttcaaaaaggtattagaaaaaccatttcataactttgtcaaagttaaattataggctaaatcctatatatcttaatggcacatgcagcgcaagtaggtctacaagacgctacttcccctatcatagaagagcttatcacctttcatgatcacgccctcataatcattttccttatctgcttcctagtcctgtatgcccttttcctaacactcacaacaaaactaactaatactaacatctcagacgctcaggaaatagaaaccgtctgaactatcctgcccgccatcatcctagtcctcatcgccctcccatccctacgcatcctttacataacagacgaggtcaacgatccctcccttaccatcaaatcaattggccaccaatggtactgaacctacgagtacaccgactacggcggactaatcttcaactcctacatacttcccccattattcctagaaccaggcgacctgcgactccttgacgttgacaatcgagtagtactcccgattgaagcccccattcgtataataattacatcacaagacgtcttgcactcatgagctgtccccacattaggcttaaaaacagatgcaattcccggacgtctaaaccaaaccactttcaccgctacacgaccgggggtatactacggtcaatgctctgaaatctgtggagcaaaccacagtttcatgcccatcgtcctagaattaattcccctaaaaatctttgaaatagggcccgtatttaccctatagcaccccctctaccccctctagagcccactgtaaagctaacttagcattaaccttttaagttaaagattaagagaaccaacacctctttacagtgaaatgccccaactaaatactaccgtatggcccaccataattacccccatactccttacactattcctcatcacccaactaaaaatattaaacacaaactaccacctacctccctcaccaaagcccataaaaataaaaaattataacaaaccctgagaaccaaaatgaacgaaaatctgttcgcttcattcattgcccccacaatcctaggcctacccgccgcagtactgatcattctatttccccctctattgatccccacctccaaatatctcatcaacaaccgactaatcaccacccaacaatgactaatcaaactaacctcaaaacaaatgataaccatacacaacactaaaggacgaacctgatctcttatactagtatccttaatcatttttattgccacaactaacctcctcggactcctgcctcactcatttacaccaaccacccaactatctataaacctagccatggccatccccttatgagcgggcgcagtgattataggctttcgctctaagattaaaaatgccctagcccacttcttaccacaaggcacacctacaccccttatccccatactagttattatcgaaaccatcagcctactcattcaaccaatagccctggccgtacgcctaaccgctaacattactgcaggccacctactcatgcacctaattggaagcaccaccctagcaatatcaaccattaaccttccctctacacttatcatcttcacaattctaattctactgactatcctagaaatcgctgtcgccttaatccaagcctacgttttcacacttctagtaagcctctacctgcacgacaacacataatgacccaccaatcacatgcctatcatatagtaaaacccagcccatgacccctaacaggggccctctcagccctcctaatgacctccggcctagccatgtgatttcacttccactccataacgctcctcatactaggcctactaaccaacacactaaccatataccaatgatggcgcgatgtaacacgagaaagcacataccaaggccaccacacaccacctgtccaaaaaggccttcgatacgggataatcctatttattacctcagaagtttttttcttcgcaggatttttctgagccttttaccactccagcctagcccctaccccccaattaggagggcactggcccccaacaggcatcaccccgctaaatcccctagaagtcccactcctaaacacatccgtattactcgcatcaggagtatcaatcacctgagctcaccatagtctaatagaaaacaaccgaaaccaaataattcaagcactgctcattacaattttactgggcctctattttaccctcctacaagcctcagagtacttcgagtctcccttcaccatttccgacggcatctacggctcaacattttttgtagccacaggcttccacggacttcacgtcattattggctcaactttcctcactatctgcttcatccgccaactaatatttcactttacatccaaacatcactttggcttcgaagccgccgcctgatactggcattttgtagatgtggtttgactatttctgtatgtctccatctattgatgagggtcttactcttttagtataaatagtaccgttaacttccaattaactagttttgacaacattcaaaaaagagtaataaacttcgccttaattttaataatcaacaccctcctagccttactactaataattattacattttgactaccacaactcaacggctacatagaaaaatccaccccttacgagtgcggcttcgaccctatatcccccgcccgcgtccctttctccataaaattcttcttagtagctattaccttcttattatttgatctagaaattgccctccttttacccctaccatgagccctacaaacaactaacctgccactaatagttatgtcatccctcttattaatcatcatcctagccctaagtctggcctatgagtgactacaaaaaggattagactgaaccgaattggtatatagtttaaacaaaacgaatgatttcgactcattaaattatgataatcatatttaccaaatgcccctcatttacataaatattatactagcatttaccatctcacttctaggaatactagtatatcgctcacacctcatgtcctccctactatgcctagaaggaataatactatcgctgttcattatagctactctcataaccctcaacacccactccctcttagccaatattgtgcctattgccatactagtctttgccgcctgcgaagcagcggtgggcctagccctactagtctcaatctccaacacatatggcctagactacgtacataacctaaacctactccaatgctaaaactaatcgtcccaacaattatattactaccactgacatgactttccaaaaaacacataatttgaatcaacacaaccacccacagcctaattattagcatcatccctctactattttttaaccaaatcaacaacaacctatttagctgttccccaaccttttcctccgaccccctaacaacccccctcctaatactaactacctgactcctacccctcacaatcatggcaagccaacgccacttatccagtgaaccactatcacgaaaaaaactctacctctctatactaatctccctacaaatctccttaattataacattcacagccacagaactaatcatattttatatcttcttcgaaaccacacttatccccaccttggctatcatcacccgatgaggcaaccagccagaacgcctgaacgcaggcacatacttcctattctacaccctagtaggctcccttcccctactcatcgcactaatttacactcacaacaccctaggctcactaaacattctactactcaccctcactgcccaagaactatcaaactcctgagccaacaacttaatatgactagcttacacaatagcttttatagtaaagatacctctttacggactccacttatgactccctaaagcccatgtcgaagcccccatcgctgggtcaatagtacttgccgcagtactcttgaaactaggcggctatggtataatacgcctcacactcattctcaaccccctgacaaaacacatagcctaccccttccttgtactatccctatgaggcataattataacaagctccatctgcctacgacaaacagacctaaaatcgctcattgcatactcttcaatcagccacatagccctcgtagtaacagccattctcatccaaaccccctgaagcttcaccggcgcagtcattctcataatcgcccacggacttacatcctcattactattctgcctagcaaactcaaactacgaacgcactcacagtcgcatcataatcctctctcaaggacttcaaactctactcccactaatagctttttgatgacttctagcaagcctcgctaacctcgccttaccacccactattaacctactgggagaactctctgtgctagtaaccacgttctcctgatcaaatatcactctcctacttacaggactcaacatactagtcacagccctatactccctctacatatttaccacaacacaatggggctcactcacccaccacattaacaacataaaaccctcattcacacgagaaaacaccctcatgttcatacacctatcccccattctcctcctatccctcaaccccgacatcattaccgggttttcctcttgtaaatatagtttaaccaaaacatcagattgtgaatctgacaacagaggcttacgaccccttatttaccgagaaagctcacaagaactgctaactcatgcccccatgtctaacaacatggctttctcaacttttaaaggataacagctatccattggtcttaggccccaagaattttggtgcaactccaaataaaagtaataaccatgcacactactataaccaccctaaccctaacttccctaattccccccatccttaccaccctcgttaaccctaacaaaaaaaactcatacccccattatgtaaaatccattgtcgcatccacctttattatcagtctcttccccacaacaatattcatgtgcctggaccaagaagttattatctcgaactgacactgagccacaacccaaacaacccagctctccctaagcttcaaactagactacttctccataatattcatccctgtagcattgttcgttacatggtccatcatagaattctcactgtgatatataaactcagacccaaacattaatcagttcttcaaatatctactcatcttcctaattaccatactaatcttagttaccgctaacaacctattccaactgttcatcggctgagagggcgtaggaattatatccttcttgctcatcagttgatgatacgcccgagcagatgccaacacagcagccattcaagcaatcctatacaaccgtatcggcgatatcggtttcatcctcgccttagcatgatttatcctacactccaactcatgagacccacaacaaatagcccttctaaacgctaatccaagcctcaccccactactaggcctcctcctagcagcagcaggcaaatcagcccaattaggtctccacccctgactcccctcagccatagaaggccccaccccagtctcagccctactccactcaagcactatagttgtagcaggaatcttcttactcatccgcttccaccccctaacagaaaatagcccactaatccaaactctaacactatgcttaggcgctatcaccactctgttcgcagcagtctgcgcccttacacaaaatgacatcaaaaaaatcgtagccttctccacttcaagtcaactaggactcataatagttacaatcggcatcaaccaaccacacctagcattcctgcacatctgtacccacgccttcttcaaagccatactatttatgtgctccgggtccatcatccacaaccttaacaatgaacaagatattcgaaaaataggaggactactcaaaaccatacctctcacttcaacctccctcaccattggcagcctagcattagcaggaatacctttcctcacaggtttctactccaaagaccacatcatcgaaaccgcaaacatatcatacacaaacgcctgagccctatctattactctcatcgctacctccctgacaagcgcctatagcactcgaataattcttctcaccctaacaggtcaacctcgcttccccacccttactaacattaacgaaaataaccccaccctactaaaccccattaaacgcctggcagccggaagcctattcgcaggatttctcattactaacaacatttcccccgcatcccccttccaaacaacaatccccctctacctaaaactcacagccctcgctgtcactttcctaggacttctaacagccctagacctcaactacctaaccaacaaacttaaaataaaatccccactatgcacattttatttctccaacatactcggattctaccctagcatcacacaccgcacaatcccctatctaggccttcttacgagccaaaacctgcccctactcctcctagacctaacctgactagaaaagctattacctaaaacaatttcgcagcaccaaatctccacctccatcatcacctcaacccaaaaaggcataattaaactttacttcctctctttcttcttcccactcatcctaaccctactcctaatcacataacctattcccccgagcaatttcaattacaatatatacaccaacaaacaatgttcaaccagtaactactactaatcaacgcccataatcatacaaagcccccgcaccaataggatcctcccgaatcaaccctgacccctctccttcataaattattcagcttcctacactattaaagtttaccacaaccaccaccccatcatactctttcacccacagcaccaatcctacctccatcgctaaccccactaaaacactcaccaagacctcaacccctgacccccatgcctcaggatactcctcaatagccatcgctgtagtatatccaaagacaaccatcattccccctaaataaattaaaaaaactattaaacccatataacctcccccaaaattcagaataataacacacccgaccacaccgctaacaatcaatactaaacccccataaataggagaaggcttagaagaaaaccccacaaaccccattactaaacccacactcaacagaaacaaagcatacatcattattctcgcacggactacaaccacgaccaatgatatgaaaaaccatcgttgtatttcaactacaagaacaccaatgaccccaatacgcaaaattaaccccctaataaaattaattaaccactcactcatcgacctccccaccccatccaacatctccgcatgatgaaacttcggctcactccttggcgcctgcctgatcctccaaatcaccacaggactattcctagccatgcactactcaccagacgcctcaaccgccttttcatcaatcgcccacatcactcgagacgtaaattatggctgaatcatccgctaccttcacgccaatggcgcctcaatattctttatctgcctcttcctacacatcgggcgaggcctatattacggatcatttctctactcagaaacctgaaacatcggcattatcctcctgcttgcaactatagcaacagccttcataggctatgtcctcccgtgaggccaaatatcattctgaggggccacagtaattacaaacttactatccgccatcccatacattgggacagacctagttcaatgaatctgaggaggctactcagtagacagtcccaccctcacacgattctttacctttcacttcatcttgcccttcattattgcagccctagcagcactccacctcctattcttgcacgaaacgggatcaaacaaccccctaggaatcacctcccattccgataaaatcaccttccacccttactacacaatcaaagacgccctcggcttacttctcttccttctctccttaatgacattaacactattctcaccagacctcctaggcgacccagacaattataccctagccaaccccttaaacacccctccccacatcaagcccgaatgatatttcctattcgcctacacaattctccgatccgtccctaacaaactaggaggcgtccttgccctattactatccatcctcatcctagcaataatccccatcctccatatatccaaacaacaaagcataatatttcgcccactaagccaatcactttattgactcctagccgcagacctcctcattctaacctgaatcggaggacaaccagtaagctacccttttaccatcattggacaagtagcatccgtactatacttcacaacaatcctaatcctaataccaactatctccctaattgaaaacaaaatactcaaatgggcctgtccttgtagtataaactaatacaccagtcttgtaaaccggagatgaaaacctttttccaaggacaaatcagagaaaaagtctttaactccaccattagcacccaaagctaagattctaatttaaactattctctgttctttcatggggaagcagatttgggtaccacccaagtattgactcacccatcaacaaccgctatgtatttcgtacattactgccagccaccatgaatattgtacggtaccataaatacttgaccacctgtagtacataaaaacccaatccacatcaaaaccccctccccatgcttacaagcaagtacagcaatcaactcccaactatcacacatcaactgcaactccaaagccacccctcacccattaggataccaacaaacctacccacccttaacagtacatagcacataaagccatttaccgtacatagcacattacagtcaaatcccttctcgtccccatggatgacccccctcagataggggtcccttgaccaccatcctccgtgaaatcaatatcccgcacaagagtgctactctcctcgctccgggcccataacacttgggggtagctaaagtgaactgtatccgacatctggttcctacttcagggccataaagcctaaatagcccacacgttccccttaaataagacatcacgatg

SEQ ID NO: 337 - DNA, 16570 bp, Homo sapiens mitochondrial
  3108: "n" refers to a nucleotide at position 3107 of the Cambridge Reference Sequence (CRS, Anderson et al. 1981 Nature 290:457-465), later determined to be absent from the human mtDNA sequence according to the revised CRS (rCRS, Andrews et al. 1999 Nature Genetics 23:147); "n" therefore represents a single nucleotide deletion at a position corresponding to nucleotide 3107 of SEQ ID NO:1 as provided herein.
gatcacaggtctatcaccctattaaccactcacgggagctctccatgcatttggtattttcgtctggggggtgtgcacgcgatagcattgcgagacgctggagccggagcaccctatgtcgcagtatctgtctttgattcctgcctcatcccattatttatcgcacctacgttcaatattacaggcgaacatacttactaaagtgtgttaattaattaatgcttgtaggacataataataacaattgaatgtctgcacagccgctttccacacagacatcataacaaaaaatttccaccaaaccccccctcccccgccttctggccacagcacttaaacacatctctgccaaaccccaaaaacaaagaaccctaacaccagcctaaccagatttcaaattttatcttttggcggtatgcacttttaacagtcaccccccaactaacacattattttcccctcccactcccatactactaatctcatcaatacaacccccgcccatcctacccagcacacacacaccgctgctaaccccataccccgaaccaaccaaaccccaaagacaccccccacagtttatgtagcttacctcctcaaagcaatacactgaaaatgtttagacgggctcacatcaccccataaacaaataggtttggtcctagcctttctattagctcttagtaagattacacatgcaagcatccccgttccagtgagttcaccctctaaatcaccacgatcaaaagggacaagcatcaagcacgcagcaatgcagctcaaaacgcttagcctagccacacccccacgggaaacagcagtgattaacctttagcaataaacgaaagtttaactaagctatactaaccccagggttggtcaatttcgtgccagccaccgcggtcacacgattaacccaagtcaatagaagccggcgtaaagagtgttttagatcaccccctccccaataaagctaaaactcacctgagttgtaaaaaactccagttgacacaaaatagactacgaaagtggctttaacatatctgaacacacaatagctaagacccaaactgggattagataccccactatgcttagccctaaacctcaacagttaaatcaacaaaactgctcgccagaacactacgagccacagcttaaaactcaaaggacctggcggtgcttcatatccctctagaggagcctgttctgtaatcgataaaccccgatcaacctcaccacctcttgctcagcctatataccgccatcttcagcaaaccctgatgaaggctacaaagtaagcgcaagtacccacgtaaagacgttaggtcaaggtgtagcccatgaggtggcaagaaatgggctacattttctaccccagaaaactacgatagcccttatgaaacttaagggtcgaaggtggatttagcagtaaactgagagtagagtgcttagttgaacagggccctgaagcgcgtacacaccgcccgtcaccctcctcaagtatacttcaaaggacatttaactaaaacccctacgcatttatatagaggagacaagtcgtaacatggtaagtgtactggaaagtgcacttggacaaaccagagtgtagcttaacacaaagcacccaacttacacttaggagatttcaacttaacttgaccgctctgagctaaacctagccccaaacccactccaccttattaccagacaaccttaaccaaaccatttacccaaataaagtataggcgatagaaattgaaacctggcgcaatagatatagtaccgcaagggaaagatgaaaaattataaccaagcataatatagcaaggactaacccctataccttctgcataatgaattaactagaaataactttgcaaggagagccaaagctaagacccccgaaaccagacgagctacctaagaacagctaaaagagcacacccgtctatgtagcaaaatagtgggaagatttataggtagaggcgacaaacctaccgagcctggtgatagctggttgtccaagatagaatcttagttcaactttaaatttgcccacagaaccctctaaatccccttgtaaatttaactgttagtccaaagaggaacagctctttggacactaggaaaaaaccttgtagagagagtaaaaaatttaacacccatagtaggcctaaaagcagccaccaattaagaaagcgttcaagctcaacacccactacctaaaaaatcccaaacatataactgaactcctcacacccaattggaccaatctatcaccctatagaagaactaatgttagtataagtaacatgaaaacattctcctccgcataagcctgcgtcagattaaaacactgaactgacaattaacagcccaatatctacaatcaaccaacaagtcattattaccctcactgtcaacccaacacaggcatgctcataaggaaaggttaaaaaaagtaaaaggaactcggcaaatcttaccccgcctgtttaccaaaaacatcacctctagcatcaccagtattagaggcaccgcctgcccagtgacacatgtttaacggccgcggtaccctaaccgtgcaaaggtagcataatcacttgttccttaaatagggacctgtatgaatggcttcacgagggttcagctgtctcttacttttaaccagtgaaattgacctgcccgtgaagaggcgggcatgacacagcaagacgagaagaccctatggagctttaatttattaatgcaaacagtacctaacaaacccacaggtcctaaactaccaaacctgcattaaaaatttcggttggggcgacctcggagcagaacccaacctccgagcagtacatgctaagacttcaccagtcaaagcgaactactatactcaattgatccaataacttgaccaacggaacaagttaccctagggataacagcgcaatcctattctagagtccatatcaacaatagggtttacgacctcgatgttggatcaggacatcccgatggtgcagccgctattaaaggttcgtttgttcaacgattaaagtcctacgtgatctgagttcagaccggagtaatccaggtcggtttctatctacnttcaaattcctccctgtacgaaaggacaagagaaataaggcctacttcacaaagcgccttcccccgtaaatgatatcatctcaacttagtattatacccacacccacccaagaacagggtttgttaagatggcagagcccggtaatcgcataaaacttaaaactttacagtcagaggttcaattcctcttcttaacaacatacccatggccaacctcctactcctcattgtacccattctaatcgcaatggcattcctaatgcttaccgaacgaaaaattctaggctatatacaactacgcaaaggccccaacgttgtaggcccctacgggctactacaacccttcgctgacgccataaaactcttcaccaaagagcccctaaaacccgccacatctaccatcaccctctacatcaccgccccgaccttagctctcaccatcgctcttctactatgaacccccctccccatacccaaccccctggtcaacctcaacctaggcctcctatttattctagccacctctagcctagccgtttactcaatcctctgatcagggtgagcatcaaactcaaactacgccctgatcggcgcactgcgagcagtagcccaaacaatctcatatgaagtcaccctagccatcattctactatcaacattactaataagtggctcctttaacctctccacccttatcacaacacaagaacacctctgattactcctgccatcatgacccttggccataatatgatttatctccacactagcagagaccaaccgaacccccttcgaccttgccgaaggggagtcagaactagtctcaggcttcaacatcgaatacgccgcaggccccttcgccctattcttcatagccgaatacacaaacattattataataaacaccctcaccactacaatcttcctaggaacaacatatgacgcactctcccctgaactctacacaacatattttgtcaccaagaccctacttctaacctccctgttcttatgaattcgaacagcatacccccgattccgctacgaccaactcatacacctcctatgaaaaaacttcctaccactcaccctagcattacttatatgatatgtctccatacccattacaatctccagcattccccctcaaacctaagaaatatgtctgataaaagagttactttgatagagtaaataataggagcttaaacccccttatttctaggactatgagaatcgaacccatccctgagaatccaaaattctccgtgccacctatcacaccccatcctaaagtaaggtcagctaaataagctatcgggcccataccccgaaaatgttggttatacccttcccgtactaattaatcccctggcccaacccgtcatctactctaccatctttgcaggcacactcatcacagcgctaagctcgcactgattttttacctgagtaggcctagaaataaacatgctagcttttattccagttctaaccaaaaaaataaaccctcgttccacagaagctgccatcaagtatttcctcacgcaagcaaccgcatccataatccttctaatagctatcctcttcaacaatatactctccggacaatgaaccataaccaataataccaatcaatactcatcattaataatcataatggctatagcaataaaactaggaatagccccctttcacttctgagtcccagaggttacccaaggcacccctctgacatccggcctgcttcttctcacatgacaaaaactagcccccatctcaatcatataccaaatctctccctcactagacgtaagccttctcctcactctctcaatcttatccatcatagtaggcagttgaggtggattaaaccaaacccagctacgcaaaatcttagcatactcctcaattacccacataggatgaataatagcagttctaccgtacaaccctaacataaccattcttaatttaactatttatattatcctaactactaccgcattcctactactcaacttaaactccagcaccacgaccctactactatctcgcacctgaaacaagctaacatgactaacacccttaattccatccaccctcctctccctaggaggcctgcccccgctaaccggctttttgcccaaatgggccattatcgaagaattcacaaaaaacaatagcctcatcatccccaccatcatagccaccatcaccctccttaacctctacttctacctacgcctaatctactccacctcaatcacactactccccatatctaacaacgtaaaaataaaatgacagtttgaacatacaaaacccaccccattcctccccacactcatcgcccttaccacactactcctacctatctccccttttatactaataatcttatagaaatttaggttaaatacagaccaagagccttcaaagccctcagtaagttgcaatacttaatttctgtaacagctaaggactgcaaaaccccactctgcatcaactgaacgcaaatcagccactttaattaagctaagcccttactagaccaatgggacttaaacccacaaacacttagttaacagctaagcaccctaatcaactggcttcaatctacttctcccgccgccgggaaaaaaggcgggagaagccccggcaggtttgaagctgcttcttcgaatttgcaattcaatatgaaaatcacctcggagctggtaaaaagaggcctaacccctgtctttagatttacagtccaatgcttcactcagccattttacctcacccccactgatgttcgccgaccgttgactattctctacaaaccacaaagacattggaacactatacctattattcggcgcatgagctggagtcctaggcacagctctaagcctccttattcgagccgagctgggccagccaggcaaccttctaggtaacgaccacatctacaacgttatcgtcacagcccatgcatttgtaataatcttcttcatagtaatacccatcataatcggaggctttggcaactgactagttcccctaataatcggtgcccccgatatggcgtttccccgcataaacaacataagcttctgactcttacctccctctctcctactcctgctcgcatctgctatagtggaggccggagcaggaacaggttgaacagtctaccctcccttagcagggaactactcccaccctggagcctccgtagacctaaccatcttctccttacacctagcaggtgtctcctctatcttaggggccatcaatttcatcacaacaattatcaatataaaaccccctgccataacccaataccaaacgcccctcttcgtctgatccgtcctaatcacagcagtcctacttctcctatctctcccagtcctagctgctggcatcactatactactaacagaccgcaacctcaacaccaccttcttcgaccccgccggaggaggagaccccattctataccaacacctattctgatttttcggtcaccctgaagtttatattcttatcctaccaggcttcggaataatctcccatattgtaacttactactccggaaaaaaagaaccatttggatacataggtatggtctgagctatgatatcaattggcttcctagggtttatcgtgtgagcacaccatatatttacagtaggaatagacgtagacacacgagcatatttcacctccgctaccataatcatcgctatccccaccggcgtcaaagtatttagctgactcgccacactccacggaagcaatatgaaatgatctgctgcagtgctctgagccctaggattcatctttcttttcaccgtaggtggcctgactggcattgtattagcaaactcatcactagacatcgtactacacgacacgtactacgttgtagctcacttccactatgtcctatcaataggagctgtatttgccatcataggaggcttcattcactgatttcccctattctcaggctacaccctagaccaaacctacgccaaaatccatttcactatcatattcatcggcgtaaatctaactttcttcccacaacactttctcggcctatccggaatgccccgacgttactcggactaccccgatgcatacaccacatgaaacatcctatcatctgtaggctcattcatttctctaacagcagtaatattaataattttcatgatttgagaagccttcgcttcgaagcgaaaagtcctaatagtagaagaaccctccataaacctggagtgactatatggatgccccccaccctaccacacattcgaagaacccgtatacataaaatctagacaaaaaaggaaggaatcgaaccccccaaagctggtttcaagccaaccccatggcctccatgactttttcaaaaaggtattagaaaaaccatttcataactttgtcaaagttaaattataggctaaatcctatatatcttaatggcacatgcagcgcaagtaggtctacaagacgctacttcccctatcatagaagagcttatcacctttcatgatcacgccctcataatcattttccttatctgcttcctagtcctgtatgcccttttcctaacactcacaacaaaactaactaatactaacatctcagacgctcaggaaatagaaaccgtctgaactatcctgcccgccatcatcctagtcctcatcgccctcccatccctacgcatcctttacataacagacgaggtcaacgatccctcccttaccatcaaatcaattggccaccaatggtactgaacctacgagtacaccgactacggcggactaatcttcaactcctacatacttcccccattattcctagaaccaggcgacctgcgactccttgacgttgacaatcgagtagtactcccgattgaagcccccattcgtataataattacatcacaagacgtcttgcactcatgagctgtccccacattaggcttaaaaacagatgcaattcccggacgtctaaaccaaaccactttcaccgctacacgaccgggggtatactacggtcaatgctctgaaatctgtggagcaaaccacagtttcatgcccatcgtcctagaattaattcccctaaaaatctttgaaataggacccgtatttaccctatagcaccccctctaccccctctagagcccactgtaaagctaacttagcattaaccttttaagttaaagattaagagaaccaacacctctttacagtgaaatgccccaactaaatactaccgtatggcccaccataattacccccatactccttacactattcctcatcacccaactaaaaatattaaacacaaactaccacctacttccctcaccaaagcccataaaaataaaaaattataacaaaccctgagaaccaaaatgaacgaaaatctgttcgcttcattcattgcccccacaatcctaggcctacccgccgcagtactgatcattctatttccccctctattgatccccacctccaaatatctcatcaacaaccgactaatcaccacccaacaatgactaatcaaactaacctcaaaacaaatgataaccatacacaacactaaaggacgaacctgatctcttatactagtatccttaatcatttttattgccacaactaacctcctcggactcctgcctcactcatttacaccaaccacccaactatctataaacctagccgtggccatccccttatgagcgggcgcagtgattataggctttcgctctaagattaaaaatgccctagcccacttcttaccacaaggcacacctacaccccttatccccatactagttattatcgaaaccatcagcctactcattcaaccaatagccctggccgtacgcctaaccgctaacattactgcaggccacctactcatgcacctaattggaagcgccaccctagcaatatcaaccattaaccttccctctacacttatcatcttcacaattctaattctactgactatcctagaaatcgctgtcgccttaatccaagcctacgttttcacacttctagtaagcctctacctgcacgacaacacataatgacccaccaatcacatgcctatcatatagtaaaacccagcccatgacccctaacaggggccctctcagccctcctaatgacctccggcctagccatgtgatttcacttccactccataacgctcctcatactaggcctactaaccaacacactaaccatataccaatgatggcgcgatgtaacacgagaaagcacataccaaggccaccacacaccacctgtccaaaaaggccttcgatacgggataatcctatttattacctcagaagtttttttcttcgcaggatttttctgagccttttaccactccagcctagcccctaccccccaattaggagggcactggcccccaacaggcatcaccccgctaaatcccctagaagtcccactcctaaacacatccgtattactcgcatcaggagtatcaatcacctgagctcaccatagtctaatagaaaacaaccgaaaccaaataattcaagcactgcttattacaattttactgggtctctattttaccctcctacaagcctcagagtacttcgagtctcccttcaccatttccgacggcatctacggctcaacattttttgtagccacaggcttccacggacttcacgtcattattggctcaactttcctcactatctgcttcatccgccaactaatatttcactttacatccaaacatcactttggcttcgaagccgccgcctgatactggcattttgtagatgtggtttgactatttctgtatgtctccatctattgatgagggtcttactcttttagtataaatagtaccgttaacttccaattaactagttttgacaacattcaaaaaagagtaataaacttcgccttaattttaataatcaacaccctcctagccttactactaataattattacattttgactaccacaactcaacggctacatagaaaaatccaccccttacgagtgcggcttcgaccctatatcccccgcccgcgtccctttctccataaaattcttcttagtagctatcaccttcttattatttgatctagaaattgccctccttttacccctaccatgagccctacaaacaactaacctgccactaatagttatgtcatccctcttattaatcatcatcctagccctaagtctggcctatgagtgactacaaaaaggattagactgaaccgaattggtatatagtttaaacaaaacgaatgatttcgactcattaaattatgataatcatatttaccaaatgcccctcatttacataaatattatactagcatttaccatctcacttctaggaatactagtatatcgctcacacctcatatcctccctactatgcctagaaggaataatactatcgctgttcattatagctactctcataaccctcaacacccactccctcttagccaatattgtgcctattgccatactagtctttgccgcctgcgaagcagcggtgggcctagccctactagtctcaatctccaacacatatggcctagactacgtacataacctaaacctactccaatgctaaaactaatcgtcccaacaattatattactaccactgacatgactttccaaaaaacacataatttgaatcaacacaaccacccacagcctaattattagcatcatccctctactattttttaaccaaatcaacaacaacctatttagctgttccccaaccttttcctccgaccccctaacaacccccctcctaatactaactacctgactcctacccctcacaatcatggcaagccaacgccacttatccagtgaaccactatcacgaaaaaaactctacctctctatactaatctccctacaaatctccttaattataacattcacagccacagaactaatcatattttatatcttcttcgaaaccacacttatccccaccttggctatcatcacccgatgaggcaaccagccagaacgcctgaacgcaggcacatacttcctattctacaccctagtaggctcccttcccctactcatcgcactaatttacactcacaacaccctaggctcactaaacattctactactcactctcactgcccaagaactatcaaactcctgagccaacaacttaatatgactagcttacacaatagcttttatagtaaagatacctctttacggactccacttatgactccctaaagcccatgtcgaagcccccatcgctgggtcaatagtacttgccgcagtactcttaaaactaggcggctatggtataatacgcctcacactcattctcaaccccctgacaaaacacatagcctaccccttccttgtactatccctatgaggcataattataacaagctccatctgcctacgacaaacagacctaaaatcgctcattgcatactcttcaatcagccacatagccctcgtagtaacagccattctcatccaaaccccctgaagcttcaccggcgcagtcattctcataatcgcccacggacttacatcctcattactattctgcctagcaaactcaaactacgaacgcactcacagtcgcatcataatcctctctcaaggacttcaaactctactcccactaatagctttttgatgacttctagcaagcctcgctaacctcgccttaccccccactattaacctactgggagaactctctgtgctagtaaccacgttctcctgatcaagtatcactctcctacttacaggactcaacatactagtcacagccctatactccctctacatatttaccacaacacaatggggctcactcacccaccacattaacaacataaaaccctcattcacacgagaaaacaccctcatgttcatacacctatcccccattttcctcctatccctcaaccccgacatcattaccgggttttcctcttgtaaatatagtttaaccaaaacatcagattgtgaatctgacaacagaggcttacgaccccttatttaccgagaaagctcacaagaactgctaactcatgcccccatgtctaacaacatggctttctcaacttttaaaggataacagctatccattggtcttaggccccaaaaattttggtgcaactccaaataaaagtaataaccatgcacactactataaccaccctaaccctgacttccctaattccccccatccttaccaccctcgttaaccctaacaaaaaaaactcatacccccattatgtaaaatccattgtcgcatccacctttattatcagtctcttccccacaacaatattcatatgcctagaccaagaagttattatctcgaactgacactgagccacaacccaaacaacccagctctccctaagcttcaaactagactacttctccataatattcatccctgtagcattgttcgttacatggtccatcatagaattctcactgtgatatataaactcagacccaaacattaatcagttcttcaaatatctactcattttcctaattaccatactaatcttagttaccgctaacaacctattccaactgttcatcggctgagagggcgtaggaattatatccttcttgctcatcagttgatgatacgcccgagcggatgccaacacagcagccattcaagcaatcctatacaaccgtatcggcgatatcggtttcatcctcgccttagcatgatttatcctacactccaactcatgagacccacaacaaatagcccttctaaacgctaatccaagcctcaccccactactaggcctcctcctagcagcagcaggcaaatcagcccaattaggtctccacccctgactcccctcagccatagaaggccccaccccagtctcagccctactccactcaagcactatagttgtagcaggaatcttcttactcatccgcttccactccctagcagaaaatagcccactaatccaaactctaacactatgcttaggcgctatcaccactctgttcgcagcagtctgcgcccttacacaaaatgacatcaaaaaaatcgtagccttctccacttcaagtcaactaggactcataatagttacaatcggcatcaaccaaccacacctagcattcctgcacatctgtacccacgccttcttcaaagccatactatttatgtgctccgggtccatcatccacaaccttaacaatgaacaagatattcgaaaaataggaggactactcaaaaccatacctctcacttcaacctccctcaccattggcagcctagcattagcaggaatacctttcctcacaggtttctactccaaagaccacatcatcgaaaccgcaaacatatcatacacaaacgcctgagccctatctattactctcatcgctacctccctgacaagcgcctatagcactcgaataattcttctcaccctaacaggtcaacctcgcttccccacccttactaacattaacgaaaataaccccaccctactaaaccccattaaacgcctggcggccggaagcctattcgcaggatttctcattactaacaacatttcccccgcatcccccttccaaacaacaatccccctctacctaaaactcacagccctcgctgtcactttcctaggacttctaacagccctagacctcaactacctaaccaacaaacttaaaataaaatccccactatgcacattttatttctccaacatactcggattctaccctagcatcacacaccgcacaatcccctatctaggccttcttacgagccaaaacctgcccctactcctcctagacctaacctgactagaaaagctattacctaaaacaatttcacagcaccaaatctccacctccatcatcacctcaacccaaaaaggcataattaaactttacttcctctctttcttcttcccactcatcctaaccctactcctaatcacataacctattcccccgagcaatctcaattacaatatatacaccaacaaacaatgttcaaccagtaactactactaatcaacgcccataatcatacaaagcccccgcaccaataggatcctcccgaatcaaccctgacccctctccttcataaattattcagcttcctacactattaaagtttaccacaaccaccaccccatcatactctttcacccacagcaccaatcctacctccatcgctaaccccactaaaacactcaccaagacctcaacccctgacccccatgcctcaggatactcctcaatagccatcgctgtagtatatccaaagacaaccatcattccccctaaataaattaaaaaaactattaaacccatataacctcccccaaaattcagaataataacacacccgaccacaccgctaacaatcaacactaaacccccataaataggagaaggcttagaagaaaaccccacaaaccccattactaaacccacactcaacagaaacaaagcatacatcattattctcgcacggactacaaccacgaccaatgatatgaaaaaccatcgttgtatttcaactacaagaacaccaatgaccccaatacgcaaaattaaccccctaataaaattaattaaccactcattcatcgacctccccaccccatccaacatctccgcatgatgaaacttcggctcactccttggcgcctgcctgatcctccaaatcaccacaggactattcctagccatgcactactcaccagacgcctcaaccgccttttcatcaatcgcccacatcactcgagacgtaaattatggctgaatcatccgctaccttcacgccaatggcgcctcaatattctttatctgcctcttcctacacatcgggcgaggcctatattacggatcatttctctactcagaaacctgaaacatcggcattatcctcctgcttgcaactatagcaacagccttcataggctatgtcctcccgtgaggccaaatatcattctgaggggccacagtaattacaaacttactatccgccatcccatacattgggacagacctagttcaatgaatctgaggaggctactcagtagacagtcccaccctcacacgattctttacctttcacttcatcttgcccttcattattgcagccctagcagcactccacctcctattcttgcacgaaacgggatcaaacaaccccctaggaatcacctcccattccgataaaatcaccttccacccttactacacaatcaaagacgccctcggcttacttctcttccttctctccttaatgacattaacactattctcaccagacctcctaggcgacccagacaattataccctagccaaccccttaaacacccctccccacatcaagcccgaatgatatttcctattcgcctacacaattctccgatccgtccctaacaaactaggaggcgtccttgccctattactatccatcctcatcctagcaataatccccatcctccatatatccaaacaacaaagcataatatttcgcccactaagccaatcactttattgactcctagccgcagacctcctcattctaacctgaatcggaggacaaccagtaagctacccttttaccatcattggacaagtagcatccgtactatacttcacaacaatcctaatcctaataccaactatctccctaattgaaaacaaaatactcaaatgggcctgtccttgtagtataaactaatacaccagtcttgtaaaccggagatgaaaacctttttccaaggacaaatcagagaaaaagtctttaactccaccattagcacccaaagctaagattctaatttaaactattctctgttctttcatggggaagcagatttgggtaccacccaagtattgactcacccatcaacaaccgctatgtatttcgtacattactgccagccaccatgaatattgtacggtaccataaatacttaaccacctgtagtacataaaaacccaatccaaatcaaaaccccctccccatgcttacaagcaagtacagcaatcaaccttcaactatcacacatcaactgcaactccaaagccacccctcacccactaggataccaacaaacctacccacccttaacagtacatagtacataaagccatttaccgtacatagcacattacagtcaaatcccttctcgtccccatggatgacccccctcagataggagtcccttgaccaccatcctccgtgaaatcaatatcccgcacaagagtgctactctcctcgctccgggcccataacacttgggggtagctaaagtgaactgtatccgacatctggttcctacttcagggccataaagcctaaatagcccacacgttccccttaaataagacatcacgatg

SEQ ID NO: 338 - DNA, 16571 bp, Homo sapiens mitochondrial
  3109: "n" refers to a nucleotide at position 3107 of the Cambridge Reference Sequence (CRS, Anderson et al. 1981 Nature 290:457-465), later determined to be absent from the human mtDNA sequence according to the revised CRS (rCRS, Andrews et al. 1999 Nature Genetics 23:147); "n" therefore represents a single nucleotide deletion at a position corresponding to nucleotide 3107 of SEQ ID NO:1 as provided herein.
gatcacaggtctatcaccctattaaccactcacgggagctctccatgcatttggtattttcgtctggggggtgtgcacgcgatagcattgcgagacgctggagccggagcaccctatgtcgcagtatctgtctttgattcctgcctcatcctattatttatcgcacctacgttcaatattacaggcgaacatacttactaaagtgtgttaattaattaatgcttgtaggacataataataacaattgaatgtctgcacagccgctttccacacagacatcataacaaaaaatttccaccaaaccccccctcccccccgcttctggccacagcacttaaacacatctctgccaaaccccaaaaacaaagaaccctaacaccagcctaaccagatttcaaattttatcttttggcggtatgcacttttaacagtcaccccccaactaacacattattttcccctcccactcccatactactaatctcatcaatacaacccccgcccatcctacccagcacacacacaccgctgctaaccccataccccgaaccaaccaaaccccaaagacaccccccacagtttatgtagcttacctcctcaaagcaatacactgaaaatgtttagacgggctcacatcaccccataaacaaataggtttggtcctagcctttctattagctcttagtaagattacacatgcaagcatccccgttccagtgagttcaccctctaaatcaccacgatcaaaagggacaagcatcaagcacgcagcaatgcagctcaaaacgcttagcctagccacacccccacgggaaacagcagtgattaacctttagcaataaacgaaagtttaactaagctatactaaccccagggttggtcaatttcgtgccagccaccgcggtcacacgattaacccaagtcaatagaagccggcgtaaagagtgttttagatcaccccctccccaataaagctaaaactcacctgagttgtaaaaaactccagttgacacaaaatagactacgaaagtggctttaacatatctgaacacacaatagctaagacccaaactgggattagataccccactatgcttagccctaaacctcaacagttaaatcaacaaaactgctcgccagaacactacgagccacagcttaaaactcaaaggacctggcggtgcttcatatccctctagaggagcctgttctgtaatcgataaaccccgatcaacctcaccacctcttgctcagcctatataccgccatcttcagcaaaccctgatgaaggctacaaagtaagcgcaagtacccacgtaaagacgttaggtcaaggtgtagcccatgaggtggcaagaaatgggctacattttctaccccagaaaactacgatagcccttatgaaacttaagggtcgaaggtggatttagcagtaaactgagagtagagtgcttagttgaacagggccctgaagcgcgtacacaccgcccgtcaccctcctcaagtatacttcaaaggacatttaactaaaacccctacgcatttatatagaggagacaagtcgtaacatggtaagtgtactggaaagtgcacttggacgaaccagagtgtagcttaacacaaagcacccaacttacacttaggagatttcaacttaacttgaccgctctgagctaaacctagccccaaacccactccaccttactaccagacaaccttagccaaaccatttacccaaataaagtataggcgatagaaattgaaacctggcgcaatagatatagtaccgcaagggaaagatgaaaaattataaccaagcataatatagcaaggactaacccctataccttctgcataatgaattaactagaaataactttgcaaggagagccaaagctaagacccccgaaaccagacgagctacctaagaacagctaaaagagcacacccgtctatgtagcaaaatagtgggaagatttataggtagaggcgacaaacctaccgagcctggtgatagctggttgtccaagatagaatcttagttcaactttaaatttgcccacagaaccctctaaatccccttgtaaatttaactgttagtccaaagaggaacagctctttggacactaggaaaaaaccttgtagagagagtaaaaaatttaacacccatagtaggcctaaaagcagccaccaattaagaaagcgttcaagctcaacacccactacctaaaaaatcccaaacatataactgaactcctcacacccaattggaccaatctatcaccctatagaagaactaatgttagtataagtaacatgaaaacattctcctccgcataagcctgcgtcagattaaaacactgaactgacaattaacagcccaatatctacaatcaaccaacaagtcattattaccctcactgtcaacccaacacaggcatgctcataaggaaaggttaaaaaaagtaaaaggaactcggcaaatcttaccccgcctgtttaccaaaaacatcacctctagcatcaccagtattagaggcaccgcctgcccagtgacacatgtttaacggccgcggtaccctaaccgtgcaaaggtagcataatcacttgttccttaaatagggacctgtatgaatggctccacgagggttcagctgtctcttacttttaaccagtgaaattgacctgcccgtgaagaggcgggcataacacagcaagacgagaagaccctatggagctttaatttattaatgcaaacagtacctaacaaacccacaggtcctaaactaccaaacctgcattaaaaatttcggttggggcgacctcggagcagaacccaacctccgagcagtacatgctaagacttcaccagtcaaagcgaactactatactcaattgatccaataacttgaccaacggaacaagttaccctagggataacagcgcaatcctattctagagtccatatcaacaatagggtttacgacctcgatgttggatcaggacatcccaatggtgcagccgctattaaaggttcgtttgttcaacgattaaagtcctacgtgatctgagttcagaccggagtaatccaggtcggtttctatctacnttcaaattcctccctgtacgaaaggacaagagaaataaggcctacttcacaaagcgccttcccccgtaaatgatatcatctcaacttagtattatacccacacccacccaagaacagggtttgttaagatggcagagcccggtaatcgcataaaacttaaaactttacagtcagaggttcaattcctcttcttaacaacatacccatggccaacctcctactcctcattgtacccattctaatcgcaatggcattcctaatgcttaccgaacgaaaaattctaggctatatacaactacgcaaaggccccaacgttgtaggcccctacgggctactacaacccttcgctgacgccataaaactcttcaccaaagagcccctaaaacccgccacatctaccatcaccctctacatcaccgccccgaccttagctctcaccatcgctcttctactatgaacccccctccccatacccaaccccctggtcaacctcaacctaggcctcctatttattctagccacctctagcctagccgtttactcaatcctctgatcagggtgagcatcaaactcaaactacgccctgatcggcgcactgcgagcagtagcccaaacaatctcatatgaagtcaccctagccatcattctactatcaacattactaataagtggctcctttaacctctccacccttatcacaacacaagaacacctctgattactcctgccatcatgacccttggccataatatgatttatctccacactagcagagaccaaccgaacccccttcgaccttgccgaaggggagtccgaactagtctcaggcttcaacatcgaatacgccgcaggccccttcgccctattcttcatagccgaatacacaaacattattataataaacaccctcaccactacaatcttcctaggaacaacatatgacgcactctcccctgaactctacacaacatattttgtcaccaagaccctacttctaacctccctgttcttatgaattcgaacagcatacccccgattccgctacgaccaactcatacacctcctatgaaaaaacttcctaccactcaccctagcattacttatatgatatgtctccatacccattacaatctccagcattccccctcaaacctaagaaatatgtctgataaaagagttactttgatagagtaaataataggagcttaaacccccttatttctaggactatgagaatcgaacccatccctgagaatccaaaattctccgtgccacctatcacaccccatcctaaagtaaggtcagctaaataagctatcgggcccataccccgaaaatgttggttatacccttcccgtactaattaatcccctggcccaacccgtcatctactctaccatctttgcaggcacactcatcacagcgctaagctcgcactgattttttacctgagtaggcctagaaataaacatgctagcttttattccagttctaaccaaaaaaataaaccctcgttccacagaagctgccatcaagtatttcctcacgcaagcaaccgcatccataatccttctaatagctatcctcttcaacaatatactctccggacaatgaaccataaccaatactaccaatcaatactcatcattaataatcataatggctatagcaataaaactaggaatagccccctttcacttctgagtcccagaggttacccaaggcacccctctgacatccggcctgcttcttctcacatgacaaaaactagcccccatctcaatcatataccaaatctctccctcactaaacgtaagccttctcctcactctctcaatcttatccatcatagcaggcagttgaggtggattaaaccaaacccagctacgcaaaatcttagcatactcctcaattacccacataggatgaataatagcagttctaccgtacaaccctaacataaccattcttaatttaactatttatattatcctaactactaccgcattcctactactcaacttaaactccagcaccacgaccctactactatctcgcacctgaaacaagctaacatgactaacacccttaattccatccaccctcctctccctaggaggcctgcccccgctaaccggctttttgcccaaatgggccattatcgaagaattcacaaaaaacaatagcctcatcatccccaccatcatagccaccatcaccctccttaacctctacttctacctacgcctaatctactccacctcaatcacactactccccatatctaacaacgtaaaaataaaatgacagtttgaacatacaaaacccaccccattcctccccacactcatcgcccttaccacgctactcctacctatctccccttttatactaataatcttatagaaatttaggttaaatacagaccaagagccttcaaagccctcagtaagttgcaatacttaatttctgtaacagctaaggactgcaaaaccccactctgcatcaactgaacgcaaatcagccactttaattaagctaagcccttactagaccaatgggacttaaacccacaaacacttagttaacagctaagcaccctaatcaactggcttcaatctacttctcccgccgccgggaaaaaaggcgggagaagccccggcaggtttgaagctgcttcctcgaatttgcaattcaatatgaaaatcacctcggagctggtaaaaagaggcctaacccctgtctttagatttacagtccaatgcttcactcagccattttacctcacccccactgatgttcgccgaccgttgactattctctacaaaccacaaagacattggaacactatacctattattcggcgcatgagctggagtcctaggcacagctctaagcctccttattcgagccgagctgggccagccaggcaaccttctaggtaacgaccacatctacaacgttatcgtcacagcccatgcatttgtaataatcttcttcatagtaatacccatcataatcggaggctttggcaactgactagttcccctaataatcggtgcccccgatatggcgtttccccgcataaacaacataagcttctgactcttacctccctctctcctactcctgctcgcatctgctatagtggaggccggagcaggaacaggttgaacagtctaccctcccttagcagggaactactcccaccctggagcctccgtagacctaaccatcttctccttacacctagcaggtgtctcctctatcttaggggccatcaatttcatcacaacaattatcaatataaaaccccctgccataacccaataccaaacgcccctcttcgtctgatccgtcctaatcacagcagtcctacttctcctatctctcccagtcctagctgctggcatcactatactactaacagaccgcaacctcaacaccaccttcttcgaccccgccggaggaggagaccccattctataccaacacctattctgatttttcggtcaccctgaagtttatattcttatcctaccaggcttcggaataatctcccatattgtaacttactactccggaaaaaaagaaccatttggatacataggtatggtctgagctatgatatcaattggcttcctagggtttatcgtgtgagcacaccatatatttacagtaggaatagacgtagacacacgagcatatttcacctccgctaccataatcatcgctatccccaccggcgtcaaagtatttagctgactcgccacactccacggaagcaatatgaaatgatctgctgcagtgctctgagccctaggattcatctttcttttcaccgtaggtggcctgactggcattgtattagcaaactcatcactagacatcgtactacacgacacgtactacgttgtagcccacttccactatgtcctatcaataggagctgtatttgccatcataggaggcttcattcactgatttcccctattctcaggctacaccctagaccaaacctacgccaaaatccatttcactatcatattcatcggcgtaaatctaactttcttcccacaacactttctcggcctatccggaatgccccgacgttactcggactaccccgatgcatacaccacatgaaacatcctatcatctgtaggctcattcatttctctaacagcagtaatattaataattttcatgatttgagaagccttcgcttcgaagcgaaaagtcctaatagtagaagaaccctccataaacctggagtgactatatggatgccccccaccctaccacacattcgaagaacccgtatacataaaatctagacaaaaaaggaaggaatcgaaccccccaaagctggtttcaagccaaccccatggcctccatgactttttcaaaaaggtattagaaaaaccatttcataactttgtcaaagttaaattataggctaaatcctatatatcttaatggcacatgcagcgcaagtaggtctacaagacgctacttcccctatcatagaagagcttatcacctttcatgatcacgccctcataatcattttccttatctgcttcctagtcctgtatgcccttttcctaacactcacaacaaaactaactaatactaacatctcagacgctcaggaaatagaaaccgtctgaactatcctgcccgccatcatcctagtcctcatcgccctcccatccctacgcatcctttacataacagacgaggtcaacgatccctcccttaccatcaaatcaattggccaccaatggtactgaacctacgagtacaccgactacggcggactaatcttcaactcctacatacttcccccattattcctagaaccaggcgacctgcgactccttgacgttgacaatcgagtagtactcccgattgaagcccccattcgtataataattacatcacaagacgtcttgcactcatgagctgtccccacattaggcttaaaaacagatgcaattcccggacgtctaaaccaaaccactttcaccgctacacgaccgggggtatactacggtcaatgctctgaaatctgtggagcaaaccacagtttcatgcccatcgtcctagaattaattcccctaaaaatctttgaaatagggcccgtatttaccctatagcaccccctctaccccctctagagcccactgtaaagctaacttagcattaaccttttaagttaaagattaagagaaccaacacctctttacagtgaaatgccccaactaaatactaccgtatggcccaccataattacccccatactccttacactattcctcatcacccaactaaaaatattaaacacaaactaccacctacctccctcaccaaagcccataaaaataaaaaattataacaaaccctgagaaccaaaatgaacgaaaatctgttcgcttcattcattgcccccacaatcctaggcctacccgccgcagtactgatcattctatttccccctctattgatccccacctccaaatatctcatcaacaaccgactaatcaccacccaacaatgactaatcaaactaacctcaaaacaaatgataaccatacacaacactaaaggacgaacctgatctcttatactagtatccttaatcatttttattgccacaactaacctcctcggactcctgcctcactcatttacaccaaccacccaactatctataaacctagccatggccatccccttatgagcgggcgcagtgattataggctttcgctctaagattaaaaatgccctagcccacttcttaccacaaggcacacctacaccccttatccccatactagttattatcgaaaccatcagcctactcattcaaccaatagccctggccgtacgcctaaccgctaacattactgcaggccacctactcatgcacctaattggaagcgccaccctagcaatatcaaccattaaccttccctctacacttatcatcttcacaattctaattctactgactatcctagaaatcgctgtcgccttaatccaagcctacgttttcacacttctagtaagcctctacctgcacgacaacacataatgacccaccaatcacatgcctatcatatagtaaaacccagcccatgacccctaacaggggccctctcagccctcctaatgacctccggcctagccatgtgatttcacttccactccataacgctcctcatactaggcctactaaccaacacactaaccatataccaatgatggcgcgatgtaacacgagaaagcacataccaaggccaccacacaccacctgtccaaaaaggccttcgatacgggataatcctatttattacctcagaagtttttttcttcgcaggatttttctgagccttttaccactccagcctagcccctaccccccaattaggagggcactggcccccaacaggcatcaccccgctaaatcccctagaagtcccactcctaaacacatccgtattactcgcatcaggagtatcaatcacctgagctcaccatagtctaatagaaaacaaccgaaaccaaataattcaagcactgcttattacaattttactgggtctctattttaccctcctacaagcctcagagtacttcgagtctcccttcaccatttccgacggcatctacggctcaacattttttgtagccacaggcttccacggacttcacgtcattattggctcaactttcctcactatctgcttcatccgccaactaatatttcactttacatccaaacatcactttggcttcgaagccgccgcctgatactggcattttgtagatgtggtttgactatttctgtatgtctccatctattgatgagggtcttactcttttagtataaatagtaccgttaacttccaattaactagttttgacaacattcaaaaaagagtaataaacttcgccttaattttaataatcaacaccctcctagccttactactaataattattacattttgactaccacaactcaacggctacatagaaaaatccaccccttacgagtgcggcttcgaccctatatcccccgcccgcgtccctttctccataaaattcttcttagtagctattaccttcttattatttgatctagaaattgccctccttttacccctaccatgagccctacaaacaactaacctgccactaatagttatgtcatccctcttattaatcatcatcctagccctaagtctggcctatgagtgactacaaaaaggattagactgaaccgaattggtatatagtttaaacaaaacgaatgatttcgactcattaaattatgataatcatatttaccaaatgcccctcatttacataaatattatactagcatttaccatctcacttctaggaatactagtatatcgctcacacctcatatcctccctactatgcctagaaggaataatactatcgctgttcattatagctactctcataaccctcaacacccactccctcttagccaatattgtgcctattgccatactagtctttgccgcctgcgaagcagcggtgggcctagccctactagtctcaatctccaacacatatggcctagactacgtacataacctaaacctactccaatgctaaaactaatcgtcccaacaattatattactaccactgacatgactttccaaaaaacacataatttgaatcaacacaaccacccacagcctaattattagcatcatccctctactattttttaaccaaatcaacaacaacctatttagctgttccccaaccttttcctccgaccccctaacaacccccctcctaatactaactacctgactcctacccctcacaatcatggcaagccaacgccacttatccagtgaaccactatcacgaaaaaaactctacctctctatactaatctccctacaaatctccttaattataacattcacagccacagaactaatcatattttatatcttcttcgaaaccacacttatccccaccttggctatcatcacccgatgaggcaaccagccagaacgcctgaacgcaggcacatacttcctattctacaccctagtaggctcccttcccctactcatcgcactaatttacactcacaacaccctaggctcactaaacattctactactcactctcactgcccaagaactatcaaactcctgagccaacaacttaatatgactagcttacacaatagcttttatagtaaagatacctctttacggactccacttatgactccctaaagcccatgtcgaagcccccatcgctgggtcaatagtacttgccgcagtactcttaaaactaggcggctatggtataatacgcctcacactcattctcaaccccctgacaaaacacatagcctaccccttccttgtactatccctatgaggcataattataacaagctccatctgcctacgacaaacagacctaaaatcgctcattgcatactcttcaatcagccacatagccctcgtagtaacagccattctcatccaaaccccctgaagcttcaccggcgcagtcattctcataatcgcccacgggcttacatcctcattactattctgcctagcaaactcaaactacgaacgcactcacagtcgcatcataatcctctctcaaggacttcaaactctactcccactaatagctttttgatgacttctagcaagcctcgctaacctcgccttaccccccactattaacctactgggagaactctctgtgctagtaaccacgttctcctgatcaaatatcactctcctacttacaggactcaacatactagtcacagccctatactccctctacatatttaccacaacacaatggggctcactcacccaccacattaacaacataaaaccctcattcacacgagaaaacaccctcatgttcatacacctatcccccattctcctcctatccctcaaccccgacatcattaccgggttttcctcttgtaaatatagtttaaccaaaacatcagattgtgaatctgacaacagaggcttacgaccccttatttaccgagaaagctcacaagaactgctaactcatgcccccatgtctaacaacatggctttctcaacttttaaaggataacagctatccattggtcttaggccccaaaaattttggtgcaactccaaataaaagtaataaccatgcacactactataaccaccctaaccctgacttccctaattccccccatccttaccaccctcgttaaccctaacaaaaaaaactcatacccccattatgtaaaatccattgtcgcatccacctttattatcagtctcttccccacaacaatattcatgtgcctagaccaagaagttattatctcgaactgacactgagccacaacccaaacaacccagctctccctaagcttcaaactagactacttctccataatattcatccctgtagcattgttcgttacatggtccatcatagaattctcactgtgatatataaactcagacccaaacattaatcagttcttcaaatatctactcatcttcctaattaccatactaatcttagttaccgctaacaacctattccaactgttcatcggctgagagggcgtaggaattatatccttcttgctcatcagttgatgatacgcccgagcagatgccaacacagcagccattcaagcaatcctatacaaccgtatcggcgatatcggtttcatcctcgccttagcatgatttatcctacactccaactcatgagacccacaacaaatagcccttctaaacgctaatccaagcctcaccccactactaggcctcctcctagcagcagcaggcaaatcagcccaattaggtctccacccctgactcccctcagccatagaaggccccaccccagtctcagccctactccactcaagcactatagttgtagcaggaatcttcttactcatccgcttccaccccctagcagaaaatagcccactaatccaaactctaacactatgcttaggcgctatcaccactctgttcgcagcagtctgcgcccttacacaaaatgacatcaaaaaaatcgtagccttctccacttcaagtcaactaggactcataatagttacaatcggcatcaaccaaccacacctagcattcctgcacatctgtacccacgccttcttcaaagccatactatttatgtgctccgggtccatcatccacaaccttaacaatgaacaagatattcgaaaaataggaggactactcaaaaccatacctctcacttcaacctccctcaccattggcagcctagcattagcaggaatacctttcctcacaggtttctactccaaagaccacatcatcgaaaccgcaaacatatcatacacaaacgcctgagccctatctattactctcatcgctacctccctgacaagcgcctatagcactcgaataattcttctcaccctaacaggtcaacctcgcttccccacccttactaacattaacgaaaataaccccaccctactaaaccccattaaacgcctggcagccggaagcctattcgcaggatttctcattactaacaacatttcccccgcatcccccttccaaacaacaatccccctctacctaaaactcacagccctcgctgtcactttcctaggacttctaacagccctagacctcaactacctaaccaacaaacttaaaataaaatccccactatgcacattttatttctccaacatactcggattctaccctagcatcacacaccgcacaatcccctatctaggccttcttacgagccaaaacctgcccctactcctcctagacctaacctgactagaaaagctattacctaaaacaatttcacagcaccaaatctccacctccatcatcacctcaacccaaaaaggcataattaaactttacttcctctctttcttcttcccactcatcctaaccctactcctaatcacataacctattcccccgagcaatctcaattacaatatatacaccaacaaacaatgttcaaccagtaactactactaatcaacgcccataatcatacaaagcccccgcaccaataggatcctcccgaatcaaccctgacccctctccttcataaattattcagcttcctacactattaaagtttaccacaaccaccaccccatcatactctttcacccacagcaccaatcctacctccatcgctaaccccactaaaacactcaccaagacctcaacccctgacccccatgcctcaggatactcctcaatagccatcgctgtagtatatccaaagacaaccatcattccccctaaataaattaaaaaaactattaaacccatataacctcccccaaaattcagaataataacacacccgaccacaccgctaacaatcaatactaaacccccataaataggagaaggcttagaagaaaaccccacaaaccccattactaaacccacactcaacagaaacaaagcatacatcattattctcgcacggactacaaccacgaccaatgatatgaaaaaccatcgttgtatttcaactacaagaacaccaatgaccccaatacgcaaaactaaccccctaataaaattaattaaccactcattcatcgacctccccaccccatccaacatctccgcatgatgaaacttcggctcactccttggcgcctgcctgatcctccaaatcaccacaggactattcctagccatgcactactcaccagacgcctcaaccgccttttcatcaatcgcccacatcactcgagacgtaaattatggctgaatcatccgctaccttcacgccaatggcgcctcaatattctttatctgcctcttcctacacatcgggcgaggcctatattacggatcatttctctactcagaaacctgaaacatcggcattatcctcctgcttgcaactatagcaacagccttcataggctatgtcctcccgtgaggccaaatatcattctgaggggccacagtaattacaaacttactatccgccatcccatacattgggacagacctagttcaatgaatctgaggaggctactcagtagacagtcccaccctcacacgattctttacctttcacttcatcttgcccttcattattgcagccctagcagcactccacctcctattcttgcacgaaacgggatcaaacaaccccctaggaatcacctcccattccgataaaatcaccttccacccttactacacaatcaaagacgccctcggcttacttctcttccttctctccttaatgacattaacactattctcaccagacctcctaggcgacccagacaattataccctagccaaccccttaaacacccctccccacatcaagcccgaatgatatttcctattcgcctacacaattctccgatccgtccctaacaaactaggaggcgtccttgccctattactatccatcctcatcctagcaataatccccatcctccatatatccaaacaacaaagcataatatttcgcccactaagccaatcactttattgactcctagccgcagacctcctcattctaacctgaatcggaggacaaccagtaagctacccttttaccatcattggacaagtagcatccgtactatacttcacaacaatcctaatcctaataccaactatctccctaattgaaaacaaaatactcaaatgggcctgtccttgtagtataaactaatacaccagtcttgtaaaccggagatgaaaacctttttccaaggacaaatcagagaaaaagtctttaactccaccattagcacccaaagctaagattctaatttaaactattctctgttctttcatggggaagcagatttgggtaccacccaagtattgactcacccatcaacaaccgctatgtatttcgtacattactgccagccaccatgaatattgtacggtaccataaatacttgaccacctgtagtacatgaaaacccaatccacatcaaaaccccctccccatgcttacaagcaagtacagcaatcaaccctcaactatcacacatcaactgcaactccaaagccacccctcacccactaggataccaacaaacctacccacccttaacagtacatagtacataaagccatttaccgtacatagcacattacagtcaaatcccttctcgtccccatggatgacccccctcagataggggtcccttgaccaccatcctccgtgaaatcaatatcccgcacaagagtgctactctcctcgctccgggcccataacacttgggggtagctaaagtgaactgtatccgacatctggttcctacttcagggccataaagcctaaatagcccacacgttccccttaaataagacatcacgatg

SEQ ID NO: 339 - DNA, 16570 bp, Homo sapiens mitochondrial
  3108: "n" refers to a nucleotide at position 3107 of the Cambridge Reference Sequence (CRS, Anderson et al. 1981 Nature 290:457-465), later determined to be absent from the human mtDNA sequence according to the revised CRS (rCRS, Andrews et al. 1999 Nature Genetics 23:147); "n" therefore represents a single nucleotide deletion at a position corresponding to nucleotide 3107 of SEQ ID NO:1 as provided herein.
gatcacaggtctatcaccctattaaccactcacgggagctctccatgcatttggtattttcgtctggggggtatgcacgcgatagcattgcgagacgctggagccggagcaccctatgtcgcagtatctgtctttgattcctgcctcatcctattatttatcgcacctacgttcaatattacaggcgaacatacttactaaagtgtgttaattaattaatgcttgtaggacataataataacaattgaatgtctgcacagccgctttccacacagacatcataacaaaaaatttccaccaaaccccccctccccccccgcttctggccacagcacttaaacacatctctgccaaaccccaaaaacaaagaaccctaacaccagcctaaccagatttcaaattttatcttttggcggtatgcacttttaacagtcaccccccaactaacacattattttcccctcccactcccatactactaatcttatcaatacaacccccgcccatcctacccagcacacacaccgctgctaaccccataccccgaaccaaccaaaccccaaagacaccccccacagtttatgtagcttacctcctcaaagcaatacactgaaaatgtttagacgggctcacatcaccccataaacaaataggtttggtcctagcctttctattagctcttagtaagattacacatgcaagcatccccgttccagtgagttcaccctctaaatcaccacgatcaaaagggacaagcatcaagcacgcagcaatgcagctcaaaacgcttagcctagccacacccccacgggaaacagcagtgattaacctttagcaataaacgaaagtttaactaagctatactaaccccagggttggtcaatttcgtgccagccaccgcggtcacacgattaacccaagtcaatagaagccggcgtaaagagtgttttagatcaccccctccccaataaagctaaaactcacctgagttgtaaaaaactccagttgacacaaaatagactacgaaagtggctttaacatatctgaacacacaatagctaagacccaaactgggattagataccccactatgcttagccctaaacctcaacagttaaatcaacaaaactgctcgccagaacactacgagccacagcttaaaactcaaaggacctggcggtgcttcatatccctctagaggagcctgttctgtaatcgataaaccccgatcaacctcaccacctcttgctcagcctatataccgccatcttcagcaaaccctgatgaaggctacaaagtaagcgcaagtacccacgtaaagacgttaggtcaaggtgtagcccatgaggtggcaagaaatgggctacattttctaccccagaaaactacgatagcccttatgaaacttaagggtcgaaggtggatttagcagtaaactgagagtagagtgcttagttgaacagggccctgaagcgcgtacacaccgcccgtcaccctcctcaagtatacttcaaaggacatttaactaaaacccctacgcatttatatagaggagacaagtcgtaacatggtaagtgtactggaaagtgcacttggacgaaccagagtgtagcttaacacaaagcacccaacttacacttaggagatttcaacttaacttgaccgctctgagctaaacctagccccaaacccactccaccttactaccagacaaccttagccaaaccatttacccaaataaagtataggcgatagaaattgaaacctggcgcaatagatatagtaccgcaagggaaagatgaaaaattataaccaagcataatatagcaaggactaacccctataccttctgcataatgaattaactagaaataactttgcaaggagagccaaagctaagacccccgaaaccagacgagctacctaagaacagctaaaagagcacacccgtctatgtagcaaaatagtgggaagatttataggtagaggcgacaaacctaccgagcctggtgatagctggttgtccaagatagaatcttagttcaactttaaatttgcccacagaaccctctaaatccccttgtaaatttaactgttagtccaaagaggaacagctctttggacactaggaaaaaaccttgtagagagagtaaaaaatttaacacccatagtaggcctaaaagcagccaccaattaagaaagcgttcaagctcaacacccactacctaaaaaatcccaaacatataactgaactcctcacacccaattggaccaatctatcaccctatagaagaactaatgttagtataagtaacatgaaaacattctcctccgcataagcctgcgtcagattaaaacactgaactgacaattaacagcccaatatctacaatcaaccaacaagtcattattaccctcactgtcaacccaacacaggcatgctcataaggaaaggttaaaaaaagtaaaaggaactcggcaaatcttaccccgcctgtttaccaaaaacatcacctctagcatcaccagtattagaggcaccgcctgcccagtgacacatgtttaacggccgcggtaccctaaccgtgcaaaggtagcataatcacttgttccttaaatagggacctgtatgaatggctccacgagggttcagctgtctcttacttttaaccagtgaaattgacctgcccgtgaagaggcgggcataacacagcaagacgagaagaccctatggagctttaatttattaatgcaaacagtacctaacaaacccacaggtcctaaactaccaaacctgcattaaaaatttcggttggggcgacctcggagcagaacccaacctccgagcagtacatgctaagacttcaccagtcaaagcgaactactatactcaattgatccaataacttgaccaacggaacaagttaccctagggataacagcgcaatcctattctagagtccatatcaacaatagggtttacgacctcgatgttggatcaggacatcccgatggtgcagccgctattaaaggttcgtttgttcaacgattaaagtcctacgtgatctgagttcagaccggagtaatccaggtcggtttctatctacnttcaaattcctccctgtacgaaaggacaagagaaataaggcctacttcacaaagcgccttcccccgtaaatgatatcatctcaacttagtattatacccacacccacccaagaacagggtttgttaagatggcagagcccggtaatcgcataaaacttaaaactttacagtcagaggttcaattcctcttcttaacaacatacccatggccaacctcctactcctcattgtacccattctaatcgcaatggcattcctaatgcttaccgaacgaaaaattctaggctatatacaactacgcaaaggccccaacgttgtaggcccctacgggctactacaacccttcgctgacgccataaaactcttcaccaaagagcccctaaaacccgccacatctaccatcaccctctacatcaccgccccgaccttagctctcaccatcgctcttctactatgaacccccctccccatacccaaccccctggtcaacctcaacctaggcctcctatttattctagccacctctagcctagccgtttactcaatcctctgatcagggtgagcatcaaactcaaactacgccctgatcggcgcactgcgagcagtagcccaaacaatctcatatgaagtcaccctagccatcattctactatcaacattactaataagtggctcctttaacctctccacccttatcacaacacaagaacacctctgattactcctgccatcatgacccttggccataatatgatttatctccacactagcagagaccaaccgaacccccttcgaccttgccgaaggggagtccgaactagtctcaggcttcaacatcgaatacgccgcaggccccttcgccctattcttcatagccgaatacataaacattattataataaacaccctcaccactgcaatcttcctaggaacaacatatgacgcactctcccctgaactctacacaacatattttgtcaccaagaccctacttctaacctccctgttcttatgaattcgaacagcatacccccgattccgctacgaccaactcatacacctcctatgaaaaaacttcctaccactcaccctagcattacttatatgatatgtctccatacccattacaatctccagcattccccctcaaacctaagaaatatgtctgataaaagagttactttgatagagtaaataataggagcttaaacccccttatttctaggactatgagaatcgaacccatccctgagaatccaaaattctccgtgccacctatcacaccccatcctaaagtaaggtcagctaaataagctatcgggcccataccccgaaaatgttggttatacccttcccgtactaattaatcccctggcccaacccgtcatctactctaccatctttgcaggcacactcatcacagcgctaagctcgcactgattttttacctgagtaggcctagaaataaacatgctagcttttattccagttctaaccaaaaaaataaaccctcgttccacagaagctgccatcaagtatttcctcacgcaagcaaccgcatccataatccttctaatagctatcctcttcaacaatatactctccggacaatgaaccataaccaatactaccaatcaatactcatcattaataatcataatggctatagcaataaaactaggaatagccccctttcacttctgagtcccagaggttacccaaggcacccctctgacatccggcctgcttcttctcacatgacaaaaactagcccccatctcaatcatataccaaatctctccctcactaaacgtaagccttctcctcactctctcaatcttatccatcatagcaggcagttgaggtggattaaaccaaacccagctacgcaaaatcctagcatactcctcaattacccacataggatgaataatagcagttctaccgtacaaccctaacataaccattcttaatttaactatttatattatcctaactactaccgcattcctactactcaacttaaactccagcaccacgaccctactactatctcgcacctgaaacaagctaacatgactaacacccttaattccatccaccctcctctccttaggaggcctgcccccgctaaccggctttttgcccaaatgggccattatcgaagaattcacaaaaaacaatagcctcatcatccccaccatcatagccaccatcaccctccttaacctctacttctacctacgcctaatctactccacctcaatcacactactccccatatctaacaacgtaaaaataaaatgacagtttgaacatacaaaacccaccccattcctccccacactcatcgcccttaccacgctactcctacctatctccccttttatactaataatcttatagaaatttaggttaaatacagaccaagagccttcaaagccctcagtaagttgcaatacttaatttctgtaacagctaaggactgcaaaaccccactctgcatcaactgaacgcaaatcagccactttaattaagctaagcccttactagaccaatgggacttaaacccacaaacacttagttaacagctaagcaccctaatcaactggcttcaatctacttctcccgccgccgggaaaaaaggcgggagaagccccggcaggtttgaagctgcttcttcgaatttgcaattcaatatgaaaatcacctcggagctggtaaaaagaggcctaacccctgtctttagatttacagtccaatgcttcactcagccattttacctcacccccactgatgttcgccgaccgttgactattctctacaaaccacaaagacattggaacactatacctattattcggcgcatgagctggagtcctaggcacagctctaagcctccttattcgagccgagctgggccagccaggcaaccttctaggtaacgaccacatctacaacgttatcgtcacagcccatgcatttgtaataatcttcttcatagtaatacccatcataatcggaggctttggcaactgactagttcccctaataatcggtgcccccgatatggcgtttccccgcataaacaacataagcttctgactcttacctccctctctcctactcctgctcgcatctgctatagtggaggccggagcaggaacaggttgaacagtctaccctcccttagcagggaactactcccaccctggagcctccgtagacctaaccatcttctccttacacctagcaggtgtctcctctatcttaggggccatcaatttcatcacaacaattatcaatataaaaccccctgccataacccaataccaaacgcccctcttcgtctgatccgtcctaatcacagcagtcctacttctcctatctctcccagtcctagctgctggcatcactatactactaacagaccgcaacctcaacaccaccttcttcgaccccgccggaggaggagaccccattctataccaacacctattctgatttttcggtcaccctgaagtttatattcttatcctaccaggcttcggaataatctcccatattgtaacttactactccggaaaaaaagaaccatttggatacataggtatggtctgagctatgatatcaattggcttcctagggtttatcgtgtgagcacaccatatatttacagtaggaatagacgtagacacacgagcatatttcacctccgctaccataatcatcgctatccccaccggcgtcaaagtatttagctgactcgccacactccacggaagcaatatgaaatgatctgctgcagtgctctgagccctaggattcatctttcttttcaccgtaggtggcctgactggcattgtattagcaaactcatcactagacatcgtactacacgacacgtactacgttgtagcccacttccactatgtcctatcaataggagctgtatttgccatcataggaggcttcattcactgatttcccctattctcaggctacaccctagaccaaacctacgccaaaatccatttcactatcatattcatcggcgtaaatctaactttcttcccacaacactttctcggcctatccggaatgccccgacgttactcggactaccccgatgcatacaccacatgaaacatcctatcatctgtaggctcattcatttctctaacagcagtaatattaataattttcatgatttgagaagccttcgcttcgaagcgaaaagtcctaatagtagaagaaccctccataaacctggagtgactatatggatgccccccaccctaccacacattcgaagaacccgtatacataaaatctagacaaaaaaggaaggaatcgaaccccccaaagctggtttcaagccaaccccatggcctccatgactttttcaaaaaggtattagaaaaaccatttcataactttgtcaaagttaaattataggctaaatcctatatatcttaatggcacatgcagcgcaagtaggtctacaagacgctacttcccctatcatagaagagcttatcacctttcatgatcacgccctcataatcattttccttatctgcttcctagtcctgtatgcccttttcctaacactcacaacaaaactaactaatactaacatctcagacgctcaggaaatagaaaccgtctgaactatcctgcccgccatcatcctagtcctcatcgccctcccatccctacgcatcctttacataacagacgaggtcaacgatccctcccttaccatcaaatcaattggccaccaatggtactgaacctacgagtacaccgactacggcggactaatcttcaactcctacatacttcccccattattcctagaaccaggcgacctgcgactccttgacgttgacaatcgagtagtactcccgattgaagcccccattcgtataataattacatcacaagacgtcttgcactcatgagctgtccccacattaggcttaaaaacagatgcaattcccggacgtctaaaccaaaccactttcaccgctacacgaccgggggtatactacggtcaatgctctgaaatctgtggagcaaaccacagtttcatgcccatcgtcctagaattaattcccctaaaaatctttgaaatagggcccgtatttaccctataacaccccctctaccccctctagagcccactgtaaagctaacttagcattaaccttttaagttaaagattaagagaaccaacacctctttacagtgaaatgccccaactaaatactaccgtatggcccaccataattacccccatactccttacactattcctcatcacccaactaaaaatattaaacacaaactaccacctacctccctcaccaaagcccataaaaataaaaaattataacaaaccctgagaaccaaaatgaacgaaaatctgttcgcttcattcattgcccccacaatcctaggcctacccgccgcagtactgatcattctatttccccctctattgatccccacctccaaatatctcatcaacaaccgactaatcaccacccaacaatgactaatcaaactaacctcaaaacaaatgataaccatacacaacactaaaggacgaacctgatctcttatactagtatccttaatcatttttattgccacaactaacctcctcggactcctgcctcactcatttacaccaaccacccaactatctataaacctagccatggccatccccttatgagcgggcgcagtgattataggctttcgctctaagattaaaaatgccctagcccacttcttaccacaaggcacacctacaccccttatccccatactagttattatcgaaaccatcagcctactcattcaaccaatagccctggccgtacgcctaaccgctaacattactgcaggccacctactcatgcacctaattggaagcgccaccctagcaatatcaaccattaaccttccctctacacttatcatcttcacaattctaattctactaactatcctagaaatcgctgtcgccttaatccaagcctacgttttcacacttctagtaagcctctacctgcacgacaacacataatgacccaccaatcacatgcctatcatatagtaaaacccagcccatgacccctaacaggggccctctcagccctcctaatgacctccggcctagccatgtgatttcacttccactccataacgctcctcatactaggcctactaaccaacacactaaccatataccaatgatggcgcgatgtaacacgagaaagcacataccaaggccaccacacaccacctgtccaaaaaggccttcgatacgggataatcctatttattacctcagaagtttttttcttcgcaggatttttctgagccttttaccactccagcctagcccctaccccccaattaggagggcactggcccccaacaggcatcaccccgctaaatcccctagaagtcccactcctaaacacatccgtattactcgcatcaggagtatcaatcacctgagctcaccatagtctaatagaaaacaaccgaaaccaaataattcaagcactgcttattacaattttactgggtctctattttaccctcctacaagcctcagagtacttcgagtctcccttcaccatttccgacggcatctacggctcaacattttttgtagccacaggcttccacggacttcacgtcattattggctcaactttcctcactatctgcttcatccgccaactaatatttcactttacatccaaacatcactttggcttcgaagccgccgcctgatactggcattttgtagatgtggtttgactatttctgtatgtctccatctattgatgagggtcttactcttttagtataaatagtaccgttaacttccaattaactagttttgacaacgttcaaaaaagagtaataaacttcgccttaattttaataatcaacaccctcctagccttactactaataattattacattttgactaccacaactcaacggctacatagaaaaatccaccccttacgagtgcggcttcgaccctatatcccccgcccgcgtccctttctccataaaattcttcttagtagctattaccttcttattatttgatctagaaattgccctccttttacccctaccatgagccctacaaacaactaacctgccactaatagttatgtcatccctcttattaatcatcatcctagccctaagtctggcctatgagtgactacaaaaaggattagactgaaccgaattggtatatagtttaaacaaaacgaatgatttcgactcattaaattatgataatcatatttaccaaatgcccctcatttacataaatattatactagcatttaccatctcacttctaggaatactagtatatcgctcacacctcatatcctccctactatgcctagaaggaataatactatcgctgttcattatagctactctcataaccctcaacacccactccctcttagccaatattgtgcctattgccatactagtctttgccgcctgcgaagcagcggtgggcctagccctactagtctcaatctccaacacatatggcctagactacgtacataacctaaacctactccaatgctaaaactaatcgtcccaacaattatattactaccactgacatgactttccaaaaaacacataatttgaatcaacacaaccacccacagcctaattattagcatcatccctctactattttttaaccaaatcaacaacaacctatttagctgttccccaaccttttcctccgaccccctaacaacccccctcctaatactaactacctgactcctacccctcacaatcatggcaagccaacgccacttatccagtgaaccactatcacgaaaaaaactctacctctctatactaatctccctacaaatctccttaattataacattcacagccacagaactaatcatattttatatcttcttcgaaaccacacttatccccaccttggctatcatcacccgatgaggcaaccagccagaacgcctgaacgcaggcacatacttcctattctacaccctagtaggctcccttcccctactcatcgcactaatttacactcacaacaccctaggctcactaaacattctactactcactctcactgcccaagaactatcaaactcctgagccaacaacttaatatgactagcttacacaatagcttttatagtaaagatacctctttacggactccacttatgactccctaaagcccatgtcgaagcccccatcgctgggtcaatagtacttgccgcagtactcttaaaactaggcggctatggtataatacgcctcacactcattctcaaccccctgacaaaacacatagcctaccccttccttgtactatccctatgaggcataattataacaagctccatctgcctacgacaaacagacctaaaatcgctcattgcatactcttcaatcagccacatagccctcgtagtaacagccattctcatccaaaccccctgaagcttcaccggcgcagtcattctcataattgcccacgggcttacatcctcattactattctgcctagcaaactcaaactacgaacgcactcacagtcgcatcataatcctctctcaaggacttcaaactctactcccactaatagctttttgatgacttctagcaagcctcgctaacctcgccttaccccccactattaacctactgggagaactctctgtgctagtaaccacgttctcctgatcaaatatcactctcctacttacaggactcaacatactagtcacagccctatactccctctacatatttaccacaacacaatggggctcactcacccaccacattaacaacataaaaccctcattcacacgagaaaacaccctcatgttcatacacctatcccccattctcctcctatccctcaaccccgacatcattaccgggttttcctcttgtaaatatagtttaaccaaaacatcagattgtgaatctgacaacagaggcttacgaccccttatttaccgagaaagctcacaagaactgctaactcatgcccccatgtctaacaacatggctttctcaacttttaaaggataacagctatccattggtcttaggccccaaaaattttggtgcaactccaaataaaagtaataaccatgcacactactataaccaccctaaccctgacttccctaattccccccatccttaccaccctcgttaaccctaacaaaaaaaactcatacccccattatgtaaaatccattgtcgcatccacctttattatcagtctcttccccacaacaatattcatgtgcctagaccaagaagttattatctcgaactgacactgagccacaacccaaacaacccagctctccctaagcttcaaactagactacttctccataatattcatccctgtagcattgttcgttacatggtccatcatagaattctcactgtgatatataaactcagacccaaacattaatcagttcttcaaatatctactcatcttcctaattaccatactaatcttagttaccgctaacaacctattccaactgttcatcggctgagagggcgtaggaattatatccttcttgctcatcagttgatgatacgcccgagcagatgccaacacagcagccattcaagcaatcctatacaaccgtatcggcgatatcggtttcatcctcgccttagcatgatttatcctacactccaactcatgagacccacaacaaatagcccttctaaacgctaatccaagcctcaccccactactaggcctcctcctagcagcagcaggcaaatcagcccaattaggtctccacccctgactcccctcagccatagaaggccccaccccagtctcagccctactccactcaagcactatagttgtagcaggaatcttcttactcatccgcttccaccccctagcagaaaatagcccactaatccaaactctaacactatgcttaggcgctatcaccactctgttcgcagcagtctgcgcccttacacaaaatgacatcaaaaaaatcgtagccttctccacttcaagtcaactaggactcataatagttacaatcggcatcaaccaaccacacctagcattcctgcacatctgtacccacgccttcttcaaagccatactatttatgtgctccgggtccatcatccacaaccttaacaatgaacaagatattcgaaaaataggaggactactcaaaaccatacctctcacttcaacctccctcaccattggcagcctagcattagcaggaatacctttcctcacaggtttctactccaaagaccacatcatcgaaaccgcaaacatatcatacacaaacgcctgagccctatctattactctcatcgctacctccctgacaagcgcctatagcactcgaataattcttctcaccctaacaggtcaacctcgcttccccacccttactaacattaacgaaaataaccccaccctactaaaccccattaaacgcctggcagccggaagcctattcgcaggatttctcattactaacaacatttcccccgcatcccccttccaaacaacaatccccctctacctaaaactcacagccctcgctgtcactttcctaggacttctaacagccctagacctcaactacctaaccaacaaacttaaaataaaatccccactatgcacattttatttctccaacatactcggattctaccctagcatcacacaccgcacaatcccctatctaggccttcttacgagccaaaacctgcccctactcctcctagacctaacctgactagaaaagctattacctaaaacaatttcacagcaccaaatctccacctccatcatcacctcaacccaaaaaggcataattaaactttacttcctctctttcttcttcccactcatcctaaccctactcctaatcacataacctattcccccgagcaatctcaattacaatatatacaccaacaaacaatgttcaaccagtaactactactaatcaacgcccataatcatacaaagcccccgcaccaataggatcctcccgaatcaaccctgacccctctccttcataaattattcagcttcctacactattaaagtttaccacaaccaccaccccatcatactctttcacccacagtaccaatcctacctccatcgctaaccccactaaaacactcaccaagacctcaacccctgacccccatgcctcaggatactcctcaatagccatcgctgtagtatatccaaagacaaccatcattccccctaaataaattaaaaaaactattaaacccatataacctcccccaaaattcagaataataacacacccgaccacaccgctaacaatcaatgctaaacccccataaataggagaaggcttagaagaaaaccccacaaaccccattactaaacccacactcaacagaaacaaagcatacatcattattctcgcacggactacaaccacgaccaatgatatgaaaaaccatcgttgtatttcaactacaagaacaccaatgaccccaatacgcaaaactaaccccctaataaaattaattaaccactcattcatcgacctccccaccccatccaacatctccgcatgatgaaacttcggctcactccttggcgcctgcctgatcctccaaatcaccacaggactattcctagccatgcactactcaccagacgcctcaaccgccttttcatcaatcgcccacatcactcgagacgtaaattatggctgaatcatccgctaccttcacgccaatggcgcctcaatattctttatctgcctcttcctacacatcgggcgaggcctatattacggatcatttctctactcagaaacctgaaacatcggcattatcctcctgcttgcaactatagcaacagccttcataggctatgtcctcccgtgaggccaaatatcattctgaggggccacagtaattacaaacttactatccgccatcccatacattgggacagacctagttcaatgaatctgaggaggctactcagtagacagtcccaccctcacacgattctttacctttcacttcatcttgcccttcattattgcagccctagcagcactccacctcctattcttgcacgaaacgggatcaaacaaccccctaggaatcacctcccattccgataaaatcaccttccacccttactacacaatcaaagacgccctcggcttacttctcttccttctctccttaatgacattaacactattctcaccagacctcctaggcgacccagacaattataccctagccaaccccttaaacacccctccccacatcaagcccgaatgatatttcctattcgcctacacaattctccgatccgtccctaacaaactaggaggcgtccttgccctattactatccatcctcatcctagcaataatccccatcctccatatatccaaacaacaaagcataatatttcgcccactaagccaatcactttattgactcctagccgcagacctcctcattctaacctgaatcggaggacaaccagtaagctacccttttaccatcattggacaagtagcatccgtactatacttcacaacaatcctaatcctaataccaactatctccctaattgaaaacaaaatactcaaatgggcctgtccttgtagtataaactaatacaccagtcttgtaaaccggagatgaaaacctttttccaaggacaagtcagagaaaaagtctttaactccaccattagcacccaaagctaagattctaatttaaactattctctgttctttcatggggaagcagatttgggtaccacccaagtattgactcacccatcaacaaccgctatgtatttcgtacattactgccagccaccatgaatattgtacggtaccataaatacttgaccacctgtagtacataaaaacccaatccacatcaaaaccccctccccatgcttacaagcaagtacagcaatcaaccctcaactatcacacatcaactgcaactccaaagccacccctcacccactaggataccaacaaacctacccacccttaacagtacatagtacataaagccatttaccgtacatagcacattacagtcaaatcccttctcgtccccatggatgacccccctcagataggggtcccttgaccaccatcctccgtgaaatcaatatcccgcacaagagtgctactctcctcgctccgggcccataacacttgggggtagctaaagtgaactgtatccgacatctggttcctacttcagggtcataaagcctaaatagcccacacgttccccttaaataagacatcacgatg

SEQ ID NO: 340 - DNA, 16572 bp, Homo sapiens mitochondrial
  3110: "n" refers to a nucleotide at position 3107 of the Cambridge Reference Sequence (CRS, Anderson et al. 1981 Nature 290:457-465), later determined to be absent from the human mtDNA sequence according to the revised CRS (rCRS, Andrews et al. 1999 Nature Genetics 23:147); "n" therefore represents a single nucleotide deletion at a position corresponding to nucleotide 3107 of SEQ ID NO:1 as provided herein.
gatcacaggtctatcaccctattaaccactcacgggagctctccatgcatttggtattttcgtctggggggtatgcacgcgatagcattgcgagacgctggagccggagcaccctatgtcgcagtatctgtctttgattcctgccccatcctattatttatcgcacctacgttcaatattacaggcgaacatacttactaaagtgtgttaattaattaatgcttgtaggacataataataacaattgaatgtctgcacagccgctttccacacagacatcataacaaaaaatttccaccaaaccccccctccccccccgcttctggccacagcacttaaacacatctctgccaaaccccaaaaacaaagaaccctaacaccagcctaaccagatttcaaattttatcttttggcggtatgcacttttaacagtcaccccccaactaacacattattttcccctcccactcccatactactaatctcatcaatacaacccccgcccatcctacccagcacacacacaccgctgctaaccccataccccgaaccaaccaaaccccaaagacaccccccacagtttatgtagcttacctcctcaaagcaatacactgaaaatgtttagacgggctcacatcaccccataaacaaataggtttggtcctagcctttctattagctcttagtaagattacacatgcaagcatccccgttccagtgagttcaccctctaaatcaccacgatcaaaagggacaagcatcaagcacgcagcaatgcagctcaaaacgcttagcctagccacacccccacgggaaacagcagtgattaacctttagcaataaacgaaagtttaactaagctatactaaccccagggttggtcaatttcgtgccagccaccgcggtcacacgattaacccaagtcaatagaagccggcgtaaagagtgttttagatcaccccctccccaataaagctaaaactcacctgagttgtaaaaaactccagttgacacaaaatagactacgaaagtggctttaacatatctgaacacacaatagctaagacccaaactgggattagataccccactatgcttagccctaaacctcaacagttaaatcaacaaaactgctcgccagaacactacgagccacagcttaaaactcaaaggacctggcggtgcttcatatccctctagaggagcctgttctgtaatcgataaaccccgatcaacctcaccacctcttgctcagcctatataccgccatcttcagcaaaccctgatgaaggctacaaagtaagcgcaagtacccacgtaaagacgttaggtcaaggtgtagcccatgaggtggcaagaaatgggctacattttctaccccagaaaactacgatagcccttatgaaacttaagggtcgaaggtggatttagcagtaaactgagagtagagtgcttagttgaacagggccctgaagcgcgtacacaccgcccgtcaccctcctcaagtatacttcaaaggacatttaactaaaacccctacgcatttatatagaggagacaagtcgtaacatggtaagtgtactggaaagtgcacttggacgaaccagagtgtagcttaacacaaagcacccaacttacacttaggagatttcaacttaacttgaccgctctgagctaaacctagccccaaacccactccaccttactaccagacaaccttagccaaaccatttacccaaataaagtataggcgatagaaattgaaacctggcgcaatagatatagtaccgcaagggaaagatgaaaaattataaccaagcataatatagcaaggactaacccctataccttctgcataatgaattaactagaaataactttgcaaggagagccaaagctaagacccccgaaaccagacgagctacctaagaacagctaaaagagcacacccgtctatgtagcaaaatagtgggaagatttataggtagaggcgacaaacctaccgagcctggtgatagctggttgtccaagatagaatcttagttcaactttaaatttgcccacagaaccctctaaatccccttgtaaatttaactgttaatccaaagaggaacagctctttggacactaggaaaaaaccttgtagagagagtaaaaaatttaacacccatagtaggcctaaaagcagccaccaattaagaaagcgttcaagctcaacacccactacctaaaaaatcccaaacatataactgaactcctcacacccaattggaccaatctatcaccctatagaagaactaatgttagtataagtaacatgaaaacattctcctccgcataagcctgcgtcagattaaaacactgaactgacaattaacagcccaatatctacaatcaaccaacaagtcattattaccctcactgtcaacccaacacaggcatgctcataaggaaaggttaaaaaaagtaaaaggaactcggcaaatcttaccccgcctgtttaccaaaaacatcacctctagcatcaccagtattagaggcaccgcctgcccagtgacacatgtttaacggccgcggtaccctaaccgtgcaaaggtagcataatcacttgttccttaaatagggacctgtatgaatggctccacgagggttcagctgtctcttacttttaaccagtgaaattgacctgcccgtgaagaggcgggcataacacagcaagacgagaagaccctatggagctttaatttattaatgcaaacagtacctaacaaacccacaggtcctaaactaccaaacctgcattaaaaatttcggttggggcgacctcggagcagaacccaacctccgagcagtacatgctaagacttcaccagtcaaagcgaactactatactcaattgatccaataacttgaccaacggaacaagttaccctagggataacagcgcaatcctattctagagtccatatcaacaatagggtttacgacctcgatgttggatcaggacatcccaatggtgcagccgctattaaaggttcgtttgttcaacgattaaagtcctacgtgatctgagttcagaccggagtaatccaggtcggtttctatctacnttcaaattcctccctgtacgaaaggacaagagaaataaggcctacttcacaaagcgccttcccccgtaaatgatatcatctcaacttagtattatacccacacccacccaagaacagggtttgttaagatggcagagcccggtaatcgcataaaacttaaaactttacagtcagaggttcaattcctcttcttaacaacatacccatggccaacctcctactcctcattgtacccattctaatcgcaatggcattcctaatgcttaccgaacgaaaaattctaggctatatacaactacgcaaaggccccaacgttgtaggcccctacgggctactacaacccttcgctgacgccataaaactcttcaccaaagagcccctaaaacccgccacatctaccatcaccctctacatcaccgccccgaccttagctctcaccatcgctcttctactatgaacccccctccccatacccaaccccctggtcaacctcaacctaggcctcctatttattctagccacctctagcctagccgtttactcaatcctctgatcagggtgagcatcaaactcaaactacgccctgatcggcgcactgcgagcagtagcccaaacaatctcatatgaagtcaccctagccatcattctactatcaacattactaataagtggctcctttaacctctccacccttatcacaacacaagaacacctctgattactcctgccatcatgacccttggccataatatgatttatctccacactagcagagaccaaccgaacccccttcgaccttgccgaaggggagtccgaactagtctcaggcttcaacatcgaatacgccgcaggccccttcgccctattcttcatagccgaatacacaaacattattataataaacaccctcaccactacaatcttcctaggaacaacatatgacgcactctcccctgaactctacacaacatattttgtcaccaagaccctacttctaacctccctgttcttatgaattcgaacagcatacccccgattccgctacgaccaactcatacacctcctatgaaaaaacttcctaccactcaccctagcattacttatatgatatgtctccatacccattacaatctccagcattccccctcaaacctaagaaatatgtctgataaaagagttactttgatagagtaaataataggagcttaaacccccttatttctaggactatgagaatcgaacccatccctgagaatccaaaattctccgtgccacctatcacaccccatcctaaagtaaggtcagctaaataagctatcgggcccataccccgaaaatgttggttatacccttcccgtactaattaatcccctggcccaacccgtcatctactctaccatctttgcaggcacactcatcacagcgctaagctcgcactgattttttacctgagtaggcctagaaataaacatgctagcttttattccagttctaaccaaaaaaataaaccctcgttccacagaagctgccatcaagtatttcctcacgcaagcaaccgcatccataatccttctaatagctatcctcttcaacaatatactctccggacaatgaaccataaccaatactaccaatcaatactcatcattaataatcataatggctatagcaataaaactaggaatagccccctttcacttctgagtcccagaggttacccaaggcacccctctgacatccggcctgcttcttctcacatgacaaaaactagcccccatctcaatcatataccaaatctctccctcactaaacgtaagccttctcctcactctctcaatcttatccatcatagcaggcagttgaggtggattaaaccaaacccagctacgcaaaatcttagcatactcctcaattacccacataggatgaataatagcagttctaccgtacaaccctaacataaccattcttaatttaactatttatattatcctaactactaccgcattcctactactcaacttaaactccagcaccacgaccctactactatctcgcacctgaaacaagctaacatgactaacacccttaattccatccaccctcctctccctaggaggcctgcccccgctaaccggctttttgcccaaatgggccattatcgaagaattcacaaaaaacaatagcctcatcatccccaccatcatagccaccatcaccctccttaacctctacttctacctacgcctaatctactccacctcaatcacactactccccatatctaacaacgtaaaaataaaatgacagtttgaacatacaaaacccaccccattcctccccacactcatcgcccttaccacgctactcctacctatctccccttttatactaataatcttatagaaatttaggttaaatacagaccaagagccttcaaagccctcagtaagttgcaatacttaatttctgtaacagctaaggactgcaaaaccccactctgcatcaactgaacgcaaatcagccactttaattaagctaagcccttactagaccaatgggacttaaacccacaaacacttagttaacagctaagcaccctaatcaactggcttcaatctacttctcccgccgccgggaaaaaaggcgggagaagccccggcaggtttgaagctgcttcttcgaatttgcaattcaatatgaaaatcacctcggagctggtaaaaagaggcctaacccctgtctttagatttacagtccaatgcttcactcagccattttacctcacccccactgatgttcgccgaccgttgactattctctacaaaccacaaagacattggaacactatacctattattcggcgcatgagctggagtcctaggcacagctctaagcctccttattcgagccgagctgggccagccaggcaaccttctaggtaacgaccacatctacaacgttatcgtcacagcccatgcatttgtaataatcttcttcatagtaatacccatcataatcggaggctttggcaactgactagttcccctaataatcggtgcccccgatatggcgtttccccgcataaacaacataagcttctgactcttacctccctctctcctactcctgctcgcatctgctatagtggaggccggagcaggaacaggttgaacagtctaccctcccttagcagggaactactcccaccctggagcctccgtagacctaaccatcttctccttacacctagcaggtgtctcctctatcttaggggccatcaatttcatcacaacaattatcaatataaaaccccctgccataacccaataccaaacgcccctcttcgtctgatccgtcctaatcacagcagtcctacttctcctatctctcccagtcctagctgctggcatcactatactactaacagaccgcaacctcaacaccaccttcttcgaccccgccggaggaggagaccccattctataccaacacctattctgatttttcggtcaccctgaagtttatattcttatcctaccaggcttcggaataatctcccatattgtaacttactactccggaaaaaaagaaccatttggatacataggtatggtctgagctatgatatcaattggcttcctagggtttatcgtgtgagcacaccatatatttacagtaggaatagacgtagacacacgagcatatttcacctccgctaccataatcatcgctatccccaccggcgtcaaagtatttagctgactcgccacactccacggaagcaatatgaaatgatctgctgcagtgctctgagccctaggattcatctttcttttcaccgtaggtggcctgactggcattgtattagcaaactcatcactagacatcgtactacacgacacgtactacgttgtagcccacttccactatgtcctatcaataggagctgtatttgccatcataggaggcttcattcactgatttcccctattctcaggctacaccctagaccaaacctacgccaaaatccatttcactatcatattcatcggcgtaaatctaactttcttcccacaacactttctcggcctatccggaatgccccgacgttactcggactaccccgatgcatacaccacatgaaacatcctatcatctgtaggctcattcatttctctaacagcagtaatattaataattttcatgatttgagaagccttcgcttcgaagcgaaaagtcctaatagtagaagaaccctccataaacctggagtgactatatggatgccccccaccctaccacacattcgaagaacccgtatacataaaatctagacaaaaaaggaaggaatcgaaccccccaaagctggtttcaagccaaccccatggcctccatgactttttcaaaaaggtattagaaaaaccatttcataactttgtcaaagttaaattataggctaaatcctatatatcttaatggcacatgcagcgcaagtaggtctacaagacgctacttcccctatcatagaagagcttatcacctttcatgatcacgccctcataatcattttccttatctgcttcctagtcctgtatgcccttttcctaacactcacaacaaaactaactaatactaacatctcagacgctcaggaaatagaaaccgtctgaactatcctgcccgccatcatcctagtcctcatcgccctcccatccctacgcatcctttacataacagacgaggtcaacgatccctcccttaccatcaaatcaattggccaccaatggtactgaacctacgagtacaccgactacggcggactaatcttcaactcctacatacttcccccattattcctagaaccaggcgacctgcgactccttgacgttgacaatcgagtagtactcccgattgaagcccccattcgtataataattacatcacaagacgtcttgcactcatgagctgtccccacattaggcttaaaaacagatgcaattcccggacgtctaaaccaaaccactttcaccgctacacgaccgggggtatactacggtcaatgctctgaaatctgtggagcaaaccacagtttcatgcccatcgtcctagaattaattcccctaaaaatctttgaaatagggcccgtatttaccctatagcaccccctctaccccctctagagcccactgtaaagctaacttagcattaaccttttaagttaaagattaagagaaccaacacctctttacagtgaaatgccccaactaaatactaccgtatggcccaccataattacccccatactccttacactattcctcatcacccaactaaaaatattaaacacaaactaccacctacctccctcaccaaagcccataaaaataaaaaattataacaaaccctgagaaccaaaatgaacgaaaatctgttcgcttcattcattgcccccacaatcctaggcctacccgccgcagtactgatcattctatttccccctctattgatccccacctccaaatatctcatcaacaaccgactaatcaccacccaacaatgactaatcaaactaacctcaaaacaaatgataaccatacacaacactaaaggacgaacctgatctcttatactagtatccttaatcatttttattgccacaactaacctcctcggactcctgcctcactcatttacaccaaccacccaactatctataaacctagccatggccatccccttatgagcgggcgcagtgattataggctttcgctctaagattaaaaatgccctagcccacttcttaccacaaggcacacctacaccccttatccccatactagttattatcgaaaccatcagcctactcattcaaccaatagccctggccgtacgcctaaccgctaacattactgcaggccacctactcatgcacctaattggaagcgccaccctagcaatatcaaccattaaccttccctctacacttatcatcttcacaattctaattctactgactatcctagaaatcgctgtcgccttaatccaagcctacgttttcacacttctagtaagcctctacctgcacgacaacacataatgacccaccaatcacatgcctatcatatagtaaaacccagcccatgacccctaacaggggccctctcagccctcctaatgacctccggcctagccatgtgatttcacttccactccataacgctcctcatactaggcctactaaccaacacactaaccatataccaatgatggcgcgatgtaacacgagaaagcacataccaaggccaccacacaccacctgtccaaaaaggccttcgatacgggataatcctatttattacctcagaagtttttttcttcgcaggatttttctgagccttttaccactccagcctagcccctaccccccaattaggagggcactggcccccaacaggcatcaccccgctaaatcccctagaagtcccactcctaaacacatccgtattactcgcatcaggagtatcaatcacctgagctcaccatagtctaatagaaaacaaccgaaaccaaataattcaagcactgcttattacaattttactgggtctctattttaccctcctacaagcctcagagtacttcgagtctcccttcaccatttccgacggcatctacggctcaacattttttgtagccacaggcttccacggacttcacgtcattattggctcaactttcctcactatctgcttcatccgccaactaatatttcactttacatccaaacatcactttggcttcgaagccgccgcctgatactggcattttgtagatgtggtttgactatttctgtatgtctccatctattgatgagggtcttactcttttagtataaatagtaccgttaacttccaattaactagttttgacaacattcaaaaaagagtaataaacttcgccttaattttaataatcaacaccctcctagccttactactaataattattacattttgactaccacaactcaacggctacatagaaaaatccaccccttatgagtgcggcttcgaccctatatcccccgcccgcgtccctttctccataaaattcttcttagtagctattaccttcttattatttgatctagaaattgccctccttttacccctaccatgagccctacaaacaactaacctgccactaatagttatgtcatccctcttattaatcatcatcctagccctaagtctggcctatgagtgactacaaaaaggattagactgaaccgaattggtatatagtttaaacaaaacgaatgatttcgactcattaaattatgataatcatatttaccaaatgcccctcatttacataaatattatactagcatttaccatctcacttctaggaatactagtatatcgctcacacctcatatcctccctactatgcctagaaggaataatactatcgctgttcattatagctactctcataaccctcaacacccactccctcttagccaatattgtgcctattgccatactagtctttgccgcctgcgaagcagcggtgggcctagccctactagtctcaatctccaacacatatggcctagactacgtacataacctaaacctactccaatgctaaaactaatcgtcccaacaattatattactaccactgacatgactttccaaaaaacacataatttgaatcaacacaaccacccacagcctaattattagcatcatccctctactattttttaaccaaatcaacaacaacctatttagctgttccccaaccttttcctccgaccccctaacaacccccctcctaatactaactacctgactcctacccctcacaatcatggcaagccaacgccacttatccagtgaaccactatcacgaaaaaaactctacctctctatactaatctccctacaaatctccttaattataacattcacagccacagaactaatcatattttatatcttcttcgaaaccacacttatccccaccttggctatcatcacccgatgaggcaaccagccagaacgcctgaacgcaggcacatacttcctattctacaccctagtaggctcccttcccctactcatcgcactaatttacactcacaacaccctaggctcactaaacattctactactcactctcactgcccaagaactatcaaactcctgagccaacaacttaatatgactagcttacacaatagcttttatagtaaagatacctctttacggactccacttatgactccctaaagcccatgtcgaagcccccatcgctgggtcaatagtacttgccgcagtactcttaaaactaggcggctatggtataatacgcctcacactcattctcaaccccctgacaaaacacatagcctaccccttccttgtactatccctatgaggcataattataacaagctccatctgcctacgacaaacagacctaaaatcgctcattgcatactcttcaatcagccacatagccctcgtagtaacagccattctcatccaaaccccctgaagcttcaccggcgcagtcattctcataatcgcccacgggcttacatcctcattactattctgcctagcaaactcaaactacgaacgcactcacagtcgcatcataatcctctctcaaggacttcaaactctactcccactaatagctttttgatgacttctagcaagcctcgctaacctcgccttaccccccactattaacctactgggagaactctctgtgctagtaaccacgttctcctgatcaaatatcactctcctacttacaggactcaacatactagtcacagccctatactccctctacatatttaccacaacacaatggggctcactcacccaccacattaacaacataaaaccctcattcacacgagaaaacaccctcatgttcatacacctatcccccattctcctcctatccctcaaccccgacatcattaccgggttttcctcttgtaaatatagtttaaccaaaacatcagattgtgaatctgacaacagaggcttacgaccccttatttaccgagaaagctcacaagaactgctaactcatgcccccatgtctaacaacatggctttctcaacttttaaaggataacagctatccattggtcttaggccccaaaaattttggtgcaactccaaataaaagtaacaaccatgcacactactataaccaccctaaccctgacttccctaattccccccatccttaccaccctcgttaaccctaacaaaaaaaactcatacccccattatgtaaaatccattgtcgcatccacctttattatcagtctcttccccacaacaatattcatgtgcctagaccaagaagttattatctcgaactgacactgagccacaacccaaacaacccagctctccctaagcttcaaactagactacttctccataatattcatccctgtagcattgttcgttacatggtccatcatagaattctcactgtgatatataaactcagacccaaacattaatcagttcttcaaatatctactcatcttcctaattaccatactaatcttagttaccgctaacaacctattccaactgttcatcggctgagagggcgtaggaattatatccttcttgctcatcagttgatgatacgcccgagcagatgccaacacagcagccattcaagcaatcctatacaaccgtatcggcgatatcggtttcatcctcgccttagcatgatttatcctacactccaactcatgagacccacaacaaatagcccttctaaacgctaatccaagcctcaccccactactaggcctcctcctagcagcagcaggcaaatcagcccaattaggtctccacccctgactcccctcagccatagaaggccccaccccagtctcagccctactccactcaagcactatagttgtagcaggaatcttcttactcatccgcttccaccccctagcagaaaatagcccactaatccaaactctaacactatgcttaggcgctatcaccactctgttcgcagcagtctgcgcccttacacaaaatgacatcaaaaaaatcgtagccttctccacttcaagtcaactaggactcataatagttacaatcggcatcaaccaaccacacctagcattcctgcacatctgtacccacgccttcttcaaagccatactatttatgtgctccgggtccatcatccacaaccttaacaatgaacaagatattcgaaaaataggaggactactcaaaaccatacctctcacttcaacctccctcaccattggcagcctagcattagcaggaatacctttcctcacaggtttctactccaaagaccacatcatcgaaaccgcaaacatatcatacacaaacgcctgagccctatctattactctcatcgctacctccctgacaagcgcctatagcactcgaataattcttctcaccctaacaggtcaacctcgcttccccacccttactaacattaacgaaaataaccccaccctactaaaccccattaaacgcctggcagccggaagcctattcgcaggatttctcattactaacaacatttcccccgcatcccccttccaaacaacaatccccctctacctaaaactcacagccctcgctgtcactttcctaggacttctaacagccctagacctcaactacctaaccaacaaacttaaaataaaatccccactatgcacattttatttctccaacatactcggattctaccctagcatcacacaccgcacaatcccctatctaggccttcttacgagccaaaacctgcccctactcctcctagacctaacctgactagaaaagctattacctaaaacaatttcacagcaccaaatctccacctccatcatcacctcaacccaaaaaggcataattaaactttacttcctctctttcttcttcccactcatcctaaccctactcctaatcacataacctattcccccgagcaatctcaattacaatatatacaccaacaaacaatgttcaaccagtaactactactaatcaacgcccataatcatacaaagcccccgcaccaataggatcctcccgaatcaaccctgacccctctccttcataaattattcagcttcctacactattaaagtttaccacaaccaccaccccatcatactctttcacccacagcaccaatcctacctccatcgctaaccccactaaaacactcaccaagacctcaacccctgacccccatgcctcaggatactcctcaatagccatcgctgtagtatatccaaagacaaccatcattccccctaaataaattaaaaaaactattaaacccatataacctcccccaaaattcagaataataacacacccgaccacaccgctaacaatcaatactaaacccccataaataggagaaggcttagaagaaaaccccacaaaccccattactaaacccacactcaacagaaacaaagcatacatcattattctcgcacggactacaaccacgaccaatgatatgaaaaaccatcgttgtatttcaactacaagaacaccaatgaccccaatacgcaaaactaaccccctaataaaattaattaaccactcattcatcgacctccccaccccatccaacatctccgcatgatgaaacttcggctcactccttggcgcctgcctgatcctccaaatcaccacaggactattcctagccatgcactactcaccagacgcctcaaccgccttttcatcaatcgcccacatcactcgagacgtaaattatggctgaatcatccgctaccttcacgccaatggcgcctcaatattctttatctgcctcttcctacacatcgggcgaggcctatattacggatcatttctctactcagaaacctgaaacatcggcattatcctcctgcttgcaactatagcaacagccttcataggctatgtcctcccgtgaggccaaatatcattctgaggggccacagtaattacaaacttactatccgccatcccatacattggaacagacctagttcaatgaatctgaggaggctactcagtagacagtcccaccctcacacgattctttacctttcacttcatcttgcccttcattattgcagccctagcagcactccacctcctattcttgcacgaaacgggatcaaacaaccccctaggaatcacctcccattccgataaaatcaccttccacccttactacacaatcaaagacgccctcggcttacttctcttccttctctccttaatgacattaacactattctcaccagacctcctaggcgacccagacaattataccctagccaaccccttaaacacccctccccacatcaagcccgaatgatatttcctattcgcctacacaattctccgatccgtccctaacaaactaggaggcgtccttgccctattactatccatcctcatcctagcaataatccccatcctccatatatccaaacaacaaagcataatatttcgcccactaagccaatcactttattgactcctagccgcagacctcctcattctaacctgaatcggaggacaaccagtaagctacccttttaccatcattggacaagtagcatccgtactatacttcacaacaatcctaatcctaataccaactatctccctaattgaaaacaaaatactcaaatgggcctgtccttgtagtataaactaatacaccagtcttgtaaaccggagatgaaaacctttttccaaggacaaatcagagaaaaagtctttaactccaccattagcacccaaagctaagattctaatttaaactattctctgttctttcatggggaagcagatttgggtaccacccaagtattgactcacccatcaacaaccgctatgtatttcgtacattactgccagccaccatgaatattgtacggtaccataaatacttgaccacctgtagtacataaaaacccaatccacatcaaaaccccctccccatgcttacaagcaagtacagcaatcaaccctcaactatcacacatcaactgcaactccaaagccaccccttacccactaggataccaacaaacctacccacccttaacagtacatagtacataaagccatttaccgtacatagcacattacagtcaaatcccttctcgtccccatggatgacccccctcagataggggtcccttgaccaccatcctccgtgaaatcaatatcccgcacaagagtgctactctcctcgctccgggcccataacacttgggggtagctaaagtgaactgtatccgacatctggttcctacttcagggccataaagcctaaatagcccacacgttccccttaaataagacatcacgatg

SEQ ID NO: 341 - DNA, 16571 bp, Homo sapiens mitochondrial
  3109: "n" refers to a nucleotide at position 3107 of the Cambridge Reference Sequence (CRS, Anderson et al. 1981 Nature 290:457-465), later determined to be absent from the human mtDNA sequence according to the revised CRS (rCRS, Andrews et al. 1999 Nature Genetics 23:147); "n" therefore represents a single nucleotide deletion at a position corresponding to nucleotide 3107 of SEQ ID NO:1 as provided herein.
gatcacaggtctatcaccctattaaccactcacgggagctctccatgcatttggtattttcgtctggggggtatgcacgcgatagcattgcgagacgctggagccggagcaccctatgtcgcagtatctgtctttgattcctgcctcatcccattatttatcgcacctacgttcaatattacaggcgaacatacttactaaagtgtgttaattaattaatgcttgtaggacataataataacaattgaatgtctgcacagccgctttccacacagacatcataacaaaaaatttccaccaaaccccccctcccccccgcttctggccacagcacttaaacacatctctgccaaaccccaaaaacaaagaaccctaacaccagcctaaccagatttcaaattttatcttttggcggtatgcacttttaacagtcaccccccaactaacacattattttcccctcccactcccatactactaatctcatcaatacaacccccgcccatcctacccagcacacacacaccgctgctaaccccataccccgaaccaaccaaaccccaaagacaccccccacagtttatgtagcttacctcctcaaagcaatacactgaaaatgtttagacgggctcacatcaccccataaacaaataggtttggtcctagcctttctattagctcttagtaagattacacatgcaagcatccccgttccagtgagttcaccctctaaatcaccacgatcaaaagggacaagcatcaagcacgcagcaatgcagctcaaaacgcttagcctagccacacccccacgggaaacagcagtgattaacctttagcaataaacgaaagtttaactaagctatactaaccccagggttggtcaatttcgtgccagccaccgcggtcacacgattaacccaagtcaatagaagccggcgtaaagagtgttttagatcaccccctccccaataaagctaaaactcacctgagttgtaaaaaactccagttgacacaaaatagactacgaaagtggctttaacatatctgaacacacaatagctaagacccaaactgggattagataccccactatgcttagccctaaacctcaacagttaaatcaacaaaactgctcgccagaacactacgagccacagcttaaaactcaaaggacctggcggtgcttcatatccctctagaggagcctgttctgtaatcgataaaccccgatcaacctcaccacctcttgctcagcctatataccgccatcttcagcaaaccctgatgaaggctacaaagtaagcgcaagtacccacgtaaagacgttaggtcaaggtgtagcccatgaggtggcaagaaatgggctacattttctaccccagaaaactacgatagcccttatgaaacttaagggtcgaaggtggatttagcagtaaactgagagtagagtgcttagttgaacagggccctgaagcgcgtacacaccgcccgtcaccctcctcaagtatacttcaaaggacatttaactaaaacccctacgcatttatatagaggagacaagtcgtaacatggtaagtgtactggaaagtgcacttggacgaaccagagtgtagcttaacacaaagcacccaacttacacttaggagatttcaacttaacttgaccgctctgagctaaacctagccccaaacccactccaccttactaccagacaaccttagccaaaccatttacccaaataaagtataggcgatagaaattgaaacctggcgcaatagatatagtaccgcaagggaaagatgaaaaattataaccaagcataatatagcaaggactaacccctataccttctgcataatgaattaactagaaataactttgcaaggagagccaaagctaagacccccgaaaccagacgagctacctaagaacagctaaaagagcacacccgtctatgtagcaaaatagtgggaagatttataggtagaggcgacaaacctaccgagcctggtgatagctggttgtccaagatagaatcttagttcaactttaaatttgcccacagaaccctctaaatccccttgtaaatttaactgttagtccaaagaggaacagctctttggacactaggaaaaaaccttgtagagagagtaaaaaatttaacacccatagtaggcctaaaagcagccaccaattaagaaagcgttcaagctcaacacccactacctaaaaaatcccaaacatataactgaactcctcacacccaattggaccaatctatcaccctatagaagaactaatgttagtataagtaacatgaaaacattctcctccgcataagcctgcgtcagattaaaacactgaactgacaattaacagcccaatatctacaatcaaccaacaagtcattattaccctcactgtcaacccaacacaggcatgctcataaggaaaggttaaaaaaagtaaaaggaactcggcaaatcttaccccgcctgtttaccaaaaacatcacctctagcatcaccagtattagaggcaccgcctgcccagtgacacatgtttaacggccgcggtaccctaaccgtgcaaaggtagcataatcacttgttccttaaatagggacctgtatgaatggctccacgagggttcagctgtctcttacttttaaccagtgaaattgacctgcccgtgaagaggcgggcataacacagcaagacgagaagaccctatggagctttaatttattaatgcaaacagtacctaacaaacccacaggtcctaaactaccaaacctgcattaaaaatttcggttggggcgacctcggagcagaacccaacctccgagcagtacatgctaagacttcaccagtcaaagcgaactactatactcaattgatccaataacttgaccaacggaacaagttaccctagggataacagcgcaatcctattctagagtccatatcaacaatagggtttacgacctcgatgttggatcaggacatcccgatggtgcagccgctattaaaggttcgtttgttcaacgattaaagtcctacgtgatctgagttcagaccggagtaatccaggtcggtttctatctacnttcaaattcctccctgtacgaaaggacaagagaaataaggcctacttcacaaagcgccttcccccgtaaatgatatcatctcaacttagtattatacccacacccacccaagaacagggtttgttaagatggcagagcccggtaatcgcataaaacttaaaactttacagtcagaggttcaattcctcttcttaacaacatacccatggccaacctcctactcctcattgtacccattctaatcgcaatggcattcctaatgcttaccgaacgaaaaattctaggctatatacaactacgcaaaggccccaacgttgtaggcccctacgggctactacaacccttcgctgacgccataaaactcttcaccaaagagcccctaaaacccgccacatctaccatcaccctctacatcaccgccccgaccttagctctcaccatcgctcttctactatgaacccccctccccatacccaaccccctggtcaacctcaacctaggcctcctatttattctagccacctctagcctagccgtttactcaatcctctgatcagggtgagcatcaaactcaaactacgccctgatcggcgcactgcgagcagtagcccaaacaatctcatatgaagtcaccctagccatcattctactatcaacattactaataagtggctcctttaacctctccacccttatcacaacacaagaacacctctgattactcctgccatcatgacccttggccataatatgatttatctccacactagcagagaccaaccgaacccccttcgaccttgccgaaggggagtccgaactagtctcaggcttcaacatcgaatacgccgcaggccccttcgccctattcttcatagccgaatacacaaacattattataataaacaccctcaccactacaatcttcctaggaacaacatatgacgcactctcccctgaactctacacaacatattttgtcaccaagaccctacttctaacctccctgttcttatgaattcgaacagcatacccccgattccgctacgaccaactcatacacctcctatgaaaaaacttcctaccactcaccctagcattacttatatgatatgtctccatacccattacaatctccagcattccccctcaaacctaagaaatatgtctgataaaagagttactttgatagagtaaataataggagcttaaacccccttatttctaggactatgagaatcgaacccatccctgagaatccaaaattctccgtgccacctatcacaccccatcctaaagtaaggtcagctaaataagctatcgggcccataccccgaaaatgttggttatacccttcccgtactaattaatcccctggcccaacccgtcatctactctaccatctttgcaggcacactcatcacagcgctaagctcgcactgattttttacctgagtaggcctagaaataaacatgctagcttttattccagttctaaccaaaaaaataaaccctcgttccacagaagctgccatcaagtatttcctcacgcaagcaaccgcatccataatccttctaatagctatcctcttcaacaatatactctccggacaatgaaccataaccaatactaccaatcaatactcatcattaataatcataatggctatagcaataaaactaggaatagccccctttcacttctgagtcccagaggttacccaaggcacccctctgacatccggcctgcttcttctcacatgacaaaaactagcccccatctcaatcatataccaaatctctccctcactaaacgtaagccttctcctcactctctcaatcttatccatcatagcaggcagttgaggtggattaaaccaaacccagctacgcaaaatcttagcatactcctcaattacccacataggatgaataatagcagttctaccgtacaaccctaacataaccattcttaatttaactatttatattatcctaactactaccgcattcctactactcaacttaaactccagcaccacgaccctactactatctcgcacctgaaacaagctaacatgactaacacccttaattccatccaccctcctctccctaggaggcctgcccccgctaaccggctttttgcccaaatgggccattatcgaagaattcacaaaaaacaatagcctcatcatccccaccatcatagccaccatcaccctccttaacctctacttctacctacgcctaatctactccacctcaatcacactactccccatatctaacaacgtaaaaataaaatgacagtttgaacatacaaaacccaccccattcctccccacactcatcgcccttaccacgctactcctacctatctccccttttatactaataatcttatagaaatttaggttaaatacagaccaagagccttcaaagccctcagtaagttgcaatacttaatttctgtaacagctaaggactgcaaaaccccactctgcatcaactgaacgcaaatcagccactttaattaagctaagcccttactagaccaatgggacttaaacccacaaacacttagttaacagctaagcaccctaatcaactggcttcaatctacttctcccgccgccgggaaaaaaggcgggagaagccccggcaggtttgaagctgcttcttcgaatttgcaattcaatatgaaaatcacctcggagctggtaaaaagaggcctaacccctgtctttagatttacagtccaatgcttcactcagccattttacctcacccccactgatgttcgccgaccgttgactattctctacaaaccacaaagacattggaacactatacctattattcggcgcatgagctggagtcctaggcacagctctaagcctccttattcgagccgagctgggccagccaggcaaccttctaggtaacgaccacatctacaacgttatcgtcacagcccatgcatttgtaataatcttcttcatagtaatacccatcataatcggaggctttggcaactgactagttcccctaataatcggtgcccccgatatggcgtttccccgcataaacaacataagcttctgactcttacctccctctctcctactcctgctcgcatctgctatagtggaggccggagcaggaacaggttgaacagtctaccctcccttagcagggaactactcccaccctggagcctccgtagacctaaccatcttctccttacacctagcaggtgtctcctctatcttaggggccatcaatttcatcacaacaattatcaatataaaaccccctgccataacccaataccaaacgcccctcttcgtctgatccgtcctaatcacagcagtcctacttctcctatctctcccagtcctagctgctggcatcactatactactaacagaccgcaacctcaacaccaccttcttcgaccccgccggaggaggagaccccattctataccaacacctattctgatttttcggtcaccctgaagtttatattcttatcctaccaggcttcggaataatctcccatattgtaacttactactccggaaaaaaagaaccatttggatacataggtatggtctgagctatgatatcaattggcttcctagggtttatcgtgtgagcacaccacatatttacagtaggaatagacgtagacacacgagcatatttcacctccgctaccataatcatcgctatccccaccggcgtcaaagtatttagctgactcgccacactccacggaagcaatatgaaatgatctgctgcagtgctctgagccctaggattcatctttcttttcaccgtaggtggcctgactggcattgtattagcaaactcatcactagacatcgtactacacgacacgtactacgttgtagcccacttccactatgtcctatcaataggagctgtatttgccatcataggaggcttcattcactgatttcccctattctcaggctacaccctagaccaaacctacgccaaaatccatttcactatcatattcatcggcgtaaatctaactttcttcccacaacactttctcggcctatccggaatgccccgacgttactcggactaccccgatgcatacaccacatgaaacatcctatcatctgtaggctcattcatttctctaacagcagtaatattaataattttcatgatttgagaagccttcgcttcgaagcgaaaagtcctaatagtagaagaaccctccataaacctggagtgactatatggatgccccccaccctaccacacattcgaagaacccgtatacataaaatctagacaaaaaaggaaggaatcgaaccccccaaagctggtttcaagccaaccccatggcctccatgactttttcaaaaaggtattagaaaaaccatttcataactttgtcaaagttaaattataggctaaatcctatatatcttaatggcacatgcagcgcaagtaggtctacaagacgctacttcccctatcatagaagagcttatcacctttcatgatcacgccctcataatcattttccttatctgcttcctagtcctgtatgcccttttcctaacactcacaacaaaactaactaatactaacatctcagacgctcaggaaatagaaaccgtctgaactatcctgcccgccatcatcctagtcctcatcgccctcccatccctacgcatcctttacataacagacgaggtcaacgatccctcccttaccatcaaatcaattggccaccaatggtactgaacctacgagtacaccgactacggcggactaatcttcaactcctacatacttcccccattattcctagaaccaggcgacctgcgactccttgacgttgacaatcgagtagtactcccgattgaagcccccattcgtataataattacatcacaagacgtcttgcactcatgagctgtccccacattaggcttaaaaacagatgcaattcccggacgtctaaaccaaaccactttcaccgctacacgaccgggggtatactacggtcaatgctctgaaatctgtggagcaaaccacagtttcatgcccatcgtcctagaattaattcccctaaaaatctttgaaatagggcccgtatttaccctatagcaccccctctaccccctctagagcccactgtaaagctaacttagcattaaccttttaagttaaagattaagagaaccaacacctctttacagtgaaatgccccaactaaatactaccgtatggcccaccataattacccccatactccttacactattcctcatcacccaactaaaaatattaaacacaaactaccacctacctccctcaccaaagcccataaaaataaaaaattataacaaaccctgagaaccaaaatgaacgaaaatctgttcgcttcattcattgcccccacaatcctaggcctacccgccgcagtactgatcattctatttccccctctattgatccccacctccaaatatctcatcaacaaccgactaatcaccacccaacaatgactaatcaaactaacctcaaaacaaatgataaccatacacaacactaaaggacgaacctgatctcttatactagtatccttaatcatttttattgccacaactaacctcctcggactcctgcctcactcatttacaccaaccacccaactatctataaacctagccatggccatccccttatgagcgggcgcagtgattataggctttcgctctaagattaaaaatgccctagcccacttcttaccacaaggcacacctacaccccttatccccatactagttattatcgaaaccatcagcctactcattcaaccaatagccctggccgtacgcctaaccgctaacattactgcaggccacctactcatgcacctaattggaaacgccaccctagcaatatcaaccattaaccttccctctacacttatcatcttcacaattctaattctactgactatcctagaaatcgctgtcgccttaatccaagcctacgttttcacacttctagtaagcctctacctgcacgacaacacataatgacccaccaatcacatgcctatcatatagtaaaacccagcccatgacccctaacaggggccctctcagccctcctaatgacctccggcctagccatgtgatttcacttccactccataacgctcctcatactaggcctactaaccaacacactaaccatataccaatgatggcgcgatgtaacacgagaaagcacataccaaggccaccacacaccacctgtccaaaaaggccttcgatacgggataatcctatttattacctcagaagtttttttcttcgcaggatttttctgagccttttaccactccagcctagcccctaccccccaattaggagggcactggcccccaacaggcatcaccccgctaaatcccctagaagtcccactcctaaacacatccgtattactcgcatcaggagtatcaatcacctgagctcaccatagtctaatagaaaacaaccgaaaccaaataattcaagcactgcttattacaattttactgggtctctattttaccctcctacaagcctcagagtacttcgagtctcccttcaccatttccgacggcatctacggctcaacattttttgtagccacaggcttccacggacttcacgtcattattggctcaactttcctcactatctgcttcatccgccaactaatatttcactttacatccaaacatcactttggcttcgaagccgccgcctgatactggcattttgtagatgtggtttgactatttctgtatgtctccatctattgatgagggtcttactcttttagtataaatagtaccgttaacttccaattaactagttttgacaacattcaaaaaagagtaataaacttcgccttaattttaataatcaacaccctcctagccttactactaataattattacattttgactaccacaactcaacggctacatagaaaaatccaccccttacgagtgcggcttcgaccctatatcccccgcccgcgtccctttctccataaaattcttcttagtagctattaccttcttattatttgatctagaaattgccctccttttacccctaccatgagccctacaaacaactaacctgccactaatagttatgtcatccctcttattaatcatcatcctagccctaagtctggcctatgagtgactacaaaaaggattagactgaaccgaattggtacatagtttaaacaaaacgaatgatttcgactcattaaattatgataatcatatttaccaaatgcccctcatttacataaatattatactagcatttaccatctcacttctaggaatactagtatatcgctcacacctcatatcctccctactatgcctagaaggaataatactatcgctgttcattatagctactctcataaccctcaacacccactccctcttagccaatattgtgcctattgccatactagtctttgccgcctgcgaagcagcggtgggcctagccctactagtctcaatctccaacacatatggcctagactacgtacataacctaaacctactccaatgctaaaactaatcgtcccaacaattatattactaccactgacatgactttccaaaaaacacataatttgaatcaacacaaccacccacagcctaattattagcatcatccctctactattttttaaccaaatcaacaacaacctatttagctgttccccaaccttttcctccgaccccctaacaacccccctcctaatactaactacctgactcctacccctcacaatcatggcaagccaacgccacttatccagtgaaccactatcacgaaaaaaactctacctctctatactaatctccctacaaatctccttaattataacattcacagccacagaactaatcatattttatatcttcttcgaaaccacacttatccccaccttggctatcatcacccgatgaggcaaccagccagaacgcctgaacgcaggcacatacttcctattctacaccctagtaggctcccttcccctactcatcgcactaatttacactcacaacaccctaggctcactaaacattctactactcactctcactgcccaagaactatcaaactcctgagccaacaacttaatatgactagcttacacaatagcttttatagtaaagatacctctttacggactccacttatgactccctaaagcccatgtcgaagcccccatcgctgggtcaatagtacttgccgcagtactcttaaaactaggcggctatggtataatacgcctcacactcattctcaaccccctgacaaaacacatagcctaccccttccttgtactatccctatgaggcataattataacaagctccatctgcctacgacaaacagacctaaaatcgctcattgcatactcttcaatcagccacatagccctcgtagtaacagccattctcatccaaaccccctgaagcttcaccggcgcagtcattctcataatcgcccacgggcttacatcctcattactattctgcctagcaaactcaaactacgaacgcactcacagtcgcatcataatcctctctcaaggacttcaaactctactcccactaatagctttttgatgacttctagcaagcctcgctaacctcgccttaccccccactattaacctactgggagaactctctgtgctagtaaccacgttctcctgatcaaatatcactctcctacttacaggactcaacatactagtcacagccctatactccctctacatatttaccacaacacaatggggctcactcacccaccacattaacaacataaaaccctcattcacacgagaaaacaccctcatgttcatacacctatcccccattctcctcctatccctcaaccccgacatcattaccgggttttcctcttgtaaatatagtttaaccaaaacatcagattgtgaatctgacaacagaggcttacgaccccttatttaccgagaaagctcacaagaactgctaactcatgcccccatgtctaacaacatggctttctcaacttttaaaggataacagctatccattggtcttaggccccaaaaattttggtgcaactccaaataaaagtaataaccatgcacactactataaccaccctaaccctgacttccctaattccccccatccttaccaccctcgttaaccctaacaaaaaaaactcatacccccattatgtaaaatccattgtcgcatccacctttattatcagtctcttccccacaacaatattcatgtgcctagaccaagaagttattatctcgaactgacactgagccacaacccaaacaacccagctctccctaagcttcaaactagactacttctccataatattcatccctgtagcattgttcgttacatggtccatcatagaattctcactgtgatatataaactcagacccaaacattaatcagttcttcaaatatctactcatcttcctaattaccatactaatcttagttaccgctaacaacctattccaactgttcatcggctgagagggcgtaggaattatatccttcttgctcatcagttgatgatacgcccgagcagatgccaacacagcagccattcaagcaatcctatacaaccgtatcggcgatatcggtttcatcctcgccttagcatgatttatcctacactccaactcatgagacccacaacaaatagcccttctaaacgctaatccaagcctcaccccactactaggcctcctcctagcagcagcaggcaaatcagcccaattaggtctccacccctgactcccctcagccatagaaggccccaccccagtctcagccctactccactcaagcactatagttgtagcaggaatcttcttactcatccgcttccaccccctagcagaaaatagcccactaatccaaactctaacactatgcttaggcgctatcaccactctgttcgcagcagtctgcgcccttacacaaaatgacatcaaaaaaatcgtagccttctccacttcaagtcaactaggactcataatagttacaatcggcatcaaccaaccacacctagcattcctgcacatctgtacccacgccttcttcaaagccatactatttatgtgctccgggtccatcatccacaaccttaacaatgaacaagatattcgaaaaataggaggactactcaaaaccatacctctcacttcaacctccctcaccattggcagcctagcattagcaggaatacctttcctcacaggtttctactccaaagaccacatcatcgaaaccgcaaacatatcatacacaaacgcctgagccctatctattactctcatcgctacctccctgacaagcgcctatagcactcgaataattcttctcaccctaacaggtcaacctcgcttccccacccttactaacattaacgaaaataaccccaccctactaaaccccattaaacgcctggcagccggaagcctattcgcaggatttctcattactaacaacatttcccccgcatcccccttccaaacaacaatccccctctacctaaaactcacagccctcgctgtcactttcctaggacttctaacagccctagacctcaactacctaaccaacaaacttaaaataaaatccccactatgcacattttatttctccaacatactcggattctaccctagcatcacacaccgcacaatcccctatctaggccttcttacgagccaaaacctgcccctactcctcctagacctaacctgactagaaaagctattacctaaaacaatttcacagcaccaaatctccacctccatcatcacctcaacccaaaaaggcataattaaactttacttcctctctttcttcttcccactcatcctaaccctactcctaatcacataacctattcccccgagcaatctcaattacaatatatacaccaacaaacaatgttcaaccagtaactactactaatcaacgcccataatcatacaaagcccccgcaccaataggatcctcccgaatcaaccctgacccctctccttcataaattattcagcttcctacactattaaagtttaccacaaccaccaccccatcatactctttcacccacagcaccaatcctacctccatcgctaaccccactaaaacactcaccaagacctcaacccctgacccccatgcctcaggatactcctcaatagccatcgctgtagtatatccaaagacaaccatcattccccctaaataaattaaaaaaactattaaacccatataacctcccccaaaattcagaataataacacacccgaccacaccgctaacaatcaatactaaacccccataaataggagaaggcttagaagaaaaccccacaaaccccattactaaacccacactcaacagaaacaaagcatacatcattattctcgcacggactacaaccacgaccaatgatatgaaaaaccatcgttgtatttcaactacaagaacaccaatgaccccaatacgcaaaactaaccccctaataaaattaattaaccactcattcatcgacctccccaccccatccaacatctccgcatgatgaaacttcggctcactccttggcgcctgcctgatcctccaaatcaccacaggactattcctagccatgcactactcaccagacgcctcaaccgccttttcatcaatcgcccacatcactcgagacgtaaattatggctgaatcatccgctaccttcacgccaatggcgcctcaatattctttatctgcctcttcctacacatcgggcgaggcctatattacggatcatttctctactcagaaacctgaaacatcggcattatcctcctgcttgcaactatagcaacagccttcataggctatgtcctcccgtgaggccaaatatcattctgaggggccacagtaattacaaacttactatccgccatcccatacattgggacagacctagttcaatgaatctgaggaggctactcagtagacagtcccaccctcacacgattctttacctttcacttcatcttgcccttcattattgcagccctagcagcactccacctcctattcttgcacgaaacgggatcaaacaaccccctaggaatcacctcccattccgataaaatcaccttccacccttactacacaatcaaagacgccctcggcttacttctcttccttctctccttaatgacattaacactattctcaccagacctcctaggcgacccagacaattataccctagccaaccccttaaacacccctccccacatcaagcccgaatgatatttcctattcgcctacacaattctccgatccgtccctaacaaactaggaggcgtccttgccctattactatccatcctcatcctagcaataatccccatcctccatatatccaaacaacaaagcataatatttcgcccactaagccaatcactttattgactcctagccgcagacctcctcattctaacctgaatcggaggacaaccagtaagctacccttttaccatcattggacaagtagcatccgtactatacttcacaacaatcctaatcctaataccaactatctccctaattgaaaacaaaatactcaaatgggcctgtccttgtagtataaactaatacaccagtcttgtaaaccggagatgaaaacctttttccaaggacaaatcagagaaaaagtctttaactccaccattagcacccaaagctaagattctaatttaaactattctctgttctttcatggggaagcagatttgggtaccacccaagtattgactcacccatcaacaaccgctatgtatttcgtacattactgccagccaccatgaatattgtacggtaccataaatacttgaccacctgtagtacataaaaacccaatccacatcaaaaccccctccccatgcttacaagcaagtacagcaatcaaccctcaactatcacacatcaactgcaactccaaagccacccctcacccactaggataccaacaaacctacccacccttaacagtacatagtacataaagccattcaccgtacatagcacattacagtcaaatcccttctcgtccccatggatgacccccctcagataggggtcccttgaccaccatcctccgtgaaatcaatatcccgcacaagagtgctactctcctcgctccgggcccataacacttgggggtagctaaagtgaactgtatccgacatctggttcctacttcagggccataaagcctaaatagcccacacgttccccttaaataagacatcacgatg

SEQ ID NO: 342 - DNA, 16570 bp, Homo sapiens mitochondrial
  3108: "n" refers to a nucleotide at position 3107 of the Cambridge Reference Sequence (CRS, Anderson et al. 1981 Nature 290:457-465), later determined to be absent from the human mtDNA sequence according to the revised CRS (rCRS, Andrews et al. 1999 Nature Genetics 23:147); "n" therefore represents a single nucleotide deletion at a position corresponding to nucleotide 3107 of SEQ ID NO:1 as provided herein.
gatcacaggtctatcaccctattaaccactcacgggagctctccatgcatttggtattttcgtctggggggtatgcacgcgatagcattgcgagacgctggagccggagcaccctatgtcgcagtatctgtctttgattcctgcctcatcccattatttatcgcacctacgttcaatattacaggcgaacatacttactaaagtgtgttaattaattaatgcttgtaggacataataataacaattgaatgtctgcacagccgctttccacacagacatcataacaaaaaatttccaccaaaccccccctcccccgccttctggccacagcacttaaacacatctctgccaaaccccaaaaacaaagaaccctgacaccagcctaaccagatttcaaattttatcttttggcggtatgcacttttaacagtcaccccccaactaacacattattttcccctcccactcccatactactaatctcatcaatacaacccccgcccatcctacccagcacacacacaccgctgctaaccccataccccgaaccaaccaaaccccaaagacaccccccacagtttatgtagcttacctcctcaaagcaatacactgaaaatgtttagacgggctcacatcaccccataaacaaataggtttggtcctagcctttctattagctcttagtaagattacacatgcaagcatccccgttccagtgagttcaccctctaaatcaccacgatcaaaagggacaagcatcaagcacgcagcaatgcagctcaaaacgcttagcctagccacacccccacgggaaacagcagtgattaacctttagcaataaacgaaagtttaactaagctatactaaccccagggttggtcaatttcgtgccagccaccgcggtcacacgattaacccaagtcaatagaagccggcgtaaagagtgttttagatcaccccctccccaataaagctaaaactcacctgagttgtaaaaaactccagttgacacaaaatagactacgaaagtggctttaacatatctgaacacacaatagctaagacccaaactgggattagataccccactatgcttagccctaaacctcaacagttaaatcaacaaaactgctcgccagaacactacgagccacagcttaaaactcaaaggacctggcggtgcttcatatccctctagaggagcctgttctgtaatcgataaaccccgatcaacctcaccacctcttgctcagcctatataccgccatcttcagcaaaccctgatgaaggctacaaagtaagcgcaagtacccacgtaaagacgttaggtcaaggtgtagcccatgaggtggcaagaaatgggctacattttctaccccagaaaactacgatagcccttatgaaacttaagggtcgaaggtggatttagcagtaaactgagagtagagtgcttagttgaacagggccctgaagcgcgtacacaccgcccgtcaccctcctcaagtatacttcaaaggacatttaactaaaacccctacgcatttatatagaggagacaagtcgtaacatggtaagtgtactggaaagtgcacttggacgaaccagagtgtagcttaacacaaagcacccaacttacacttaggagatttcaacttaacttgaccgctctgagctaaacctagccccaaacccactccaccttactaccagacaaccttagccaaaccatttacccaaataaagtataggcgatagaaattgaaacctggcgcaatagatatagtaccgcaagggaaagatgaaaaattataaccaagcataatatagcaaggactaacccctataccttctgcataatgaattaactagaaataactttgcaaggagagccaaagctaagacccccgaaaccagacgagctacctaagaacagctaaaagagcacacccgtctatgtagcaaaatagtgggaagatttataggtagaggcgacaaacctaccgagcctggtgatagctggttgtccaagatagaatcttagttcaactttaaatttgcccacagaaccctctaaatccccttgtaaatttaactgttagtccaaagaggaacagctctttggacactaggaaaaaaccttgtagagagagtaaaaaatttaacacccatagtaggcctaaaagcagccaccaattaagaaagcgttcaagctcaacacccactacctaaaaaatcccaaacatataactgaactcctcacacccaattggaccaatctatcaccctatagaagaactaatgttagtataagtaacatgaaaacattctcctccgcataagcctgcgtcagattaaaacactgaactgacaattaacagcccaatatctacaatcaaccaacaagtcattattaccctcactgtcaacccaacacaggcatgctcataaggaaaggttaaaaaaagtaaaaggaactcggcaaatcttaccccgcctgtttaccaaaaacatcacctctagcatcaccagtattagaggcaccgcctgcccagtgacacatgtttaacggccgcggtaccctaaccgtgcaaaggtagcataatcacttgttccttaaatagggacctgtatgaatggctccacgagggttcagctgtctcttacttttaaccagtgaaattgacctgcccgtgaagaggcgggcataacacagcaagacgagaagaccctatggagctttaatttattaatgcaaacagtacctaacaaacccacaggtcctaaactaccaaacctgcattaaaaatttcggttggggcgacctcggagcagaacccaacctccgagcagtacatgctaagacttcaccagtcaaagcgaactactatactcaattgatccaataacttgaccaacggaacaagttaccctagggataacagcgcaatcctattctagagtccatatcaacaatagggtttacgacctcgatgttggatcaggacatcccaatggtgcagccgctattaaaggttcgtttgttcaacgattaaagtcctacgtgatctgagttcagaccggagtaatccaggtcggtttctatctacnttcaaattcctccctgtacgaaaggacaagagaaataaggcctacttcacaaagcgccttcccccgtaaatgatatcatctcaacttagtattatacccacacccacccaagaacagggtttgttaagatggcagagcccggtaatcgcataaaacttaaaactttacagtcagaggttcaattcctcttcttaacaacatacccatggccaacctcctactcctcattgtacccattctaatcgcaatggcattcctaatgcttaccgaacgaaaaattctaggctatatacaactacgcaaaggccccaacgttgtaggcccctacgggctactacaacccttcgctgacgccataaaactcttcaccaaagagcccctaaaacccgccacatctaccatcaccctctacatcaccgccccgaccttagctctcaccatcgctcttctactatgaacccccctccccatacccaaccccctggtcaacctcaacctaggcctcctatttattctagccacctctagcctagccgtttactcaatcctctgatcagggtgagcatcaaactcaaactacgccctgatcggcgcactgcgagcagtagcccaaacaatctcatatgaagtcaccctagccatcattctactatcaacattactaataagtggctcctttaacctctccacccttatcacaacacaagaacacctctgattactcctgccatcatgacccttggccataatatgatttatctccacactagcagagaccaaccgaacccccttcgaccttgccgaaggggagtccgaactagtctcaggcttcaacatcgaatacgccgcaggccccttcgccctattcttcatagccgaatacacaaacattattataataaacaccctcaccactacaatcttcctaggaacaacatatgacgcactctcccctgaactctacacaacatattttgtcaccaagaccctacttctaacctccctgttcttatgaattcgaacagcatacccccgattccgctacgaccaactcatacacctcctatgaaaaaacttcctaccactcaccctagcattacttatatgatatgtctccatacccattacaatctccagcattccccctcaaacctaagaaatatgtctgataaaagagttactttgatagagtaaataataggagcttaaacccccttatttctaggactatgagaatcgaacccatccctgagaatccaaaattctccgtgccacctatcacaccccatcctaaagtaaggtcagctaaataagctatcgggcccataccccgaaaatgttggttatacccttcccgtactaattaatcccctggcccaacccgtcatctactctaccatctttgcaggcacactcatcacagcgctaagctcgcactgattttttacctgagtaggcctagaaataaacatgctagcttttattccagttctaaccaaaaaaataaaccctcgttccacagaagctgccatcaagtatttcctcacgcaagcaaccgcatccataatccttctaatagctatcctcttcaacaatatactctccggacaatgaaccataaccaatactaccaatcaatactcatcattaataatcataatggctatagcaataaaactaggaatagccccctttcacttctgagtcccagaggttacccaaggcacccctctgacatccggcctgcttcttctcacatgacaaaaactagcccccatctcaatcatataccaaatctctccctcactaaacgtaagccttctcctcactctctcaatcttatccatcatagcaggcagttgaggtggattaaaccaaacccagctacgcaaaatcttagcatactcctcaattacccacataggatgaataatagcagttctaccgtacaaccctaacataaccattcttaatttaactatttatattatcctaactactaccgcattcctactactcaacttaaactccagcaccacgaccctactactatctcgcacctgaaacaagctaacatgactaacacccttaattccatccaccctcctctccctaggaggcctgcccccgctaaccggctttttgcccaaatgggccattatcgaagaattcacaaaaaacaatagcctcatcatccccaccatcatagccaccatcaccctccttaacctctacttctacctacgcctaatctactccacctcaatcacactactccccatatctaacaacgtaaaaataaaatgacagtttgaacatacaaaacccaccccattcctccccacactcatcgcccttaccacgctactcctacctatctccccttttatactaataatcttatagaaatttaggttaaatacagaccaagagccttcaaagccctcagtaagttgcaatacttaatttctgtaacagctaaggactgcaaaaccccactctgcatcaactgaacgcaaatcagccactttaattaagctaagcccttactagaccaatgggacttaaacccacaaacacttagttaacagctaagcaccctaatcaactggcttcaatctacttctcccgccgccgggaaaaaaggcgggagaagccccggcaggtttgaagctgcttcttcgaatttgcaattcaatatgaaaatcacctcggagctggtaaaaagaggcctaacccctgtctttagatttacagtccaatgcttcactcagccattttacctcacccccactgatgttcgccgaccgttgactattctctacaaaccacaaagacattggaacactatacctattattcggcgcatgagctggagtcctaggcacagctctaagcctccttattcgagccgagctgggccagccaggcaaccttctaggtaacgaccacatctacaacgttatcgtcacagcccatgcatttgtaataatcttcttcatagtaatacccatcataatcggaggctttggcaactgactagttcccctaataatcggtgcccccgatatggcgtttccccgcataaacaacataagcttctgactcttacctccctctctcctactcctgctcgcatctgctatagtggaggccggagcaggaacaggttgaacagtctaccctcccttagcagggaactactcccaccctggagcctccgtagacctaaccatcttctccttacacctagcaggtgtctcctctatcttaggggccatcaatttcatcacaacaattatcaatataaaaccccctgccataacccaataccaaacgcccctcttcgtctgatccgtcctaatcacagcagtcctacttctcctatctctcccagtcctagctgctggcatcactatactactaacagaccgcaacctcaacaccaccttcttcgaccccgccggaggaggagaccccattctataccaacacctattctgatttttcggtcaccctgaagtttatattcttatcctaccaggcttcggaataatctcccatattgtaacttactactccggaaaaaaagaaccatttggatacataggtatggtctgagctatgatatcaattggcttcctagggtttatcgtgtgagcacaccatatatttacagtaggaatagacgtagacacacgagcatatttcacctccgctaccataatcatcgctatccccaccggcgtcaaagtatttagctgactcgccacactccacggaagcaatatgaaatgatctgctgcagtgctctgagccctaggattcatctttcttttcaccgtaggtggcctgactggcattgtattagcaaactcatcactagacatcgtactacacgacacgtactacgttgtagcccacttccactatgtcctatcaataggagctgtatttgccatcataggaggcttcattcactgatttcccctattctcaggctacaccctagaccaaacctacgccaaaatccatttcactatcatattcatcggcgtaaatctaactttcttcccacaacactttctcggcctatccggaatgccccgacgttactcggactaccccgatgcatacaccacatgaaacatcctatcatctgtaggctcattcatttctctaacagcagtaatattaataattttcatgatttgagaagccttcgcttcgaagcgaaaagtcctaatagtagaagaaccctccataaacctggagtgactatatggatgccccccaccctaccacacattcgaagaacccgtatacataaaatctagacaaaaaaggaaggaatcgaaccccccaaagctggtttcaagccaaccccatggcctccatgactttttcaaaaaggtattagaaaaaccatttcataactttgtcaaagttaaattataggctaaatcctatatatcttaatggcacatgcagcgcaagtaggtctacaagacgctacttcccctatcatagaagagcttatcacctttcatgatcacgccctcataatcattttccttatctgcttcctagtcctgtatgcccttttcctaacactcacaacaaaactaactaatactaacatctcagacgctcaggaaatagaaaccgtctgaactatcctgcccgccatcatcctagtcctcatcgccctcccatccctacgcatcctttacataacagacgaggtcaacgatccctcccttaccatcaaatcaattggccaccaatggtactgaacctacgagtacaccgactacggcggactaatcttcaactcctacatacttcccccattattcctagaaccaggcgacctgcgactccttgacgttgacaatcgagtagtactcccgattgaagcccccattcgtataataattacatcacaagacgtcttgcactcatgagctgtccccacattaggcttaaaaacagatgcaattcccggacgtctaaaccaaaccactttcaccgctacacgaccgggggtatactacggtcaatgctctgaaatctgtggagcaaaccacagtttcatgcccatcgtcctagaattaattcccctaaaaatctttgaaatagggcccgtatttaccctatagcaccccctctaccccctctagagcccactgtaaagctaacttagcattaaccttttaagttaaagattaagagaaccaacacctctttacagtgaaatgccccaactaaatactaccgtatggcccaccataattacccccatactccttacactattcctcatcacccaactaaaaatattaaacacaaactaccacctacctccctcaccaaagcccataaaaataaaaaattataacaaaccctgagaaccaaaatgaacgaaaatctgttcgcttcattcattgcccccacaatcctaggcctacccgccgcagtactgatcattctatttccccctctattgatccccacctccaaatatctcatcaacaaccgactaatcaccacccaacaatgactaatcaaactaacctcaaaacaaatgataaccatacacaacactaaaggacgaacctgatctcttatactagtatccttaatcatttttattgccacaactaacctcctcggactcctgcctcactcatttacaccaaccacccaactatctataaacctagccatggccatccccttatgagcgggcgcagtgattataggctttcgctctaagattaaaaatgccctagcccacttcttaccacaaggcacacctacaccccttatccccatactagttattatcgaaaccatcagcctactcattcaaccaatagccctggccgtacgcctaaccgctaacattactgcaggccacctactcatgcacctaattggaagcgccaccctagcaatatcaaccattaaccttccctctacacttatcatcttcacaattctaattctactgactatcctagaaatcgctgtcgccttaatccaagcctacgttttcacacttctagtaagcctctacctgcacgacaacacataatgacccaccaatcacatgcctatcatatagtaaaacccagcccatgacccctaacaggggccctctcagccctcctaatgacctccggcctagccatgtgatttcacttccactccataacgctcctcatactaggcctactaaccaacacactaaccatataccaatgatggcgcgatgtaacacgagaaagcacataccaaggccaccacacaccacctgtccaaaaaggccttcgatacgggataatcctatttattacctcagaagtttttttcttcgcaggatttttctgagccttttaccactccagcctagcccctaccccccaattaggagggcactggcccccaacaggcatcaccccgctaaatcccctagaagtcccactcctaaacacatccgtattactcgcatcaggagtatcaatcacctgagctcaccatagtctaatagaaaacaaccgaaaccaaataattcaagcactgcttattacaattttactgggtctctattttaccctcctacaagcctcagagtacttcgagtctcccttcaccatttccgacggcatctacggctcaacattttttgtagccacaggcttccacggacttcacgtcattattggctcaactttcctcactatctgcttcatccgccaactaatatttcactttacatccaaacatcactttggcttcgaagccgccgcctgatactggcattttgtagatgtggtttgactatttctgtatgtctccatctattgatgagggtcttactcttttagtataaatagtaccgttaacttccaattaactagttttgacaacattcaaaaaagagtaataaacttcgccttaattttaataatcaacaccctcctagccttactactaataattattacattttgactaccacaactcaacggctacatagaaaaatccaccccttacgagtgcggcttcgaccctatatcccccgcccgcgtccctttctccataaaattcttcttagtagctattaccttcttattatttgatctagaaattgccctccttttacccctaccatgagccctacaaacaactaacctgccactaatagttatatcatccctcttattaatcatcatcctagccctaagtctggcctatgagtgactacaaaaaggattagactgaaccgaattggtatatagtttaaacaaaacgaatgatttcgactcattaaattatgataatcatatttaccaaatgcccctcatttacataaatattatactagcatttaccatctcacttctaggaatactagtatatcgctcacacctcatatcctccctactatgcctagaaggaataatactatcgctgttcattatagctactctcataaccctcaacacccactccctcttagccaatattgtgcctattgccatactagtctttgccgcctgcgaagcagcggtgggcctagccctactagtctcaatctccaacacatatggcctagactacgtacataacctaaacctactccaatgctaaaactaatcgtcccaacaattatattactaccactgacatgactttccaaaaaacacataatttgaatcaacacaaccacccacagcctaattattagcatcatccctctactattttttaaccaaatcaacaacaacctatttagctgttccccaaccttttcctccgaccccctaacaacccccctcctaatactaactacctgactcctacccctcacaatcatggcaagccaacgccacttatccagtgaaccactatcacgaaaaaaactctacctctctatactaatctccctacaaatctccttaattataacattcacagccacagaactaatcatattttatatcttcttcgaaaccacacttatccccaccttggctatcatcacccgatgaggcaaccagccagaacgcctgaacgcaggcacatacttcctattctacaccctagtaggctcccttcccctactcatcgcactaatttacactcacaacaccctaggctcactaaacattctactactcactctcactgcccaagaactatcaaactcctgagccaacaacttaatatgactagcttacacaatagcttttatagtaaagatacctctttacggactccacttatgactccctaaagcccatgtcgaagcccccatcgctgggtcaatagtacttgccgcagtactcttaaaactaggcggctatggtataatacgcctcacactcattctcaaccccctgacaaaacacatagcctaccccttccttgtactatccctatgaggcataattataacaagctccatctgcctacgacaaacagacctaaaatcgctcattgcatactcttcaatcagccacatagccctcgtagtaacagccattctcatccaaaccccctgaagcttcaccggcgcagtcattctcataatcgcccacgggcttacatcctcattactattctgcctagcaaactcaaactacgaacgcactcacagtcgcatcataatcctctctcaaggacttcaaactctactcccactaatagctttttgatgacttctagcaagcctcgctaacctcgccttaccccccactattaacctactgggagaactctctgtgctagtaaccacgttctcctgatcaaatatcactctcctacttacaggactcaacatactagtcacagccctatactccctctacatatttaccacaacacaatggggctcactcacccaccacattaacaacataaaaccctcattcacacgagaaaacaccctcatgttcatacacctatcccccattctcctcctatccctcaaccccgacatcattaccgggttttcctcttgtaaatatagtttaaccaaaacatcagattgtgaatctgacaacagaggcttacgaccccttatttaccgagaaagctcacaagaactgctaactcatgcccccatgtctaacaacatggctttctcaacttttaaaggataacagctatccattggtcttaggccccaaaaattttggtgcaactccaaataaaagtaataaccatgcacactactataaccaccctaaccctgacttccctaattccccccatccttaccaccctcgttaaccctaacaaaaaaaactcatacccccattatgtaaaatccattgtcgcatccacctttattatcagtctcttccccacaacaatattcatgtgcctagaccaagaagttattatctcgaactgacactgagccacaacccaaacaacccagctctccctaagcttcaaactagactacttctccataatattcatccctgtagcattgttcgttacatggtccatcatagaattctcactgtgatatataaactcagacccaaacattaatcagttcttcaaatatctactcatcttcctaattaccatactaatcttagttaccgctaacaacctattccaactgttcatcggctgagagggcgtaggaattatatccttcttgctcatcagttgatgatacgcccgagcagatgccaacacagcagccattcaagcaatcctatacaaccgtatcggcgatatcggtctcatcctcgccttagcatgatttatcctacactccaactcatgagacccacaacaaatagcccttctaaacgctaatccaagcctcaccccactactaggcctcctcctagcagcagcaggcaaatcagcccaattaggtctccacccctgactcccctcagccatagaaggccccaccccagtctcagccctactccactcaagcactatagttgtagcaggaatcttcttactcatccgcttccaccccctagcagaaaatagcccactaatccaaactctaacactatgcttaggcgctatcaccactctgttcgcagcagtctgcgcccttacacaaaatgacatcaaaaaaatcgtagccttctccacttcaagtcaactaggactcataatagttacaatcggcatcaaccaaccacacctagcattcctgcacatctgtacccacgccttcttcaaagccatactatttatgtgctccgggtccatcatccacaaccttaacaatgaacaagatattcgaaaaataggaggactactcaaaaccatacctctcacttcaacctccctcaccattggcagcctagcattagcaggaatacctttcctcacaggtttctactccaaagaccacatcatcgaaaccgcaaacatatcatacacaaacgcctgagccctatctattactctcatcgctacctccctgacaagcgcctatagcactcgaataattcttctcaccctaacaggtcaacctcgcttccccacccttactaacattaacgaaaataaccccaccctactaaaccccattaaacgcctggcagccggaagcctattcgcaggatttctcattactaacaacatttcccccgcatcccccttccaaacaacaatccccctctacctaaaactcacagccctcgctgtcactttcctaggacttctaacagccctagacctcaactacctaaccaacaaacttaaaataaaatccccactatgcacattttatttctccaacatactcggattctaccctagcatcacacaccgcacaatcccctatctaggccttcttacgagccaaaacctgcccctactcctcctagacctaacctgactagaaaagctattacctaaaacaatttcacagcaccaaatctccacctccatcatcacctcaacccaaaaaggcataattaaactttacttcctctctttcttcttcccactcatcctaaccctactcctaatcacataacctattcccccgagcaatctcaattacaatatatacaccaacaaacaatgttcaaccagtaactactactaatcaacgcccataatcatacaaagcccccgcaccaataggatcctcccgaatcaaccctgacccctctccttcataaattattcagcttcctacactattaaagtttaccacaaccaccaccccatcatactctttcacccacagcaccaatcctacctccatcgctaaccccactaaaacactcaccaagacctcaacccctgacccccatgcctcaggatactcctcaatagccatcgctgtagtatatccaaagacaaccatcattccccctaaataaattaaaaaaactattaaacccatataacctcccccaaaattcagaataataacacacccgaccacaccgctaacaatcaatactaaacccccataaataggagaaggcttagaagaaaaccccacaaaccccattactaaacccacactcaacagaaacaaagcatacatcattattctcgcacggactacaaccacgaccaatgatatgaaaaaccatcgttgtatttcaactacaagaacaccaatgaccccaatacgcaaaactaaccccctaataaaattaattaaccactcattcatcgacctccccaccccatccaacatctccgcatgatgaaacttcggctcactccttggcgcctgcctgatcctccaaatcaccacaggactattcctagccatgcactactcaccagacgcctcaaccgccttttcatcaatcgcccacatcactcgagacgtaaattatggctgaatcatccgctaccttcacgccaatggcgcctcaatattctttatctgcctcttcctacacatcgggcgaggcctatattacggatcatttctctactcagaaacctgaaacatcggcattatcctcctgcttgcaactatagcaacagccttcataggctatgtcctcccgtgaggccaaatatcattctgaggggccacagtaattacaaacttactatccgccatcccatacattgggacagacctagttcaatgaatctgaggaggctactcagtagacagtcccaccctcacacgattctttacctttcacttcatcttgcccttcattattgcagccctagcaacactccacctcctattcttgcacgaaacgggatcaaacaaccccctaggaatcacctcccattccgataaaatcaccttccacccttactacacaatcaaagacgccctcggcttacttctcttccttctctccttaatgacattaacactattctcaccagacctcctaggcgacccagacaattataccctagccaaccccttaaacacccctccccacatcaagcccgaatgatatttcctattcgcctacacaattctccgatccgtccctaacaaactaggaggcgtccttgccctattactatccatcctcatcctagcaataatccccatcctccatatatccaaacaacaaagcataatatttcgcccactaagccaatcactttattgactcctagccgcagacctcctcattctaacctgaatcggaggacaaccagtaagctacccttttaccatcattggacaagtagcatccgtactatacttcacaacaatcctaatcctaataccaactatctccctaattgaaaacaaaatactcaaatgggcctgtccttgtagtataaactaatacaccagtcttgtaaaccggagatgaaaacctttttccaaggacaaatcagagaaaaagtctttaactccaccattagcacccaaagctaagattctaatttaaactattctctgttctttcatggggaagcagatttgggtaccacccaagtattgactcacccatcaacaaccgctatgtatttcgtacattactgccagccaccatgaatattgtacggtaccataaatacttgaccacctgtagtacataaaaacccaatccacatcaaaaccccctccccatgcttacaagcaagtacagcaatcaaccctcaactatcacacatcaactgcaactccaaagccacccctcacccactaggataccaacaaacctacccacccttaacagtacatagcacataaagccatttaccgtacatagcacattacagtcaaatcccttctcgtccccatggatgacccccctcagataggggtcccttgaccaccatcctccgtgaaatcaatatcccgcacaagagtgctactctcctcgctccgggcccataacacttgggggtagctaaagtgaactgtatccgacatctggttcctacttcagggccataaagcctaaatagcccacacgttccccttaaataagacatcacgatg

SEQ ID NO: 343 - DNA, 16572 bp, Homo sapiens mitochondrial
  3110: "n" refers to a nucleotide at position 3107 of the Cambridge Reference Sequence (CRS, Anderson et al. 1981 Nature 290:457-465), later determined to be absent from the human mtDNA sequence according to the revised CRS (rCRS, Andrews et al. 1999 Nature Genetics 23:147); "n" therefore represents a single nucleotide deletion at a position corresponding to nucleotide 3107 of SEQ ID NO:1 as provided herein.
gatcacaggtctatcaccctattaaccactcacgggagctctccatgcatttggtattttcgtctggggggtatgcacgcgatagcattgcgagacgctggagccggagcaccctatgtcgcagtatctgtctttgattcctgcctcatcccattatttatcgcacctacgttcaatattacaggcgaacatacttactaaagtgtgttaattaattaatgcttgtaggacataataataacaattgaatgtctgcacagccgctttccacacagacatcataacaaaaaatttccaccaaaccccccctcccccgccttctggccacagcacttaaacacatctctgccaaaccccaaaaacaaagaaccctaacaccagcctaaccagatttcaaattttatcttttggcggtatgcacttttaacagtcaccccccaactaacacattattttcccctcccactcccatactactaatctcatcaatacaacccccgcccatcctacccagcacacacacaccacgctgctaaccccataccccgaaccaaccaaaccccaaagacaccccccacagtttatgtagcttacctcctcaaagcaatacactgaaaatgtttagacgggctcacatcaccccataaacaaataggtttggtcctagcctttctattagctcttagtaagattacacatgcaagcatccccgttccagtgagttcaccctctaaatcaccacgatcaaaagggacaagcatcaagcacgcagcaatgcagctcaaaacgcttagcctagccacacccccacgggaaacagcagtgattaacctttagcaataaacgaaagtttaactaagctatactaaccccagggttggtcaatttcgtgccagccaccgcggtcacacgattaacccaagtcaatagaagccggcgtaaagagtgttttagatcaccccctccccaataaagctaaaactcacctgagttgtaaaaaactccagttgacacaaaatagactacgaaagtggctttaacatatctgaacacacaatagctaagacccaaactgggattagataccccactatgcttagccctaaacctcaacagttaaatcaacaaaactgctcgccagaacactacgagccacagcttaaaactcaaaggacctggcggtgcttcatatccctctagaggagcctgttctgtaatcgataaaccccgatcaacctcaccacctcttgctcagcctatataccgccatcttcagcaaaccctgatgaaggctacaaagtaagcgcaagtacccacgtaaagacgttaggtcaaggtgtagcccatgaggtggcaagaaatgggctacattttctaccccagaaaactacgatagcccttatgaaacttaagggtcgaaggtggatttagcagtaaactgagagtagagtgcttagttgaacagggccctgaagcgcgtacacaccgcccgtcaccctcctcaagtatacttcaaaggacatttaactaaaacccctacgcatttatatagaggagacaagtcgtaacatggtaagtgtactggaaagtgcacttggacgaaccagagtgtagcttaacacaaagcacccaacttacacttaggagatttcaacttaacttgaccgctctgagctaaacctagccccaaacccactccaccttactaccagacaaccttagccaaaccatttacccaaataaagtataggcgatagaaattgaaacctggcgcaatagatatagtaccgcaagggaaagatgaaaaattataaccaagcataatatagcaaggactaacccctataccttctgcataatgaattaactagaaataactttgcaaggagagccaaagctaagacccccgaaaccagacgagctacctaagaacagctaaaagagcacacccgtctatgtagcaaaatagtgggaagatttataggtagaggcgacaaacctaccgagcctggtgatagctggttgtccaagatagaatcttagttcaactttaaatttgcccacagaaccctctaaatccccttgtaaatttaactgttagtccaaagaggaacagctctttggacactaggaaaaaaccttgtagagagagtaaaaaatttaacacccatagtaggcctaaaagcagccaccaattaagaaagcgttcaagctcaacacccactacctaaaaaatcccaaacatataactgaactcctcacacccaattggaccaatctatcaccctatagaagaactaatgttagtataagtaacatgaaaacattctcctccgcataagcctgcgtcagattaaaacactgaactgacaattaacagcccaatatctacaatcaaccaacaagtcattattaccctcactgtcaacccaacacaggcatgctcataaggaaaggttaaaaaaagtaaaaggaactcggcaaatcttaccccgcctgtttaccaaaaacatcacctctagcatcaccagtattagaggcaccgcctgcccagtgacacatgtttaacggccgcggtaccctaaccgtgcaaaggtagcataatcacttgttccttaaatagggacctgtatgaatggctccacgagggttcagctgtctcttacttttaaccagtgaaattgacctgcccgtgaagaggcgggcataacacagcaagacgagaagaccctatggagctttaatttattaatgcaaacagtacctaacaaacccacaggtcctaaactaccaaacctgcattaaaaatttcggttggggcgacctcggagcagaacccaacctccgagcagtacatgctaagacttcaccagtcaaagcgaactactatactcaattgatccaataacttgaccaacggaacaagttaccctagggataacagcgcaatcctattctagagtccatatcaacaatagggtttacgacctcgatgttggatcaggacatcccaatggtgcagccgctattaaaggttcgtttgttcaacgattaaagtcctacgtgatctgagttcagaccggagtaatccaggtcggtttctatctacnttcaaattcctccctgtacgaaaggacaagagaaataaggcctacttcacaaagcgccttcccccgtaaatgatatcatctcaacttagtattatacccacacccacccaagaacagggtttgttaagatggcagagcccggtaatcgcataaaacttaaaactttacagtcagaggttcaattcctcttcttaacaacatacccatggccaacctcctactcctcattgtacccattctaatcgcaatggcattcctaatgcttaccgaacgaaaaattctaggctatatacaactacgcaaaggccccaacgttgtaggcccctacgggctactacaacccttcgctgacgccataaaactcttcaccaaagagcccctaaaacccgccacatctaccatcaccctctacatcaccgccccgaccttagctctcaccatcgctcttctactatgaacccccctccccatacccaaccccctggtcaacctcaacctaggcctcctatttattctagccacctctagcctagccgtttactcaatcctctgatcagggtgagcatcaaactcaaactacgccctgatcggcgcactgcgagcagtagcccaaacaatctcatatgaagtcaccctagccatcattctactatcaacattactaataagtggctcctttaacctctccacccttatcacaacacaagaacacctctgattactcctgccatcatgacccttggccataatatgatttatctccacactagcagagaccaaccgaacccccttcgaccttgccgaaggggagtccgaactagtctcaggcttcaacatcgaatacgccgcaggccccttcgccctattcttcatagccgaatacacaaacattattataataaacaccctcaccactacaatcttcctaggaacaacatatgacgcactctcccctgaactctacacaacatattttgtcaccaagaccctacttctaacctccctgttcttatgaattcgaacagcatacccccgattccgctacgaccaactcatacacctcctatgaaaaaacttcctaccactcaccctagcattacttatatgatatgtctccatacccattacaatctccagcattccccctcaaacctaagaaatatgtctgataaaagagttactttgatagagtaaataataggagcttaaacccccttatttctaggactatgagaatcgaacccatccctgagaatccaaaattctccgtgccacctatcacaccccatcctaaagtaaggtcagctaaataagctatcgggcccataccccgaaaatgttggttatacccttcccgtactaattaatcccctggcccaacccgtcatctactctaccatctttgcaggcacactcatcacagcgctaagctcgcactgattttttacctgagtaggcctagaaataaacatgctagcttttattccagttctaaccaaaaaaataaaccctcgttccacagaagctgccatcaagtatttcctcacgcaagcaaccgcatccataatccttctaatagctatcctcttcaacaatatactctccggacaatgaaccataaccaatactaccaatcaatactcatcattaataatcataatggctatagcaataaaactaggaatagccccctttcacttctgagtcccagaggttacccaaggcacccctctgacatccggcctgcttcttctcacatgacaaaaactagcccccatctcaatcatataccaaatctctccctcactaaacgtaagccttctcctcactctctcaatcttatccatcatagcaggcagttgaggtggattaaaccaaacccagctacgcaaaatcttagcatactcctcaattacccacataggatgaataatagcagttctaccgtacaaccctaacataaccattcttaatttaactatttatattatcctaactactaccgcattcctactactcaacttaaactccagcaccacgaccctactactatctcgcacctgaaacaagctaacatgactaacacccttaattccatccaccctcctctccctaggaggcctgcccccgctaaccggctttttgcccaaatgggccattatcgaagaattcacaaaaaacaatagcctcatcatccccaccatcatagccaccatcaccctccttaacctctacttctacctacgcctaatctactccacctcaatcacactactccccatatctaacaacgtaaaaataaaatgacagtttgaacatacaaaacccaccccattcctccccacactcatcgcccttaccacgctactcctacctatctccccttttatactaataatcttatagaaatttaggttaaatacagaccaagagccttcaaagccctcagtaagttgcaatacttaatttctgtaacagctaaggactgcaaaaccccactctgcatcaactgaacgcaaatcagccactttaattaagctaagcccttactagaccaatgggacttaaacccacaaacacttagttaacagctaagcaccctaatcaactggcttcaatctacttctcccgccgccgggaaaaaaggcgggagaagccccggcaggtttgaagctgcttcttcgaatttgcaattcaatatgaaaatcacctcggagctggtaaaaagaggcctaacccctgtctttagatttacagtccaatgcttcactcagccattttacctcacccccactgatgttcgccgaccgttgactattctctacaaaccacaaagacattggaacactatacctattattcggcgcatgagctggagtcctaggcacagctctaagcctccttattcgagccgagctgggccagccaggcaaccttctaggtaacgaccacatctacaacgttatcgtcacagcccatgcatttgtaataatcttcttcatagtaatacccatcataatcggaggctttggcaactgactagttcccctaataatcggtgcccccgatatggcgtttccccgcataaacaacataagcttctgactcttacctccctctctcctactcctgctcgcatctgctatagtggaggccggagcaggaacaggttgaacagtctaccctcccttagcagggaactactcccaccctggagcctccgtagacctaaccatcttctccttacacctagcaggtgtctcctctatcttaggggccatcaatttcatcacaacaattatcaatataaaaccccctgccataacccaataccaaacgcccctcttcgtctgatccgtcctaatcacagcagtcctacttctcctatctctcccagtcctagctgctggcatcactatactactaacagaccgcaacctcaacaccaccttcttcgaccccgccggaggaggagaccccattctataccaacacctattctgatttttcggtcaccctgaagtttatattcttatcctaccaggcttcggaataatctcccatattgtaacttactactccggaaaaaaagaaccatttggatacataggtatggtctgagctatgatatcaattggcttcctagggtttatcgtgtgagcacaccatatatttacagtaggaatagacgtagacacacgagcatatttcacctccgctaccataatcatcgctatccccaccggcgtcaaagtatttagctgactcgccacactccacggaagcaatatgaaatgatctgctgcagtgctctgagccctaggattcatctttcttttcaccgtaggtggcctgactggcattgtattagcaaactcatcactagacatcgtactacacgacacgtactacgttgtagcccacttccactatgtcctatcaataggagctgtatttgccatcataggaggcttcattcactgatttcccctattctcaggctacaccctagaccaaacctacgccaaaatccatttcactatcatattcatcggcgtaaatctaactttcttcccacaacactttctcggcctatccggaatgccccgacgttactcggactaccccgatgcatacaccacatgaaacatcctatcatctgtaggctcattcatttctctaacagcagtaatattaataattttcatgatttgagaagccttcgcttcgaagcgaaaagtcctaatagtagaagaaccctccataaacctggagtgactatatggatgccccccaccctaccacacattcgaagaacccgtatacataaaatctagacaaaaaaggaaggaatcgaaccccccaaagctggtttcaagccaaccccatggcctccatgactttttcaaaaaggtattagaaaaaccatttcataactttgtcaaagttaaattataggctaaatcctatatatcttaatggcacatgcagcgcaagtaggtctacaagacgctacttcccctatcatagaagagcttatcacctttcatgatcacgccctcataatcattttccttatctgcttcctagtcctgtatgcccttttcctaacactcacaacaaaactaactaatactaacatctcagacgctcaggaaatagaaaccgtctgaactatcctgcccgccatcatcctagtcctcatcgccctcccatccctacgcatcctttacataacagacgaggtcaacgatccctcccttaccatcaaatcaattggccaccaatggtactgaacctacgagtacaccgactacggcggactaatcttcaactcctacatacttcccccattattcctagaaccaggcgacctgcgactccttgacgttgacaatcgagtagtactcccgattgaagcccccattcgtataataattacatcacaagacgtcttgcactcatgagctgtccccacattaggcttaaaaacagatgcaattcccggacgtctaaaccaaaccactttcaccgctacacgaccgggggtatactacggtcaatgctctgaaatctgtggagcaaaccacagtttcatgcccatcgtcctagaattaattcccctaaaaatctttgaaatagggcccgtatttaccctatagcaccccctctaccccctctagagcccactgtaaagctaacttagcattaaccttttaagttaaagattaagagaaccaacacctctttacagtgaaatgccccaactaaatactaccgtatggcccaccataattacccccatactccttacactattcctcatcacccaactaaaaatattaaacacaaactaccacctacctccctcaccaaagcccataaaaataaaaaattataacaaaccctgagaaccaaaatgaacgaaaatctgttcgcttcattcattgcccccacaatcctaggcctacccgccgcagtactgatcattctatttccccctctattgatccccacctccaaatatctcatcaacaaccgactaatcaccacccaacaatgactaatcaaactaacctcaaaacaaatgataaccatacacaacactaaaggacgaacctgatctcttatactagtatccttaatcatttttattgccacaactaacctcctcggactcctgcctcactcatttacaccaaccacccaactatctataaacctagccatggccatccccttatgagcgggcgcagtgattataggctttcgctctaagattaaaaatgccctagcccacttcttaccacaaggcacacctacaccccttatccccatactagttattatcgaaaccatcagcctactcattcaaccaatagccctggccgtacgcctaaccgctaacattactgcaggccacctactcatgcacctaattggaagcgccaccctagcaatatcaaccattaaccttccctctacacttatcatcttcacaattctaattctactgactatcctagaaatcgctgtcgccttaatccaagcctacgttttcacacttctagtaagcctctacctgcacgacaacacataatgacccaccaatcacatgcctatcatatagtaaaacccagcccatgacccctaacaggggccctctcagccctcctaatgacctccggcctagccatgtgatttcacttccactccataacgctcctcatactaggcctactaaccaacacactaaccatataccaatgatggcgcgatgtaacacgagaaagcacataccaaggccaccacacaccacctgtccaaaaaggccttcgatacgggataatcctatttattacctcagaagtttttttcttcgcaggatttttctgagccttttaccactccagcctagcccctaccccccaattaggagggcactggcccccaacaggcatcaccccgctaaatcccctagaagtcccactcctaaacacatccgtattactcgcatcaggagtatcaatcacctgagctcaccatagtctaatagaaaacaaccgaaaccaaataattcaagcactgcttattacaattttactgggtctctattttaccctcctacaagcctcagagtacttcgagtctcccttcaccatttccgacggcatctacggctcaacattttttgtagccacaggcttccacggacttcacgtcattattggctcaactttcctcactatctgcttcatccgccaactaatatttcactttacatccaaacatcactttggcttcgaagccgccgcctgatactggcattttgtagatgtggtttgactatttctgtatgtctccatctattgatgagggtcttactcttttagtataaatagtaccgttaacttccaattaactagttttgacaacattcaaaaaagagtaataaacttcgccttaattttaataatcaacaccctcctagccttactactaataattattacattttgactaccacaactcaacggctacatagaaaaatccaccccttacgagtgcggcttcgaccctatatcccccgcccgcgtccctttctccataaaattcttcttagtagctattaccttcttattatttgatctagaaattgccctccttttacccctaccatgagccctacaaacaactaacctgccactaatagttatgtcatccctcttattaatcatcatcctagccctaagtctggcctatgagtgactacaaaaaggattagactgaaccgaattggtatatagtttaaacaaaacgaatgatttcgactcattaaattatgataatcatatttaccaaatgcccctcatttacataaatattatactagcatttaccatctcacttctaggaatactagtatatcgctcacacctcatatcctccctactatgcctagaaggaataatactatcgctgttcattatagctactctcataaccctcaacacccactccctcttagccaatattgtgcctattgccatactagtctttgccgcctgcgaagcagcggtgggcctagccctactagtctcaatctccaacacatatggcctagactacgtacataacctaaacctactccaatgctaaaactaatcgtcccaacaattatattactaccactgacatgactttccaaaaaacacataatttgaatcaacacaaccacccacagcctaattattagcatcatccctctactattttttaaccaaatcaacaacaacctatttagctgttccccaaccttttcctccgaccccctaacaacccccctcctaatactaactacctgactcctacccctcacaatcatggcaagccaacgccacttatccagtgaaccactatcacgaaaaaaactctacctctctatactaatctccctacaaatctccttaattataacattcacagccacagaactaatcatattttatatcttcttcgaaaccacacttatccccaccttggctatcatcacccgatgaggcaaccagccagaacgcctgaacgcaggcacatacttcctattctacaccctagtaggctcccttcccctactcatcgcactaatttacactcacaacaccctaggctcactaaacattctactactcactctcactgcccaagaactatcaaactcctgagccaacaacttaatatgactagcttacacaatagcttttatagtaaagatacctctttacggactccacttatgactccctaaagcccatgtcgaagcccccatcgctgggtcaatagtacttgccgcagtactcttaaaactaggcggctatggtataatacgcctcacactcattctcaaccccctgacaaaacacatagcctaccccttccttgtactatccctatgaggcataattataacaagctccatctgcctacgacaaacagacctaaaatcgctcattgcatactcttcaatcagccacatagccctcgtagtaacagccattctcatccaaaccccctgaagcttcaccggcgcagtcattctcataatcgcccacgggcttacatcctcattactattctgcctagcaaactcaaactacgaacgcactcacagtcgcatcataatcctctctcaaggacttcaaactctactcccactaatagctttttgatgacttctagcaagcctcgctaacctcgccctaccccccactattaacctactgggagaactctctgtgctagtaaccacgttctcctgatcaaatatcactctcctacttacaggactcaacatactagtcacagccctatactccctctacatatttaccacaacacaatggggctcactcacccaccacattaacaacataaaaccctcattcacacgagaaaacaccctcatgttcatacacctatcccccattctcctcctatccctcaaccccgacatcattaccgggttttcctcttgtaaatatagtttaaccaaaacatcagattgtgaatctgacaacagaggcttacgaccccttatttaccgagaaagctcacaagaactgctaactcatgcccccatgtctaacaacatggctttctcaacttttaaaggataacagctatccattggtcttaggccccaaaaattttggtgcaactccaaataaaagtaataaccatgcacactactataaccaccctaaccctgacttccctaattccccccatccttaccaccctcgttaaccctaacaaaaaaaactcatacccccattatgtaaaatccattgtcgcatccacctttattatcagtctcttccccacaacaatattcatgtgcctagaccaagaagttattatctcgaactgacactgagccacaacccaaacaacccagctctccctaagcttcaaactagactacttctccataatattcatccctgtagcattgttcgttacatggtccatcatagaattctcactgtgatatataaactcagacccaaacattaatcagttcttcaaatatctactcatcttcctaattaccatactaatcttagttaccgctaacaacctattccaactgttcatcggctgagagggcgtaggaattatatccttcttgctcatcagttgatgatacgcccgagcagatgccaacacagcagccattcaagcaatcctatacaaccgtatcggcgatatcggtttcatcctcgccttagcatgatttatcctacactccaactcatgagacccacaacaaatagcccttctaaacgctaatccaagcctcaccccactactaggcctcctcctagcagcagcaggcaaatcagcccaattaggtctccacccctgactcccctcagccatagaaggccccaccccagtctcagccctactccactcaagcactatagttgtagcaggaatcttcttactcatccgcttccaccccctagcagaaaatagcccactaatccaaactctaacactatgcttaggcgctatcaccactctgttcgcagcagtctgcgcccttacacaaaatgacatcaaaaaaatcgtagccttctccacttcaagtcaactaggactcataatagttacaatcggcatcaaccaaccacacctagcattcctgcacatctgtacccacgccttcttcaaagccatactatttatgtgctccgggtccatcatccacaaccttaacaatgaacaagatattcgaaaaataggaggactactcaaaaccatacctctcacttcaacctccctcaccattggcagcctagcattagcaggaatacctttcctcacaggtttctactccaaagaccacatcatcgaaaccgcaaacatatcatacacaaacgcctgagccctatctattactctcatcgctacctccctgacaagcgcctatagcactcgaataattcttctcaccctaacaggtcaacctcgcttccccacccttactaacattaacgaaaataaccccaccctactaaaccccattaaacgcctggcagccggaagcctattcgcaggatttctcattactaacaacatttcccccgcatcccccttccaaacaacaatccccctctacctaaaactcacagccctcgctgtcactttcctaggacttctaacagccctagacctcaactacctaaccaacaaacttaaaataaaatccccactatgcacattttatttctccaacatactcggattctaccctagcatcacacaccgcacaatcccctatctaggccttcttacgagccaaaacctgcccctactcctcctagacctaacctgactagaaaagctattacctaaaacaatttcacagcaccaaatctccacctccatcatcacctcaacccaaaaaggcataattaaactttacttcctctctttcttcttcccactcatcctaaccctactcctaatcacataacctattcccccgagcaatctcaattacaatatatacaccaacaaacaatgttcaaccagtaactactactaatcaacgcccataatcatacaaagcccccgcaccaataggatcctcccgaatcaaccctgacccctctccttcataaattattcagcttcctacactattaaagtttaccacaaccaccaccccatcatactctttcacccacagcaccaatcctacctccatcgctaaccccactaaaacactcaccaagacctcaacccctgacccccatgcctcaggatactcctcaatagccatcgctgtagtatatccaaagacaaccatcattccccctaaataaattaaaaaaactattaaacccatataacctcccccaaaattcagaataataacacacccgaccacaccgctaacaatcaatactaaacccccataaataggagaaggcttagaagaaaaccccacaaaccccattactaaacccacactcaacagaaacaaagcatacatcattattctcgcacggactacaaccacgaccaatgatatgaaaaaccatcgttgtatttcaactacaagaacaccaatgaccccaatacgcaaaactaaccccctaataaaattaattaaccactcattcatcgacctccccaccccatccaacatctccgcatgatgaaacttcggctcactccttggcgcctgcctgatcctccaaatcaccacaggactattcctagccatgcactactcaccagacgcctcaaccgccttttcatcaatcgcccacatcactcgagacgtaaattatggctgaatcatccgctaccttcacgccaatggcgcctcaatattctttatctgcctcttcctacacatcgggcgaggcctatattacggatcatttctctactcagaaacctgaaacatcggcattatcctcctgcttgcaactatagcaacagccttcataggctatgtcctcccgtgaggccaaatatcattctgaggggccacagtaattacaaacttactatccgccatcccatacattgggacagacctagttcaatgaatctgaggaggctactcagtagacagtcccaccctcacacgattctttacctttcacttcatcttgcccttcattattgcagccctagcagcactccacctcctattcttgcacgaaacgggatcaaacaaccccctaggaatcacctcccattccgataaaatcaccttccacccttactacacaatcaaagacgccctcggcttacttctcttccttctctccttaatgacattaacactattctcaccagacctcctaggcgacccagacaattataccctagccaaccccttaaacacccctccccacatcaagcccgaatgatatttcctattcgcctacacaattctccgatccgtccctaacaaactaggaggcgtccttgccctattactatccatcctcatcctagcaataatccccatcctccatatatccaaacaacaaagcataatatttcgcccactaagccaatcactttattgactcctagccgcagacctcctcattctaacctgaatcggaggacaaccagtaagctacccttttaccatcattggacaagtagcatccgtactatacttcacaacaatcctaatcctaataccaactatctccctaattgaaaacaaaatactcaaatgggcctgtccttgtagtataaactaatacaccagtcttgtaaaccggagatgaaaacctttttccaaggacaaatcagagaaaaagtctttaactccaccattagcacccaaagctaagattctaatttaaactattctctgttctttcatggggaagcagatttgggtaccacccaagtattgactcacccatcaacaaccgctatgtatttcgtacattactgccagccaccatgaatattgtacggtaccataaatacttgaccacctgtagtacataaaaacccaatccacatcaaaaccccctccccatgcttacaagcaagtacagcaatcaaccctcaactatcacacatcaactgcaactccaaagccacccctcacccactaggataccaacaaacctacccacccttaacagtacatagtacataaagccatttaccgtacatagcacattacagtcaaatcccttctcgtccccatggatgacccccctcagataggggtcccttgaccaccatcctccgtgaaatcaatatcccgcacaagagtgctactctcctcgctccgggcccataacacttgggggtagctaaagtgaactgtatccgacatctggttcctacttcagggccataaagcctaaatagcccacacgttccccttaaataagacatcacgatg

SEQ ID NO: 344 - DNA, 16571 bp, Homo sapiens mitochondrial
  3109: "n" refers to a nucleotide at position 3107 of the Cambridge Reference Sequence (CRS, Anderson et al. 1981 Nature 290:457-465), later determined to be absent from the human mtDNA sequence according to the revised CRS (rCRS, Andrews et al. 1999 Nature Genetics 23:147); "n" therefore represents a single nucleotide deletion at a position corresponding to nucleotide 3107 of SEQ ID NO:1 as provided herein.
gatcacaggtctatcaccctattaaccactcacgggagctctccatgcatttggtattttcgtctggggggtatgcacgcgatagcattgcgagacgctggagccggagcaccctatgtcgcagtatctgtctttgattcctgcctcatcctattatttatcgcacctacgttcaatattacaggcgaacatacctactaaagtgtgttaattaattaatgcttgtaggacataataataacaattgaatgtctgcacagccgctttccacacagacatcataacaaaaaatttccaccaaaccccccctcccccccgcttctggccacagcacttaaacacatctctgccaaaccccaaaaacaaagaaccctaacaccagcctaaccagatttcaaattttatcttttggcggtatgcacttttaacagtcaccccccaactaacacattattttcccctcccactcccatactactaatctcatcaatacaacccccgcccatcctacccagcacacacacaccgctgctaaccccataccccgaaccaaccaaaccccaaagacaccccccacagtttatgtagcttacctcctcaaagcaatacactgaaaatgtttagacgggctcacatcaccccataaacaaataggtttggtcctagcctttctattagctcttagtaagattacacatgcaagcatccccgttccagtgagttcaccctctaaatcaccacgatcaaaagggacaagcatcaagcacgcagcaatgcagctcaaaacgcttagcctagccacacccccacgggaaacagcagtgattaacctttagcaataaacgaaagtttaactaagctatactaaccccagggttggtcaatttcgtgccagccaccgcggtcacacgattaacccaagtcaatagaagccggcgtaaagagtgttttagatcacccccgccccaataaagctaaaactcacctgagttgtaaaaaactccagttgacacaaaatagactacgaaagtggctttaacatatctgaacacacaatagctaagacccaaactgggattagataccccactatgcttagccctaaacctcaacagttaaatcaacaaaactgctcgccagaacactacgagccacagcttaaaactcaaaggacctggcggtgcttcatatccctctagaggagcctgttctgtaatcgataaaccccgatcaacctcaccacctcttgctcagcctatataccgccatcttcagcaaaccctgatgaaggctacaaagtaagcgcaagtacccacgtaaagacgttaggtcaaggtgtagcccatgaggtggcaagaaatgggctacattttctaccccagaaaactacgatagcccttatgaaacttaagggtcgaaggtggatttagcagtaaactgagagtagagtgcttagttgaacagggccctgaagcgcgtacacaccgcccgtcaccctcctcaagtatacttcaaaggacatttaactaaaacccctacgcatttatatagaggagacaagtcgtaacatggtaagtgtactggaaagtgcacttggacgaaccagagtgtagcttaacacaaagcacccaacttacacttaggagatttcaacttaacttgaccgctctgagctaaacctagccccaaacccactccaccttactaccagacaaccttagccaaaccatttacccaaataaagtataggcgatagaaattgaaacctggcgcaatagatatagtaccgcaagggaaagatgaaaaattataaccaagcataatatagcaaggactaacccctataccttctgcataatgaattaactagaaataactttgcaaggagagccaaagctaagacccccgaaaccagacgagctacctaagaacagctaaaagagcacacccgtctatgtagcaaaatagtgggaagatttataggtagaggcgacaaacctaccgagcctggtgatagctggttgtccaagatagaatcttagttcaactttaaatttgcccacagaaccctctaaatccccttgtaaatttaactgttagtccaaagaggaacagctctttggacactaggaaaaaaccttgtagagagagtaaaaaatttaacacccatagtaggcctaaaagcagccaccaattaagaaagcgttcaagctcaacacccactacctaaaaaatcccaaacatataactgaactcctcacacccaattggaccaatctatcaccctatagaagaactaatgttagtataagtaacatgaaaacattctcctccgcataagcctgcgtcagattaaaacactgaactgacaattaacagcccaatatctacaatcaaccaacaagtcattattaccctcactgtcaacccaacacaggcatgctcataaggaaaggttaaaaaaagtaaaaggaactcggcaaatcttaccccgcctgtttaccaaaaacatcacctctagcatcaccagtattagaggcaccgcctgcccagtgacacatgtttaacggccgcggtaccctaaccgtgcaaaggtagcataatcacttgttccttaaatagggacctgtatgaatggctccacgagggttcagctgtctcttacttttaaccagtgaaattgacctgcccgtgaagaggcgggcataacacagcaagacgagaagaccctatggagctttaatttattaatgcaaacagtacctaacaaacccacaggtcctaaactaccaaacctgcattaaaaatttcggttggggcgacctcggagcagaacccaacctccgagcagtacatgctaagacttcaccagtcaaagcgaactactatactcaattgatccaataacttgaccaacggaacaagttaccctagggataacagcgcaatcctattctagagtccatatcaacaatagggtttacgacctcgatgttggatcaggacatcccgatggtgcagccgctattaaaggttcgtttgttcaacgattaaagtcctacgtgatctgagttcagaccggagtaatccaggtcggtttctatctacnttcaaattcctccctgtacgaaaggacaagagaaataaggcctacttcacaaagcgccttcccccgtaaatgatatcatctcaacttagtattatacccacacccacccaagaacagggtttgttaagatggcagagcccggtaatcgcataaaacttaaaactttacagtcagaggttcaattcctcttcttaacaacatacccatggccaacctcctactcctcattgtacccattctaatcgcaatggcattcctaatgcttaccgaacgaaaaattctaggctatatacaactacgcaaaggccccaacgttgtaggcccctacgggctactacaacccttcgctgacgccataaaactcttcaccaaagagcccctaaaacccgccacatctaccatcaccctctacatcaccgccccgaccttagctctcaccatcgctcttctactatgaacccccctccccatacccaaccccctggtcaacctcaacctaggcctcctatttattctagccacctctagcctagccgtttactcaatcctctgatcagggtgagcatcaaactcaaactacgccctgatcggcgcactgcgagcagtagcccaaacaatctcatatgaagtcaccctagccatcattctactatcaacattactaataagtggctcctttaacctctccacccttatcacaacacaagaacacctctgattactcctgccatcatgacccttggccataatatgatttatctccacactagcagagaccaaccgaacccccttcgaccttgccgaaggggagtccgaactagtctcaggcttcaacatcgaatacgccgcaggccccttcgccctattcttcatagccgaatacacaaacattattataataaacaccctcaccactacaatcttcctaggaacaacatatgacgcactctcccctgaactctacacaacatattttgtcaccaagaccctacttctaacctccctgttcttatgaattcgaacagcatacccccgattccgctacgaccaactcatacacctcctatgaaaaaacttcctaccactcaccctagcattacttatatgatatgtctccatacccattacaatctccagcattccccctcaaacctaagaaatatgtctgataaaagagttactttgatagagtaaataataggagcttaaacccccttatttctaggactatgagaatcgaacccatccctgagaatccaaaattctccgtgccacctatcacaccccatcctaaagtaaggtcagctaaataagctatcgggcccataccccgaaaatgttggttatacccttcccgtactaattaatcccctggcccaacccgtcatctactctaccatctttgcaggcacactcatcacagcgctaagctcgcactgattttttacctgagtaggcctagaaataaacatgctagcttttattccagttctaaccaaaaaaataaaccctcgttccacagaagctgccatcaagtatttcctcacgcaagcaaccgcatccataatccttctaatagctatcctcttcaacaatatactctccggacaatgaaccataaccaatactaccaatcaatactcatcattaataatcataatggctatagcaataaaactaggaatagccccctttcacttctgagtcccagaggttacccaaggcacccctctgacatccggcctgcttcttctcacatgacaaaaactagcccccatctcaatcatataccaaatctctccctcactaaacgtaagccttctcctcactctctcaatcttatccatcatagcaggcagttgaggtggattaaaccaaacccagctacgcaaaatcttagcatactcctcaattacccacataggatgaataatagcagttctaccgtacaaccctaacataaccattcttaatttaactatttatattatcctaactactaccgcattcctactactcaacttaaactccagcaccacgaccctactactatctcgcacctgaaacaagctaacatgactaacacccttaattccatccaccctcctctccctaggaggcctgcccccgctaaccggctttttgcccaaatgggccattatcgaagaattcacaaaaaacaatagcctcatcatccccaccatcatagccaccatcaccctccttaacctctacttctacctacgcctaatctactccacctcaatcacactactccccatatctaacaacgtaaaaataaaatgacagtttgaacatacaaaacccaccccattcctccccacactcatcgcccttaccacgctactcctacctatctccccttttatactaataatcttatagaaatttaggttaaatacagaccaagagccttcaaagccctcagtaagttgcaatacttaatttctgtaacagctaaggactgcaaaaccccactctgcatcaactgaacgcaaatcagccactttaattaagctaagcccttactagaccaatgggacttaaacccacaaacacttagttaacagctaagcaccctaatcaactggcttcaatctacttctcccgccgccgggaaaaaaggcgggagaagccccggcaggtttgaagctgcttcttcgaatttgcaattcaatatgaaaatcacctcggagctggtaaaaagaggcctaacccctgtctttagatttacagtccaatgcttcactcagccattttacctcacccccactgatgttcgccgaccgttgactattctctacaaaccacaaagacattggaacactatacctattattcggcgcatgagctggagtcctaggcacagctctaagcctccttattcgagccgagctgggccagccaggcaaccttctaggtaacgaccacatctacaacgttatcgtcacagcccatgcatttgtaataatcttcttcatagtaatacccatcataatcggaggctttggcaactgactagttcccctaataatcggtgcccccgatatggcgtttccccgcataaacaacataagcttctgactcttacctccctctctcctactcctgctcgcatctgctatagtggaggccggagcaggaacaggttgaacagtctaccctcccttagcagggaactactcccaccctggagcctccgtagacctaaccatcttctccttacacctagcaggtgtctcctctatcttaggggccatcaatttcatcacaacaattatcaatataaaaccccctgccataacccaataccaaacgcccctcttcgtctgatccgtcctaatcacagcagtcctacttctcctatctctcccagtcctagctgctggcatcactatactactaacagaccgcaacctcaacaccaccttcttcgaccccgccggaggaggagaccccattctataccaacacctattctgatttttcggtcaccctgaagtttatattcttatcctaccaggcttcggaataatctcccatattgtaacttactactccggaaaaaaagaaccatttggatacataggtatggtctgagctatgatatcaattggcttcctagggtttatcgtgtgagcacaccatatatttacagtaggaatagacgtagacacacgagcatatttcacctccgctaccataatcatcgctatccccaccggcgtcaaagtatttagctgactcgccacactccacggaagcaatatgaaatgatctgctgcagtgctctgagccctaggattcatctttcttttcaccgtaggtggcctgactggcattgtattagcaaactcatcactagacatcgtactacacgacacgtactacgttgtagcccacttccactatgtcctatcaataggagctgtatttgccatcataggaggcttcattcactgatttcccctattctcaggctacaccctagaccaaacctacgccaaaatccatttcactatcatattcatcggcgtaaatctaactttcttcccacaacactttctcggcctatccggaatgccccgacgttactcggactaccccgatgcatacaccacatgaaacatcctatcatctgtaggctcattcatttctctaacagcagtaatattaataattttcatgatttgagaagccttcgcttcgaagcgaaaagtcctaatagtagaagaaccctccataaacctggagtgactatatggatgccccccaccctaccacacattcgaagaacccgtatacataaaatctagacaaaaaaggaaggaatcgaaccccccaaagctggtttcaagccaaccccatggcctccatgactttttcaaaaaggtattagaaaaaccatttcataactttgtcaaagttaaattataggctaaatcctatatatcttaatggcacatgcagcgcaagtaggtctacaagacgctacttcccctatcatagaagagcttatcacctttcatgatcacgccctcataatcattttccttatctgcttcctagtcctgtatgcccttttcctaacactcacaacaaaactaactaatactaacatctcagacgctcaggaaatagaaaccgtctgaactatcctgcccgccatcatcctagtcctcatcgccctcccatccctacgcatcctttacataacagacgaggtcaacgatccctcccttaccatcaaatcaattggccaccaatggtactgaacctacgagtacaccgactacggcggactaatcttcaactcctacatacttcccccattattcctagaaccaggcgacctgcgactccttgacgttgacaatcgagtagtactcccgattgaagcccccattcgtataataattacatcacaagacgtcttgcactcatgagctgtccccacattaggcttaaaaacagatgcaattcccggacgtctaaaccaaaccactttcaccgctacacgaccgggggtatactacggtcaatgctctgaaatctgtggagcaaaccacagtttcatgcccatcgtcctagaattaattcccctaaaaatctttgaaatagggcccgtatttaccctatagcaccccctctaccccctctagagcccactgtaaagctaacttagcattaaccttttaagttaaagattaagagaaccaacacctctttacagtgaaatgccccaactaaatactaccgtatggcccaccataattacccccatactccttacactattcctcatcacccaactaaaaacattaaacacaaactaccacctacctccctcaccaaagcccataaaaataaaaaattataacaaaccctgagaaccaaaatgaacgaaaatctgttcgcttcattcattgcccccacaatcctaggcctacccgccgcagtactgatcattctatttccccctctattgatccccacctccaaatatctcatcaacaaccgactaatcaccacccaacaatgactaatcaaactaacctcaaaacaaatgataaccatacacaacactaaaggacgaacctgatctcttatactagtatccttaatcatttttattgccacaactaacctcctcggactcctgcctcactcatttacaccaaccacccaactatctataaacctagccatggccatccccttatgagcgggcgcagtgattataggctttcgctctaagattaaaaatgctctagcccacttcttaccacaaggcacacctacaccccttatccccatactagttattatcgaaaccatcagcctactcattcaaccaatagccctggccgtacgcctaaccgctaacattactgcaggccacctactcatgcacctaattggaagcgccaccctagcaatatcaaccattaaccttccctctacacttatcatcttcacaattctaattctactgactatcctagaaatcgctgtcgccttaatccaagcctacgttttcacacttctagtaagcctctacctgcacgacaacacataatgacccaccaatcacatgcctatcatatagtaaaacccagcccatgacccctaacaggggccctctcagccctcctaatgacctccggcctagccatgtgatttcacttccactccataacgctcctcatactaggcctactaaccaacacactaaccatataccaatgatggcgcgatgtaacacgagaaagcacataccaaggccaccacacaccacctgtccaaaaaggccttcgatacgggataatcctatttattacctcagaagtttttttcttcgcaggatttttctgagccttttaccactccagcctagcccctaccccccaattaggagggcactggcccccaacaggcatcaccccgctaaatcccctagaagtcccactcctaaacacatccgtattactcgcatcaggagtatcaatcacctgagctcaccatagtctaatagaaaacaaccgaaaccaaataattcaagcactgcttattacaattttactgggtctctattttaccctcctacaagcctcagagtacttcgagtctcccttcaccatttccgacggcatctacggctcaacattttttgtagccacaggcttccacggacttcacgtcattattggctcaactttcctcactatctgcttcatccgccaactaatatttcactttacatccaaacatcactttggcttcgaagccgccgcctgatactggcattttgtagatgtggtttgactatttctgtatgtctccatctattgatgagggtcttactcttttagtataaatagtaccgttaacttccaattaactagttttgacaacattcaaaaaagagtaataaacttcgccttaattttaataatcaacaccctcctagccttactactaataattattacattttgactaccacaactcaacggctacatagaaaaatccaccccttacgagtgcggcttcgaccctatatcccccgcccgcgtccctttctccataaaattcttcttagtagctattaccttcttattatttgatctagaaattgccctccttttacccctaccatgagccctacaaacaactaacctgccactaatagttatgtcatccctcttattaatcatcatcctagccctaagtctggcctatgagtgactacaaaaaggattagactgaaccgaattggtatatagtttaaacaaaacgaatgatttcgactcattaaattatgataatcatatttaccaaatgcccctcatttacataaatattatactagcatttaccatctcacttctaggaatactagtatatcgctcacacctcatatcctccctactatgcctagaaggaataatactatcgctgttcattatagctactctcataaccctcaacacccactccctcttagccaatattgtgcctattgccatactagtctttgccgcctgcgaagcagcggtgggcctagccctactagtctcaatctccaacacatatggcctagactacgtacataacctaaacctactccaatgctaaaactaatcgtcccaacaattatattactaccactgacatgactttccaaaaaacacataatttgaatcaacacaaccacccacagcctaattattagcatcatccctctactattttttaaccaaatcaacaacaacctatttagctgttccccaaccttttcctccgaccccctaacaacccccctcctaatactaactacctgactcctacccctcacaatcatggcaagccaacgccacttatccagtgaaccactatcacgaaaaaaactctacctctctatactaatctccctacaaatctccttaattataacattcacagccacagaactaatcatattttatatcttcttcgaaaccacacttatccccaccttggctatcatcacccgatgaggcaaccagccagaacgcctgaacgcaggcacatacttcctattctacaccctagtaggctcccttcccctactcatcgcactaatttacactcacaacaccctaggctcactaaacattctactactcactctcactgcccaagaactatcaaactcctgagccaacaacttaatatgactagcttacacaatagcttttatagtaaagatacctctttacggactccacttatgactccctaaagcccatgtcgaagcccccatcgctgggtcaatagtacttgccgcagtactcttaaaactaggcggctatggtataatacgcctcacactcattctcaaccccctgacaaaacacatagcctaccccttccttgtactatccctatgaggcataattataacaagctccatctgcctacgacaaacagacctaaaatcgctcattgcatactcttcaatcagccacatagccctcgtagtaacagccattctcatccaaaccccctgaagcttcaccggcgcagtcattctcataatcgcccacgggcttacatcctcattactattctgcctagcaaactcaaactacgaacgcactcacagtcgcatcataatcctctctcaaggacttcaaactctactcccactaatagctttttgatgacttctagcaagcctcgctaacctcgccttaccccccactattaacctactgggagaactctctgtgctagtaaccacgttctcctgatcaaatatcactctcctacttacaggactcaacatactagtcacagccctatactccctctacatatttaccacaacacaatggggctcactcacccaccacattaacaacataaaaccctcattcacacgagaaaacaccctcatgttcatacacctatcccccattctcctcctatccctcaaccccgacatcattaccgggttttcctcttgtaaatatagtttaaccaaaacatcagattgtgaatctgacaacagaggcttacgaccccttatttaccgagaaagctcacaagaactgctaactcatgcccccatgtctaacaacatggctttctcaacttttaaaggataacagctatccattggtcttaggccccaaaaattttggtgcaactccaaataaaagtaataaccatgcacactactataaccaccctaaccctgacttccctaattccccccatccttaccaccctcgttaaccctaacaaaaaaaactcatacccccattatgtaaaatccattgtcgcatccacctttattatcagtctcttccccacaacaatattcatgtgcctagaccaagaagttattatctcgaactgacactgagccacaacccaaacaacccagctctccctaagcttcaaactagactacttctccataatattcatccctgtagcattgttcgttacatggtccatcatagaattctcactgtgatatataaactcagacccaaacattaatcagttcttcaaatatctactcatcttcctaattaccatactaatcttagttaccgctaacaacctattccaactgttcatcggctgagagggcgtaggaattatatccttcttgctcatcagttgatgatacgcccgagcagatgccaacacagcagccattcaagcaatcctatacaaccgtatcggcgatatcggtttcatcctcgccttagcatgatttatcctacactccaactcatgagacccacaacaaatagcccttctaaacgctaatccaagcctcaccccactactaggcctcctcctagcagcagcaggcaaatcagcccaattaggtctccacccctgactcccctcagccatagaaggccccaccccagtctcagccctactccactcaagcactatagttgtagcaggaatcttcttactcatccgcttccaccccctagcagaaaatagcccactaatccaaactctaacactatgcttaggcgctatcaccactctgttcgcagcagtctgcgcccttacacaaaatgacatcaaaaaaatcgtagccttctccacttcaagtcaactaggactcataatagttacaatcggcatcaaccaaccacacctagcattcctgcacatctgtacccacgccttcttcaaagccatactatttatgtgctccgggtccatcatccacaaccttaacaatgaacaagatattcgaaaaataggaggactactcaaaaccatacctctcacttcaacctccctcaccattggcagcctagcattagcaggaatacctttcctcacaggtttctactccaaagaccacatcatcgaaaccgcaaacatatcatacacaaacgcctgagccctatctattactctcatcgctacctccctgacaagcgcctatagcactcgaataattcttctcaccctaacaggtcaacctcgcttccccacccttactaacattaacgaaaataaccccaccctactaaaccccattaaacgcctggcagccggaagcctattcgcaggatttctcattactaacaacatttcccccacatcccccttccaaacaacaatccccctctacctaaaactcacagccctcgctgtcactttcctaggacttctaacagccctagacctcaactacctaaccaacaaacttaaaataaaatccccactatgcacattttatttctccaacatactcggattctaccctagcatcacacaccgcacaatcccctatctaggccttcttacgagccaaaacctgcccctactcctcctagacctaacctgactagaaaagctattacctaaaacaatttcacagcaccaaatctccacctccatcatcacctcaacccaaaaaggcataattaaactttacttcctctctttcttcttcccactcatcctaaccctactcctaatcacataacctattcccccgagcaatctcaattacaatatatacaccaacaaacaatgttcaaccagtaactactactaatcaacgcccataatcatacaaagcccccgcaccaataggatcctcccgaatcaaccctgacccctctccttcataaattattcagcttcctacactattaaagtttaccacaaccaccaccccatcatactctttcacccacagcaccaatcctacctccatcgctaaccccactaaaacactcaccaagacctcaacccctgacccccatgcctcaggatactcctcaatagccatcgctgtagtatatccaaagacaaccatcattccccctaaataaattaaaaaaactattaaacccatataacctcccccaaaattcagaataataacacacccgaccacaccgctaacaatcaatactaaacccccataaataggagaaggcttagaagaaaaccccacaaaccccattactaaacccacactcaacagaaacaaagcatacatcattattctcgcacggactacaaccacgaccaatgatatgaaaaaccatcgttgtatttcaactacaagaacaccaatgaccccaatacgcaaaactaaccccctaataaaattaattaaccactcattcatcgacctccccaccccatccaacatctccgcatgatgaaacttcggctcactccttggcgcctgcctgatcctccaaatcaccacaggactattcctagccatgcactactcaccagacgcctcaaccgccttttcatcaatcgcccacatcactcgagacgtaaattatggctgaatcatccgctaccttcacgccaatggcgcctcaatattctttatctgcctcttcctacacatcgggcgaggcctatattacggatcatttctctactcagaaacctgaaacatcggcattatcctcctgcttgcaactatagcaacagccttcataggctatgtcctcccgtgaggccaaatatcattctgaggggccacagtaattacaaacttactatccgccatcccatacattgggacagacctagttcaatgaatctgaggaggctactcagtagacagtcccaccctcacacgattctttacctttcacttcatcttgcccttcattattgcagccctagcagcactccacctcctattcttgcacgaaacgggatcaaacaaccccctaggaatcacctcccattccgataaaatcaccttccacccttactacacaatcaaagacgccctcggcttacttctcttccttctctccttaatgacattaacactattctcaccagacctcctaggcgacccagacaattataccctagccaaccccttaaacacccctccccacatcaagcccgaatgatatttcctattcgcctacacaattctccgatccgtccctaacaaactaggaggcgtccttgccctattactatccatcctcatcctagcaataatccccatcctccatatatccaaacaacaaagcataatatttcgcccactaagccaatcactttattgactcctagccgcagacctcctcattctaacctgaatcggaggacaaccagtaagctacccttttaccatcattggacaagtagcatccgtactatacttcacaacaatcctaatcctaataccaactatctccctaattgaaaacaaaatactcaaatgggcctgtccttgtagtataaactaatacaccagtcttgtaaaccggagatgaaaacctttttccaaggacaaatcagagaaaaagtctttaactccaccattagcacccaaagctaagattctaatttaaactattctctgttctttcatggggaagcagatttgggtaccacccaagtattgactcacccatcaacaaccgctatgtatttcgtacattactgccagccaccatgaatattgtacggtaccataaatacttgaccacctgtagtacataaaaacccaatccacatcaaaaccccctccccatgcttacaagcaagtacagcaatcaaccctcaactatcacacatcaactgcaactccaaagccacccctcacccactaggatatcaacaaacctacccgcccttaacagtacatagcacataaagccatttaccgtacatagcacattacagtcaaatcccttctcgtccccatggatgacccccctcagataggggtcccttgaccaccatcctccgtgaaatcaatatcccgcacaagagtgctactctcctcgctccgggcccataacacttgggggtagctaaagtgaactgtatccgacatctggttcctacttcagggtcataaagcctaaatagcccacacgttccccttaaataagacatcacgatg

SEQ ID NO: 345 - DNA, 16570 bp, Homo sapiens mitochondrial
  3108: "n" refers to a nucleotide at position 3107 of the Cambridge Reference Sequence (CRS, Anderson et al. 1981 Nature 290:457-465), later determined to be absent from the human mtDNA sequence according to the revised CRS (rCRS, Andrews et al. 1999 Nature Genetics 23:147); "n" therefore represents a single nucleotide deletion at a position corresponding to nucleotide 3107 of SEQ ID NO:1 as provided herein.
gatcacaggtctatcaccctattaaccactcacgggagctctccatgcatttggtattttcgtctggggggtatgcacgcgatagcattgcgagacgctggagccggagcaccctatgtcgcagtatctgtctttgattcctgcctcatcctattatttatcgcacctacgttcaatattacaggcgaacatacttactaaagtgtgttaattaattaatgcttgtaggacataataataacaattgaatgtctgcacagccgctttccacacagacatcataacaaaaaatttccaccaaaccccccctcccccgccttctggccacagcacttaaacacatctctgccaaaccccaaaaacaaagaaccctaacaccagcctaaccagatttcaaattttatcttttggcggtatgcacttttaacagtcaccccccaactaacacattattttcccctcccactcccatactactaatctcatcaatacaacccccgcccatcctacccagcacacacacaccgctgctaaccccataccccgaaccaaccaaaccccaaagacaccccccacagtttatgtagcttacctcctcaaagcaatacactgaaaatgtttagacgggctcacatcaccccataaacaaataggtttggtcctagcctttctattagctcttagtaagattacacatgcaagcatccccgttccagtgagttcaccctctaaatcaccacgatcaaaagggacaagcatcaagcacgcagcaatgcagctcaaaacgcttagcctagccacacccccacgggaaacagcagtgattaacctttagcaataaacgaaagtttaactaagctatactaaccccagggttggtcaatttcgtgccagccaccgcggtcacacgattaacccaagtcaatagaagccggcgtaaagagtgttttagatcaccccctccccaataaagctaaaactcacctgagttgtaaaaaactccagttgacacaaaatagactacgaaagtggctttaacatatctgaacacacaatagctaagacccaaactgggattagataccccactatgcttagccctaaacctcaacagttaaatcaacaaaactgctcgccagaacactacgagccacagcttaaaactcaaaggacctggcggtgcttcatatccctctagaggagcctgttctgtaatcgataaaccccgatcaacctcaccacctcttgctcagcctatataccgccatcttcagcaaaccctgatgaaggctacaaagtaagcgcaagtacccacgtaaagacgttaggtcaaggtgtagcccatgaggtggcaagaaatgggctacattttctaccccagaaaactacgatagcccttatgaaacttaagggtcgaaggtggatttagcagtaaactgagagtagagtgcttagttgaacagggccctgaagcgcgtacacaccgcccgtcaccctcctcaagtatacttcaaaggacatttaactaaaacccctacgcatttatatagaggagacaagtcgtaacatggtaagtgtactggaaagtgcacttggacgaaccagagtgtagcttaacacaaagcacccaacttacacttaggagatttcaacttaacttgaccgctctgagctaaacctagccccaaacccactccaccttactaccagacaaccttagccaaaccatttacccaaataaagtataggcgatagaaattgaaacctggcgcaatagatatagtaccgcaagggaaagatgaaaaattataaccaagcataatatagcaaggactaacccctataccttctgcataatgaattaactagaaataactttgcaaggagagccaaagctaagacccccgaaaccagacgagctacctaagaacagctaaaagagcacacccgtctatgtagcaaaatagtgggaagatttataggtagaggcgacaaacctaccgagcctggtgatagctggttgtccaagatagaatcttagttcaactttaaatttgcccacagaaccctctaaatccccttgtaaatttaactgttagtccaaagaggaacagctctttggacactaggaaaaaaccttgtagagagagtaaaaaatttaacacccatagtaggcctaaaagcagccaccaattaagaaagcgttcaagctcaacacccactacctaaaaaatcccaaacatataactgaactcctcacacccaattggaccaatctatcaccctatagaagaactaatgttagtataagtaacatgaaaacattctcctccgcataagcctgcgtcagattaaaacactgaactgacaattaacagcccaatatctacaatcaaccaacaagtcattattaccctcactgtcaacccaacacaggcatgctcataaggaaaggttaaaaaaagtaaaaggaactcggcaaatcttaccccgcctgtttaccaaaaacatcacctctagcatcaccagtattagaggcaccgcctgcccagtgacacatgtttaacggccgcggtaccctaaccgtgcaaaggtagcataatcacttgttccttaaatagggacctgtatgaatggctccacgagggttcagctgtctcttacttttaaccagtgaaattgacctgcccgtgaagaggcgggcatgacacagcaagacgagaagaccctatggagctttaatttattaatgcaaacagtacctaacaaacccacaggtcctaaactaccaaacctgcattaaaaatttcggttggggcgacctcggagcagaacccaacctccgagcagtacatgctaagacttcaccagtcaaagcgaactactatactcaattgatccaataacttgaccaacggaacaagttaccctagggataacagcgcaatcctattctagagtccatatcaacaatagggtttacgacctcgatgttggatcaggacatcccgatggtgcagccgctattaaaggttcgtttgttcaacgattaaagtcctacgtgatctgagttcagaccggagtaatccaggtcggtttctatctacnttcaaattcctccctgtacgaaaggacaagagaaataaggcctacttcacaaagcgccttcccccgtaaatgatatcatctcaacttagtattatacccacacccacccaagaacagggtttgttaagatggcagagcccggtaatcgcataaaacttaaaactttacagtcagaggttcaattcctcttcttaacaacatacccatggccaacctcctactcctcattgtacccattctaatcgcaatggcattcctaatgcttaccgaacgaaaaattctaggctatatacaactacgcaaaggccccaacgttgtaggcccctacgggctactacaacccttcgctgacgccataaaactcttcaccaaagagcccctaaaacccgccacatctaccatcaccctctacatcaccgccccgaccttagctctcaccatcgctcttctactatgaacccccctccccatacccaaccccctggtcaacctcaacctaggcctcctatttattctagccacctctagcctagccgtttactcaatcctctgatcagggtgagcatcaaactcaaactacgccctgatcggcgcactgcgagcagtagcccaaacaatctcatatgaagtcaccctagccatcattctactatcaacattactaataagtggctcctttaacctctccacccttatcacaacacaagaacacctctgattactcctgccatcatgacccttggccataatatgatttatctccacactagcagagaccaaccgaacccccttcgaccttgccgaaggggagtccgaactagtctcaggcttcaacatcgaatacgccgcaggccccttcgccctattcttcatagccgaatacacaaacattattataataaacaccctcaccactacaatcttcctaggaacaacatatgacgcactctcccctgaactctacacaacatattttgtcaccaagaccctacttctaacctccctgttcttatgaattcgaacagcatacccccgattccgctacgaccaactcatacacctcctatgaaaaaacttcctaccactcaccctagcattacttatatgatatgtctccatacccattacaatctccagcattccccctcaaacctaagaaatatgtctgataaaagagttactttgatagagtaaataataggagcttaaacccccttatttctaggactatgagaatcgaacccatccctgagaatccaaaattctccgtgccacctatcacaccccatcctaaagtaaggtcagctaaataagctatcgggcccataccccgaaaatgttggttatacccttcccgtactaattaatcccctggcccaacccgtcatctactctaccatctttgcaggcacactcatcacagcgctaagctcgcactgattttttacctgagtaggcctagaaataaacatgctagcttttattccagttctaaccaaaaaaataaaccctcgttccacagaagctgccatcaagtatttcctcacgcaagcaaccgcatccataatccttctaatagctatcctcttcaacaatatactctccggacaatgaaccataaccaatactaccaatcaatactcatcattaataatcataatggctatagcaataaaactaggaatagccccctttcacttctgagtcccagaggttacccaaggcacccctctgacatccggcctgcttcttctcacatgacaaaaactagcccccatctcaatcatataccaaatctctccctcactaaacgtaagccttctcctcactctctcaatcttatccatcatagcaggcagttgaggtggattaaaccaaacccagctacgcaaaatcttagcatactcctcaattacccacataggatgaataatagcagttctaccgtacaaccctaacataaccattcttaatttaactatttatattatcctaactactaccgcattcctactactcaacttaaactccagcaccacgaccctactactatctcgcacctgaaacaagctaacatgactaacacccttaattccatccaccctcctctccctaggaggcctgcccccgctaaccggctttttgcccaaatgggccattatcgaagaattcacaaaaaacaatagcctcatcatccccaccatcatagccaccatcaccctccttaacctctacttctacctacgcctaatctactccacctcaatcacactactccccatatctaacaacgtaaaaataaaatgacagtttgaacatacaaaacccaccccattcctccccacactcatcgcccttaccacgctactcctacctatctccccttttatactaataatcttatagaaatttaggttaaatacagaccaagagccttcaaagccctcagtaagttgcaatacttaatttctgtaacagctaaggactgcaaaaccccactctgcatcaactgaacgcaaatcagccactttaattaagctaagcccttactagaccaatgggacttaaacccacaaacacttagttaacagctaagcaccctaatcaactggcttcaatctacttctcccgccgccgggaaaaaaggcgggagaagccccggcaggtttgaagctgcttcttcgaatttgcaattcaatatgaaaatcacctcggagctggtaaaaagaggcctaacccctgtctttagatttacagtccaatgcttcactcagccattttacctcacccccactgatgttcgccgaccgttgactattctctacaaaccacaaagacattggaacactatacctattattcggcgcatgagctggagtcctaggcacagctctaagcctccttattcgagccgagctgggccagccaggcaaccttctaggtaacgaccacatctacaacgttatcgtcacagcccatgcatttgtaataatcttcttcatagtaatacccatcataatcggaggctttggcaactgactagttcccctaataatcggtgcccccgatatggcgtttccccgcataaacaacataagcttctgactcttacctccctctctcctactcctgctcgcatctgctatagtggaggccggagcaggaacaggttgaacagtctaccctcccttagcagggaactactcccaccctggagcctccgtagacctaaccatcttctccttacacctagcaggtgtctcctctatcttaggggccatcaatttcatcacaacaattatcaatataaaaccccctgccataacccaataccaaacgcccctcttcgtctgatccgtcctaatcacagcagtcctacttctcctatctctcccagtcctagctgctggcatcactatactactaacagaccgcaacctcaacaccaccttcttcgaccccgccggaggaggagaccccattctataccaacacctattctgatttttcggtcaccctgaagtttatattcttatcctaccaggcttcggaataatctcccatattgtaacttactactccggaaaaaaagaaccatttggatacataggtatggtctgagctatgatatcaattggcttcctagggtttatcgtgtgagcacaccatatatttacagtaggaatagacgtagacacacgagcatatttcacctccgctaccataatcatcgctatccccaccggcgtcaaagtatttagctgactcgccacactccacggaagcaatatgaaatgatctgctgcagtgctctgagccctaggattcatctttcttttcaccgtaggtggcctgactggcattgtattagcaaactcatcactagacatcgtactacacgacacgtactacgttgtagctcacttccactatgtcctatcaataggagctgtatttgccatcataggaggcttcattcactgatttcccctattctcaggctacaccctagaccaaacctacgccaaaatccatttcactatcatattcatcggcgtaaatctaactttcttcccacaacactttctcggcctatccggaatgccccgacgttactcggactaccccgatgcatacaccacatgaaacatcctatcatctgtaggctcattcatttctctaacagcagtaatattaataattttcatgatttgagaagccttcgcttcgaagcgaaaagtcctaatagtagaagaaccctccataaacctggagtgactatatggatgccccccaccctaccacacattcgaagaacccgtatacataaaatctagacaaaaaaggaaggaatcgaaccccccaaagctggtttcaagccaaccccatggcctccatgactttttcaaaaaggtattagaaaaaccatttcataactttgtcaaagttaaattataggctaaatcctatatatcttaatggcacatgcagcgcaagtaggtctacaagacgctacttcccctatcatagaagagcttatcacctttcatgatcacgccctcataatcattttccttatctgcttcctagtcctgtatgcccttttcctaacactcacaacaaaactaactaatactaacatctcagacgctcaggaaatagaaaccgtctgaactatcctgcccgccatcatcctagtcctcatcgccctcccatccctacgcatcctttacataacagacgaggtcaacgatccctcccttaccatcaaatcaattggccaccaatggtactgaacctacgagtacaccgactacggcggactaatcttcaactcctacatacttcccccattattcctagaaccaggcgacctgcgactccttgacgttgacaatcgagtagtactcccgattgaagcccccattcgtataataattacatcacaagacgtcttgcactcatgagctgtccccacattaggcttaaaaacagatgcaattcccggacgtctaaaccaaaccactttcaccgctacacgaccgggggtatactacggtcaatgctctgaaatctgtggagcaaaccacagtttcatgcccatcgtcctagaattaattcccctaaaaatctttgaaatagggcccgtatttaccctatagcaccccctctaccccctctagagcccactgtaaagctaacttagcattaaccttttaagttaaagattaagagaaccaacacctctttacagtgaaatgccccaactaaatactaccgtatggcccaccataattacccccatactccttacactattcctcatcacccaactaaaaatattaaacacaaactaccacctacctccctcaccaaagcccataaaaataaaaaattataacaaaccctgagaaccaaaatgaacgaaaatctgttcgcttcattcattgcccccacaatcctaggcctacccgccgcagtactgatcattctatttccccctctattgatccccacctccaaatatctcatcaacaaccgactaatcaccacccaacaatgactaatcaaactaacctcaaaacaaatgataaccatacacaacactaaaggacgaacctgatctcttatactagtatccttaatcatttttattgccacaactaacctcctcggactcctgcctcactcatttacaccaaccacccaactatctataaacctagccatggccatccccttatgagcgggcgcagtgattataggctttcgctctaagattaaaaatgccctagcccacttcttaccacaaggcacacctacaccccttatccccatactagttattatcgaaaccatcagcctactcattcaaccaatagccctggccgtacgcctaaccgctaacattactgcaggccacctactcatgcacctaattggaagcgccaccctagcaatatcaaccattaaccttccctctacacttatcatcttcacaattctaattctactgactatcctagaaatcgctgtcgccttaatccaagcctacgttttcacacttctagtaagcctctacctgcacgacaacacataatgacccaccaatcacatgcctatcatatagtaaaacccagcccatgacccctaacaggggccctctcagccctcctaatgacctccggcctagccatgtgatttcacttccactccataacgctcctcatactaggcctactaaccaacacactaaccatataccaatgatggcgcgatgtaacacgagaaagcacataccaaggccaccacacaccacctgtccaaaaaggccttcgatacgggataatcctatttattacctcagaagtttttttcttcgcaggatttttctgagccttttaccactccagcctagcccctaccccccaattaggagggcactggcccccaacaggcatcaccccgctaaatcccctagaagtcccactcctaaacacatccgtattactcgcatcaggagtatcaatcacctgagctcaccatagtctaatagaaaacaaccgaaaccaaataattcaagcactgcttattacaattttactgggtctctattttaccctcctacaagcctcagagtacttcgagtctcccttcaccatttccgacggcatctacggctcaacattttttgtagccacaggcttccacggacttcacgtcattattggctcaactttcctcactatctgcttcatccgccaactaatatttcactttacatccaaacatcactttggcttcgaagccgccgcctgatactggcattttgtagatgtggtttgactatttctgtatgtctccatctattgatgagggtcttactcttttagtataaatagtaccgttaacttccaattaactagttttgacaacattcaaaaaagagtaataaacttcgccttaattttaataatcaacaccctcctagccttactactaataattattacattttgactaccacaactcaacggctacatagaaaaatccaccccttacgagtgcggcttcgaccctatatcccccgcccgcgtccctttctccataaaattcttcttagtagctattaccttcttattatttgatctagaaattgccctccttttacccctaccatgagccctacaaacaactaacctgccactaatagttatgtcatccctcttattaatcatcatcctagccctaagtctggcctatgagtgactacaaaaaggattagactgaaccgaattggtatatagtttaaacaaaacgaatgatttcgactcattaaattatgataatcatatttaccaaatgcccctcatttacataaatattatactagcatttaccatctcacttctaggaatactagtatatcgctcacacctcatatcctccctactatgcctagaaggaataatactatcgctgttcattatagctactctcataaccctcaacacccactccctcttagccaatattgtgcctattgccatactagtctttgccgcctgcgaagcagcggtgggcctagccctactagtctcaatctccaacacatatggcctagactacgtacataacctaaacctactccaatgctaaaactaatcgtcccaacaattatattactaccactgacatgactttccaaaaaacacataatttgaatcaacacaaccacccacagcctaattattagcatcatccctctactattttttaaccaaatcaacaacaacctatttagctgttccccaaccttttcctccgaccccctaacaacccccctcctaatactaactacctgactcctacccctcacaatcatggcaagccaacgccacttatccagtgaaccactatcacgaaaaaaactctacctctctatactaatctccctacaaatctccttaattataacattcacagccacagaactaatcatattttatatcttcttcgaaaccacacttatccccaccttggctatcatcacccgatgaggcaaccagccagaacgcctgaacgcaggcacatacttcctattctacaccctagtaggctcccttcccctactcatcgcactaatttacactcacaacaccctaggctcactaaacattctactactcactctcactgcccaagaactatcaaactcctgagccaacaacttaatatgactagcttacacaatagcttttatagtaaagatacctctttacggactccacttatgactccctaaagcccatgtcgaagcccccatcgctgggtcaatagtacttgccgcagtactcttaaaactaggcggctatggtataatacgcctcacactcattctcaaccccctgacaaaacacatagcctaccccttccttgtactatccctatgaggcataattataacaagctccatctgcctacgacaaacagacctaaaatcgctcattgcatactcttcaatcagccacatagccctcgtagtaacagccattctcatccaaaccccctgaagcttcaccggcgcagtcattctcataatcgcccacgggcttacatcctcattactattctgcctagcaaactcaaactacgaacgcactcacagtcgcatcataatcctctctcaaggacttcaaactctactcccactaatagctttttgatgacttctagcaagcctcgctaacctcgccttaccccccactattaacctactgggagaactctctgtgctagtaaccacgttctcctgatcaaatatcactctcctacttacaggactcaacatactagtcacagccctatactccctctacatatttaccacaacacaatggggctcactcacccaccacattaacaacataaaaccctcattcacacgagaaaacaccctcatgttcatacacctatcccccattctcctcctatccctcaaccccgacatcattaccgggttttcttcttgtaaatatagtttaaccaaaacatcagattgtgaatctgacaacagaggcttacgaccccttatttaccgagaaagctcacaagaactgctaactcatgcccccatgtctaacaacatggctttctcaacttttaaaggataacagctatccattggtcttaggccccaaaaattttggtgcaactccaaataaaagtaataaccatgcacactactataaccaccctaaccctgacttccctaattccccccatccttaccaccctcgttaaccctaacaaaaaaaactcatacccccattatgtaaaatccattgtcgcatccacctttattatcagtctcttccccacaacaatattcatgtgcctagaccaagaagttattatctcgaactgacactgagccacaacccaaacaacccagctctccctaagcttcaaactagactacttctccataatattcatccctgtagcattgttcgttacatggtccatcatagaattctcactgtgatatataaactcagacccaaacattaatcagttcttcaaatatctactcatcttcctaattaccatactaatcttagttaccgctaacaacctattccaactgttcatcggctgagagggcgtaggaattatatccttcttgctcatcagttgatgatacgcccgagcagatgccaacacagcagccattcaagcaatcctatacaaccgtatcggcgatatcggtttcatcctcgccttagcatgatttatcctacactccaactcatgagacccacaacaaatagcccttctaaacgctaatccaagcctcaccccactactaggcctcctcctagcagcagcaggcaaatcagcccaattaggtctccacccctgactcccctcagccatagaaggccccaccccagtctcagccctactccactcaagcactatagttgtagcaggagtcttcttactcatccgcttccaccccctagcagaaaatagcccactaatccaaactctaacactatgcttaggcgctatcaccactctgttcgcagcagtctgcgcccttacacaaaatgacatcaaaaaaatcgtagccttctccacttcaagtcaactaggactcataatagttacaatcggcatcaaccaaccacacctagcattcctgcacatctgtacccacgccttcttcaaagccatactatttatgtgctccgggtccatcatccacaaccttaacaatgaacaagatattcgaaaaataggaggactactcaaaaccatacctctcacttcaacctccctcaccattggcagcctagcattagcaggaatacctttcctcacaggtttctactccaaagaccacatcatcgaaaccgcaaacatatcatacacaaacgcctgagccctatctattactctcatcgctacctccctgacaagcgcctatagcactcgaataattcttctcaccctaacaggtcaacctcgcttccccacccttactaacattaacgaaaataaccccaccctactaaaccccattaaacgcctggcagccggaagcctattcgcaggatttctcattactaacaacatttcccccgcatcccccttccaaacaacaatccccctctacctaaaactcacagccctcgctgtcactttcctaggacttctaacagccctagacctcaactacctaaccaacaaacttaaaataaaatccccactatgcacattttatttctccaacatactcggattctaccctagcatcacacaccgcacaatcccctatctaggccttcttacgagccaaaacctgcccctactcctcctagacctaacctgactagaaaagctattacctaaaacaatttcacagcaccaaatctccacctccatcatcacctcaacccaaaaaggcataattaaactttacttcctctctttcttcttcccactcatcctaaccctactcctaatcacataacctattcccccgagcaatctcaattacaatatatacaccaacaaacaatgttcaaccagtaactactactaatcaacgcccataatcatacaaagcccccgcaccaataggatcctcccgaatcaaccctgacccctctccttcataaattattcagcttcctacactattaaagtttaccacaaccaccaccccatcatactctttcacccacagcaccaatcctacctccatcgctaaccccactaaaacactcaccaagacctcaacccctgacccccatgcctcaggatactcctcaatagccatcgctgtagtatatccaaagacaaccatcattccccctaaataaattaaaaaaactattaaacccatataacctcccccaaaattcagaataataacacacccgaccacaccgctaacaatcaatactaaacccccataaataggagaaggcttagaagaaaaccccacaaaccccattactaaacccacactcaacagaaacaaagcatacatcattattctcgcacggactacaaccacgaccaatgatatgaaaaaccatcgttgtatttcaactacaagaacaccaatgaccccaatacgcaaaactaaccccctaataaaattaattaaccactcattcatcgacctccccaccccatccaacatctccgcatgatgaaacttcggctcactccttggcgcctgcctgatcctccaaatcaccacaggactattcctagccatgcactactcaccagacgcctcaaccgccttttcatcaatcgcccacatcactcgagacgtaaattatggctgaatcatccgctaccttcacgccaatggcgcctcaatattctttatctgcctcttcctacacatcgggcgaggcctatattacggatcatttctctactcagaaacctgaaacatcggcattatcctcctgcttgcaactatagcaacagccttcataggctatgtcctcccgtgaggccaaatatcattctgaggggccacagtaattacaaacttactatccgccatcccatacattgggacagacctagttcaatgaatctgaggaggctactcagtagacagtcccaccctcacacgattctttacctttcacttcatcttgcccttcattattgcagccctagcagcactccacctcctattcttgcacgaaacgggatcaaacaaccccctaggaatcacctcccattccgataaaatcaccttccacccttactacacaatcaaagacgccctcggcttacttctcttccttctctccttaatgacattaacactattctcaccagacctcctaggcgacccagacaattataccctagccaaccccttaaacacccctccccacatcaagcccgaatgatatttcctattcgcctacacaattctccgatccgtccctaacaaactaggaggcgtccttgccctattactatccatcctcatcctagcaataatccccatcctccatatatccaaacaacaaagcataatatttcgcccactaagccaatcactttattgactcctagccgcagacctcctcattctaacctgaatcggaggacaaccagtaagctacccttttaccatcattggacaagtagcatccgtactatacttcacaacaatcctaatcctaataccaactatctccctaattgaaaacaaaatactcaaatgggcctgtccttgtagtataaactaatacaccagtcttgtaaaccggagatgaaaacctttttccaaggacaaatcagagaaaaagtctttaactccaccattagcacccaaagctaagattctaatttaaactattctctgttctttcatggggaagcagatttgggtaccacccaagtattgactcacccatcaacaaccgctatgtatttcgtacattactgccagccaccatgaatattgtacggtaccataaatacttgaccacctgtagtacataaaaacccaatccacatcaaaaccccctccccatgcttacaagcaagtacagcaatcaaccctcaactatcacacatcaactgcaactccaaagccacccctcacccactaggataccaacaaacctacccacccttaacagtacatagtacataaagccatttaccgtacatagcacattacagtcaaatcccttctcgtccccatggatgacccccctcagataggggtcccttgaccaccatcctccgtgaaatcaatatcccgcacaagagtgctactctcctcgctccgggcccataacacttgggggtagctaaagtgaactgtatccgacatctggttcctacttcagggtcataaagcctaaatagcccacacgttccccttaaataagacatcacgatg

SEQ ID NO: 346 - DNA, 16566 bp, Homo sapiens mitochondrial
  3104: "n" refers to a nucleotide at position 3107 of the Cambridge Reference Sequence (CRS, Anderson et al. 1981 Nature 290:457-465), later determined to be absent from the human mtDNA sequence according to the revised CRS (rCRS, Andrews et al. 1999 Nature Genetics 23:147); "n" therefore represents a single nucleotide deletion at a position corresponding to nucleotide 3107 of SEQ ID NO:1 as provided herein.
gatcacaggtctatcaccctattaaccactcacgggagctctccatgcatttggtattttcgtctggggggtgtgcacgcgatagcattgcgagacgctggagccggagcaccctatgtcgcagtatctgtctttgattcctgcctcatcctattatttatcgcacctacgttcaatattacaggcgaacatacttactaaagtgtgttaattaattaatgcttgtaggacataataataacaattgatgtctgcacagccgctttccacacagacatcataacaaaatttccaccaaaccccccctcccccccgcttctggccacagcacttaaacacatctctgccaaaccccaaaaacaaagaaccctaacaccagcctaaccagatttcaaattttatcttttggcggtatgcacttttaacagtcaccccccaactaacacattattttcccctcccactcccatactactaatctcatcaacacaacccccgcccatcctacccagcacacacaccgctgctaaccccataccccgaaccaaccaaaccccaaagacaccccccacagtttatgtagcttacctcctcaaagcaatacactgaaaatgtttagacgggctcacatcaccccataaacaaataggtttggtcctagcctttctattagctcttagtaagattacacatgcaagcatccccgttccagtgagttcaccctctaaatcaccacgatcaaaagggacaagcatcaagcacgcagcaatgcagctcaaaacgcttagcctagccacacccccacgggaaacagcagtgattaacctttagcaataaacgaaagtttaactaagctatactaaccccagggttggtcaatttcgtgccagccaccgcggtcacacgattaacccaagtcaatagaagccggcgtaaagagtgttttagatcaccccctccccaataaagctaaaactcacctgagttgtaaaaaactccagttgacacaaaatagactacgaaagtggctttaacatatctgaacacacaatagctaagacccaaactgggattagataccccactatgcttagccctaaacctcaacagttaaatcaacaaaactgctcgccagaacactacgagccacagcttaaaactcaaaggacctggcggtgcttcatatccctctagaggagcctgttctgtaatcgataaaccccgatcaacctcaccacctcttgctcagcctatataccgccatcttcagcaaaccctgatgaaggctacaaagtaagcgcaagtacccacgtaaagacgttaggtcaaggtgtagcccatgaggtggcaagaaatgggctacattttctaccccagaaaactacgatagcccttatgaaacttaagggtcgaaggtggatttagcagtaaactgagagtagagtgcttagttgaacagggccctgaagcgcgtacacaccgcccgtcaccctcctcaagtatacttcaaaggacatttaactaaaacccctacgcatttatatagaggagacaagtcgtaacatggtaagtgtactggaaagtgcacttggacgaaccagagtgtagcttaacacaaagcacccaacttacacttaggagatttcaacttaacttgaccgctctgagctaaacctagccccaaacccactccaccttactaccagacaaccttagccaaaccatttacccaaataaagtataggcgatagaaattgaaacctggcgcaatagatatagtaccgcaagggaaagatgaaaaattataaccaagcataatatagcaaggactaacccctataccttctgcataatgaattaactagaaataactttgcaaggagagccaaagctaagacccccgaaaccagacgagctacctaagaacagctaaaagagcacacccgtctatgtagcaaaatagtgggaagatttataggtagaggcgacaaacctaccgagcctggtgatagctggttgtccaagatagaatcttagttcaactttaaatttgcccacagaaccctctaaatccccttgtaaatttaactgttagtccaaagaggaacagctctttggacactaggaaaaaaccttgtagagagagtaaaaaatttaacacccatagtaggcctaaaagcagccaccaattaagaaagcgttcaagctcaacacccactacctaaaaaatcccaaacatataactgaactcctcacacccaattggaccaatctatcaccctatagaagaactaatgttagtataagtaacatgaaaacattctcctccgcataagcctgcgtcagattaaaacactgaactgacaattaacagcccaatatctacaatcaaccaacaagtcattattaccctcactgtcaacccaacacaggcatgctcataaggaaaggttaaaaaaagtaaaaggaactcggcaaatcttaccccgcctgtttaccaaaaacatcacctctagcatcaccagtattagaggcaccgcctgcccagtgacacatgtttaacggccgcggtaccctaaccgtgcaaaggtagcataatcacttgttccttaaatagggacctgtatgaatggctccacgagggttcagctgtctcttacttttaaccagtgaaattgacctgcccgtgaagaggcgggcatgacacagcaagacgagaagaccctatggagctttaatttattaatgcaaacagtacctaacaaacccacaggtcctaaactaccaaacctgcattaaaaatttcggttggggcgacctcggagcagaacccaacctccgagcagtacatgctaagacttcaccagtcaaagcgaactactatactcaattgatccaataacttgaccaacggaacaagttaccctagggataacagcgcaatcctattctagagtccatatcaacaatagggtttacgacctcgatgttggatcaggacatcccgatggtgcagccgctattaaaggttcgtttgttcaacgattaaagtcctacgtgatctgagttcagaccggagtaatccaggtcggtttctatctacnttcaaattcctccctgtacgaaaggacaagagaaataaggcctacttcacaaagcgccttcccccgtaaatgatatcatctcaacttagtattatacccacacccacccaagaacagggtttgttaagatggcagagcccggtaatcgcataaaacttaaaactttacagtcagaggttcaattcctcttcttaacaacatacccatggccaacctcctactcctcattgtacccattctaatcgcaatggcattcctaatgcttaccgaacgaaaaattctaggctatatacaactacgcaaaggccccaacgttgtaggcccctacgggctactacaacccttcgctgacgccataaaactcttcaccaaagagcccctaaaacccgccacatctaccatcaccctctacatcaccgccccgaccttagctctcaccatcgcacttctactatgaacccccctccccatacccaaccccctggtcaacctcaacctaggcctcctatttattctagccacctctagcctagccgtttactcaatcctctgatcagggtgagcatcaaactcaaactacgccctgatcggcgcactgcgagcagtagcccaaacaatctcatatgaagtcaccctagccatcattctactatcaacattactaataagtggctcctttaacctctccacccttatcacaacacaagaacacctctgattactcctgccatcatgacccttggccataatatgatttatctccacactagcagagaccaaccgaacccccttcgaccttgccgaaggggagtccgaactagtctcaggcttcaacatcgaatacgccgcaggccccttcgccctattcttcatagccgaatacacaaacattattataataaacaccctcaccactacaatcttcctaggaacaacatatgacgcactctcccctgaactctacacaacatattttgtcaccaagaccctacttctaacctccctgttcttatgaattcgaacagcatacccccgattccgctacgaccaactcatacacctcctatgaaaaaacttcctaccactcaccctagcattacttatatgatatgtctccatacccattacaatctccagcattccccctcaaacctaagaaatatgtctgataaaagagttactttgatagagtaaataataggagcttaaacccccttatttctaggactatgagaatcgaacccatccctgagaatccaaaattctccgtgccacctatcacaccccatcctaaagtaaggtcagctaaataagctatcgggcccataccccgaaaatgttggttatacccttcccgtactaattaatcccctggcccaacccgtcatctactctaccatctttgcaggcacactcatcacagcgctaagctcgcactgattttttacctgagtaggcctagaaataaacatgctagcttttattccagttctaaccaaaaaaataaaccctcgttccacagaagctgccatcaagtatttcctcacgcaagcaaccgcatccataatccttctaatagctatcctcttcaacaatatactctccgggcaatgaaccataaccaatactaccaatcaatactcatcattaataatcataatggctatagcaataaaactaggaatagccccctttcacttctgagtcccagaggttacccaaggcacccctctgacatccggcctgcttcttctcacatgacaaaaactagcccccatctcaatcatataccaaatctctccctcactaaacgtaagccttctcctcactctctcaatcttatccatcatagcaggcagttgaggtggattaaaccaaacccagctacgcaaaatcttagcatactcctcaattacccacataggatgaataatagcagttctaccgtacaaccctaacataaccattcttaatttaactatttatattatcctaactactaccgcattcctactactcaacttaaactccagcaccacgaccctactactatctcgcacctgaaacaagctaacatgactaacacccttaattccatccaccctcctctccctaggaggcctgcccccgctaaccggctttttgcccaaatgggccattatcgaagaattcacaaaaaacaatagcctcatcatccccaccatcatagccaccatcaccctccttaacctctacttctacctacgcctaatctactccacctcaatcacactactccccatatctaacaacgtaaaaataaaatgacagtttgaacatacaaaacccaccccattcctccccacactcatcgcccttaccacgctactcctacctatctccccttttatactaataatcttatagaaatttaggttaaatacagaccaagagccttcaaagccctcagtaagttgcaatacttaatttctgtaacagctaaggactgcaaaaccccactctgcatcaactgaacgcaaatcagccactttaattaagctaagcccttactagaccaatgggacttaaacccacaaacacttagttaacagctaagcaccctaatcaactggcttcaatctacttctcccgccgccgggaaaaaaggcgggagaagccccggcaggtttgaagctgcttcttcgaatttgcaattcaatatgaaaatcacctcggagctggtaaaaagaggcctaacccctgtctttagatttacagtccaatgcttcactcagccattttacctcacccccactgatgttcgccgaccgttgactattctctacaaaccacaaagacattggaacactatacctattattcggcgcatgagctggagtcctaggcacagctctaagcctccttattcgagccgagctgggccagccaggcaaccttctaggtaacgaccacatctacaacgttatcgtcacagcccatgcatttgtaataatcttcttcatagtaatacccatcataatcggaggctttggcaactgactagttcccctaataatcggtgcccccgatatggcgtttccccgcataaacaacataagcttctgactcttacctccctctctcctactcctgctcgcatctgctatagtggaggccggagcaggaacaggttgaacagtctaccctcccttagcagggaactactcccaccctggagcctccgtagacctaaccatcttctccttacacctagcaggtgtctcctctatcttaggggccatcaatttcatcacaacaattatcaatataaaaccccctgccataacccaataccaaacgcccctcttcgtctgatccgtcctaatcacagcagtcctacttctcctatctctcccagtcctagctgctggcatcactatactactaacagaccgcaacctcaacaccaccttcttcgaccccgccggaggaggagaccccattctataccaacacctattctgatttttcggtcaccctgaagtttatattcttatcctaccaggcttcggaataatctcccatattgtaacttactactccggaaaaaaagaaccatttggatacataggtatggtctgagctatgatatcaattggcttcctagggtttatcgtgtgagcacaccatatatttacagtaggaatagacgtagacacacgagcatatttcacctccgctaccataatcatcgctatccccaccggcgtcaaagtatttagctgactcgccacactccacggaagcaatatgaaatgatctgctgcagtgctctgagccctaggattcatctttcttttcaccgtaggtggcctgactggcattgtattagcaaactcatcactagacatcgtactacacgacacgtactacgttgtagctcacttccactatgtcctatcaataggagctgtatttgccatcataggaggcttcattcactgatttcccctattctcaggctacaccctagaccaaacctacgccaaaatccatttcactatcatattcatcggcgtaaatctaactttcttcccacaacactttctaggcctatccggaatgccccgacgttactcggactaccccgatgcatacaccacatgaaacatcctatcatctgtaggctcattcatttctctaacagcagtaatattaataattttcatgatttgagaagccttcgcttcgaagcgaaaagtcctaatagtagaagaaccctccataaacctggagtgactatatggatgccccccaccctaccacacattcgaagaacccgtatacataaaatctagacaaaaaaggaaggaatcgaaccccccaaagctggtttcaagccaaccccatggcctccatgactttttcaaaaaggtattagaaaaaccatttcataactttgtcaaagttaaattataggctaaatcctatatatcttaatggcacatgcagcgcaagtaggtctacaagacgctacttcccctatcatagaagagcttatcacctttcatgatcacgccctcataatcattttccttatctgcttcctaatcctgtatgcccttttcctaacactcacaacaaaactaactaatactaacatctcagacgctcaggaaatagaaaccgtctgaactatcctgcccgccatcatcctagtcctcatcgccctcccatccctacgcatcctttacataacagacgaggtcaacgatccctcccttaccatcaaatcaattggccaccaatggtactgaacctacgagtacaccgactacggcggactaatcttcaactcctacatacttcccccattattcctagaaccaggcgacctgcgactccttgacgttgacaatcgagtagtactcccgattgaagcccccattcgtataataattacatcacaagacgtcttgcactcatgagctgtccccacattaggcttaaaaacagatgcaattcccggacgtctaaaccaaaccactttcaccgctacacgaccgggggtatactacggtcaatgctctgaaatctgtggagcaaaccacagtttcatgcccatcgtcctagaattaattcccctaaaaatctttgaaatagggcccgtatttaccctatagcaccccctctaccccctctagagcccactgtaaagctaacttagcattaaccttttaagttaaagattaagagaaccaacacctctttacagtgaaatgccccaactaaatactaccgtatggcccaccataattacccccatactccttacactattcctcatcacccaactaaaaatattaaacacaaactaccacctacctccctcaccaaagcccataaaaataaaaaattataacaaaccctgagaaccaaaatgaacgaaaatctgttcgcttcattcattgcccccacaatcctaggcctacccgccacagtactgatcattctatttccccctctattgatccccacctccaaatatctcatcaacaaccgactaatcaccacccaacaatgactaatcaaactaacctcaaaacaaatgatagccatacacaacactaaaggacgaacctgatctcttatactagtatccttaatcatttttattgccacaactaacctcctcggactcctgcctcactcatttacaccaaccacccaactatctataaacctagccatggccatccccttatgagcgggcgcagtgattataggctttcgctctaagattaaaaatgccctagcccacttcttaccacaaggcacacctacaccccttatccccatactagttattatcgaaaccatcagcctactcattcaaccaatagccctggccgtacgcctaaccgctaacattactgcaggccacctactcatgcacctaattggaagcgccaccctagcaatatcaaccattaaccttccctctacacttatcatcttcacaattctaattctactgactatcctagaaatcgctgtcgccttaatccaagcctacgttttcacacttctagtaagcctctacctgcacgacaacacataatgacccaccaatcacatgcctatcatatagtaaaacccagcccatgacccctaacaggggccctctcagccctcctaatgacctccggcctagccatgtgatttcacttccactccataacgctcctcatactaggcctactaaccaacacactaaccatataccaatgatggcgcgatgtaacacgagaaagcacataccaaggccaccacacaccacctgtccaaaaaggccttcgatacgggataatcctatttattacctcagaagtttttttcttcgcaggatttttctgagccttttaccactccagcctagcccctaccccccaactaggggggcactggcccccaacaggcatcaccccgctaaatcccctagaagtcccactcctaaacacatccgtattactcgcatcaggagtatcaatcacctgagctcaccatagtctaatagaaaacaaccgaaaccaaataattcaagcactgcttattacaattttactgggtctctattttaccctcctacaagcctcagagtacttcgagtctcccttcaccatttccgacggcatctacggctcaacattttttgtagccacaggcttccacggacttcacgtcattattggctcaactttcctcactatctgcttcatccgccaactaatatttcactttacatccaaacatcactttggcttcgaagccgccgcctgatactggcattttgtagatgtggtttgactatttctgtatgtctccatctattgatgagggtcttactcttttagtataaatagtaccgttaacttccaattaactagttttgacaacattcaaaaaagagtaataaacttcgccttaattttaataatcaacaccctcctagccttactactaataattattacattttgactaccacaactcaacggctacatagaaaaatccaccccttacgagtgcggcttcgaccctatatcccccgcccgcgtccctttctccataaaattcttcttagtagctattaccttcttattatttgatctagaaattgccctccttttacccctaccatgagccctacaaacaactaacctgccactaatagttatgtcatccctcttattaatcatcatcctagccctaagtctggcctatgagtgactacaaaaaggattagactgagctgaattggtatatagtttaaacaaaacgaatgatttcgactcattaaattatgataatcatatttaccaaatgcccctcatttacataaatattatactagcatttaccatctcacttctaggaatactagtatatcgctcacacctcatatcctccctactatgcctagaaggaataatactatcgctgttcattatagctactctcataaccctcaacacccactccctcttagccaatattgtgcctattgccatactagtctttgccgcctgcgaagcagcggtgggcctagccctactagtctcaatctccaacacatatggcctagactacgtacataacctaaacctactccaatgctaaaactaatcgtcccaacaattatattactaccactgacatgactttccaaaaaacacataatttgaatcaacacaaccacccacagcctaattattagcatcatccccctactattttttaaccaaatcaacaacaacctatttagctgttccccaaccttttcctccgaccccctaacaacccccctcctaatactaactacctgactcctacccctcacaatcatggcaagccaacgccacttatccagtgaaccactatcacgaaaaaaactctacctctctatactaatctccctacaaatctccttaattataacattcacagccacagaactaatcatattttatatcttcttcgaaaccacacttatccccaccttggctatcatcacccgatgaggcaaccagccagaacgcctgaacgcaggcacatacttcctattctacaccctagtaggctcccttcccctactcatcgcactaatttacactcacaacaccctaggctcactaaacattctactactcactctcactgcccaagaactatcaaactcctgagccaacaacttaatatgactagcttacacaatagcttttatagtaaagatacctctttacggactccacttatgactccctaaagcccatgtcgaagcccccatcgctgggtcaatagtacttgccgcagtactcttaaaactaggcggctatggtataatacgcctcacactcattctcaaccccctgacaaaacacatagcctaccccttccttgtactatccctatgaggcataattataacaagctccatctgcctacgacaaacagacctaaaatcgctcattgcatactcttcaatcagccacatagccctcgtagtaacagccattctcatccaaaccccctgaagcttcaccggcgcagtcattctcataatcgcccacggacttacatcctcattactattctgcctagcaaactcaaactacgaacgcactcacagtcgcatcataatcctctctcaaggacttcaaactctactcccactaatagctttttgatgacttctagcaagcctcgctaacctcgccttaccccccactattaacctactgggagaactctctgtgctagtaaccacattctcctgatcaaatatcactctcctacttacaggactcaacatactagtcacagccctatactccctctacatatttaccacaacacaatggggctcactcacccaccacattaacaacataaaaccctcattcacacgagaaaacaccctcatgttcatacacctatcccccattctcctcctatccctcaaccccgacatcattaccgggttttcctcttgtaaatatagtttaaccaaaacatcagattgtgaatctgacaacagaggcttacgaccccttatttaccgagaaagctcacaagaactgctaactcatgcccccatgtctaacaacatggctttctcaacttttaaaggataacagctatccattggtcttaggccccaaaaattttggtgcaactccaaataaaagtaataaccatgcacactactataaccaccctaaccctgacttccctaattccccccatccttaccaccctcgttaaccctaacaaaaaaaactcatacccccattatgtaaaatccattgtcgcatccacctttattatcagtctcttccccacaacaatattcatgtgcctagaccaagaagttattatctcgaactgacactgagccacaacccaaacaacccagctctccctaagcttcaaactagactacttctccataatattcatccctgtagcattgttcgttacatggtccatcatagaattctcactgtgatatataaactcagacccaaacattaatcagttcttcaaatatctactcattttcctaattaccatactaatcttagttaccgctaacaacctattccaactgttcatcggctgagagggcgtaggaattatatccttcttgctcatcagttgatgatacgcccgagcagatgccaacacagcagccattcaagcaatcctatacaaccgtatcggcgatatcggtttcatcctcgccttagcatgatttatcctacactccaactcatgagacccacaacaaatagcccttctaaacgctaatccaagcctcaccccactactaggcctcctcctagcagcagcaggcaaatcagcccaattaggtctccacccctgactcccctcagccatagaaggccccaccccagtctcagccctactccactcaagcactatagttgtagcaggaatcttcttactcatccgcttccaccccctagcagaaaatagcccactaatccaaactctaacactatgcttaggcgctatcaccactctgttcgcagcagtctgcgcccttacacaaaatgacatcaaaaaaatcgtagccttctccacttcaagtcagctaggactcataatagttacaatcggcatcaaccaaccacacctagcattcctgcacatctgtacccacgccttcttcaaagccatactatttatgtgctccgggtccatcatccacaaccttaacaatgaacaagatattcgaaaaataggaggactactcaaaaccatacctctcacttcaacctccctcaccattggcagcctagcattagcaggaatacctttcctcacaggtttctactccaaagaccacatcatcgaaaccgcaaacatatcatacacaaacgcctgagccctatctattactctcatcgctacctccctgacaagcgcctatagcactcgaataattcttctcaccctaacaggtcaacctcgcttccccacccttactaacattaacgaaaataaccccaccctactaaaccccattaaacgcctggcagccggaagcctattcgcaggatttctcattactaacaacatttcccccgcatcccccttccaaacaacaatccccctctacctaaaactcacagccctcgctgtcactttcctaggacttctaacagccctagacctcaactacctaaccaacaaacttaaaataaaatccccactatgcacattttatttctccaacatactcggattctaccctagcatcacacaccgcacaatcccctatctaggccttcttacgagccaaaacctgcccctactcctcctagacctaacctgactagaaaagctattacctaaaacaatttcacagcaccaaatctccacctccatcatcacctcaacccaaaaaggcataattaaactttacttcctctctttcttcttcccactcatcctaaccctactcctaatcacataacctattcccccgagcaatctcaattacaatatatacaccaacaaacaatgttcaaccagtaactactactaatcaacgcccataatcatacaaagcccccgcaccaataggatcctcccgaatcaaccctgacccctctccttcataaattattcagcttcctacactactaaagtttaccacaaccaccaccccatcatactctttcacccacagcaccaatcctacctccatcgctaaccccactaaaacactcaccaagacctcaacccctgacccccatgcctcaggatactcctcaatagccatcgctgtagtatatccaaagacaaccatcattccccctaaataaattaaaaaaactattaaacccatataacctcccccaaaattcagaataataacacacccgaccacaccgctaacaatcaatactaaacccccataaataggagaaggcttagaagaaaaccccacaaaccccattactaaacccacactcaacagaaacaaagcatacatcattattctcgcacggactacaaccacgaccaatgatatgaaaaaccatcgttgtatttcaactacaagaacaccaatgaccccaatacgcaaaattaaccccctaataaaactaattaaccactcattcatcgacctccccaccccatccaacatctccgcatgatgaaacttcggctcactccttggcgcctgcctgatcctccaaatcaccacaggactattcctagccatgcactactcaccagacgcctcaaccgccttttcatcaatcgcccacatcactcgagacgtaaattatggctgaatcatccgctaccttcacgccaatggcgcctcaatattctttatctgcctcttcctacacatcggacgaggcctatattacggatcatttctctactcagaaacctgaaacatcggcattatcctcctgcttgcaactatagcaacagccttcataggctatgtcctcccgtgaggccaaatatcattctgaggggccacagtaattacaaacttactatccgccatcccatacattgggacagacctagttcaatgaatctgaggaggctactcagtagacagtcccaccctcacacgattctttacctttcacttcatcttacccttcattattgcagccctagcagcactccacctcctattcttgcacgaaacgggatcaaacaaccccctaggaatcacctcccattccgataaaatcaccttccacccttactacacaatcaaagacgccctcggcttacttctcttccttctctccttaatgacattaacactattctcacctgacctcctaggcgacccagacaattataccctagccaaccccttaaacacccctccccacatcaagcccgaatgatatttcctattcgcctacacaattctccgatccgtccctaacaaactaggaggcgtccttgccctattactatccatcctcatcctagcaataatccccatcctccacatatccaaacaacaaagcataatatttcgcccactaagccaatcactttattgactcctagccgcagacctcctcattctaacctgaatcggaggacaaccagtaagctacccttttaccatcattggacaagtagcatccgtactatacttcacaacaatcctaatcctaataccaactatctccctaattgaaaacaaaatactcaaatgggcctgtccttgtagtataaactaatacaccagtcttgtaaaccggagatgaaaacctttttccaaggacaaatcagagaaaaagtctttaactccaccattagcacccaaagctaagattctaatttaaactattctctgttctttcatggggaagcagatttgggtgccacccaagtattgactcacccatcaacaaccgctatgtatttcgtacattactgccagccaccatgaatattgtacggtaccataaatacttgaccacctgtagtacataaaaacccaatccacatcaaaaccccttccccatgcttacaagcaagtacagcaatcaaccttcaactatcacacatcaactgcaactccaaagccacccctcacccactaggataccaacaaacctacccacccttaacagtacatagtacataaagccattcatcgtacatagcacattacagtcaaatcccttctcgcccccatggatgacccccctcagataggggtcccttgaccaccatcctccgtgaaatcaatatcccgcacaagagtgctactctcctcgctccgggcccataacacttgggggtagctaaagtgaactgtatccgacatctggttcctacttcagggccataaagcctaaatagcccacacgttccccttaaataagacatcacgatg

SEQ ID NO: 347 - DNA, 16564 bp, Homo sapiens mitochondrial
  3109: "n" refers to a nucleotide at position 3107 of the Cambridge Reference Sequence (CRS, Anderson et al. 1981 Nature 290:457-465), later determined to be absent from the human mtDNA sequence according to the revised CRS (rCRS, Andrews et al. 1999 Nature Genetics 23:147); "n" therefore represents a single nucleotide deletion at a position corresponding to nucleotide 3107 of SEQ ID NO:1 as provided herein.
gatcacaggtctatcaccctattaaccactcatgggagctctccatgcatttggtattttcgtctggggggtgtgcacgcgatagcattgcgagacgctggagccggagcaccctatgtcgcagtatctgtctttgattcctgcctcatcctattatttatcgcacctacgttcaatattacaggcgaacatacttactaaagtgtgttaattaattaatgcttgtaggacataataataacaattgaatgtctgcacagccgctttccacacagacatcataacaaaaaatttccaccaaaccccccctcccccccgcttctggccacagcacttaaacacatctctgccaaaccccaaaaacaaagaaccctaacaccagcctaaccagatttcaaattttatcttttggcggtatgcacttttaacagtcaccccccaactaacacattattttcccctcccactcccatactactaatctcatcaatacaacccccacccatcctacccagcacacacacaccgctgctaaccccataccccgaaccaaccaaaccccaaagacaccccccacagtttatgtagcttacctcctcaaagcaatacactgaaaatgtttagacgggctcacatcaccccataaacaaataggtttggtcctagcctttctattagctcttagtaagattacacatgcaagcatccccgttccagtgagttcaccctctaaatcaccacgatcaaaagggacaagcatcaagcacgcagcaatgcagctcaaaacgcttagcctagccacacccccacgggaaacagcagtgattagcctttagcaataaacgaaagtttaactaagctatactaaccccagggttggtcaatttcgtgccagccaccgcggtcacacgattaacccaagtcaatagaagccggcgtaaagagtgttttagatcaccccctccccaataaagctaaaactcacctgagttgtaaaaaactccagttgacacaaaatagactacgaaagtggctttaacatatctgaacacacaatagctaagacccaaactgggattagataccccactatgcttagccctaaacctcaacagttaaatcaacaaaactgctcgccagaacactacgagccacagcttaaaactcaaaggacctggcggtgcttcatatccctctagaggagcctgttctgtaatcgataaaccccgatcaacctcaccacctcttgctcagcctatataccgccatcttcagcaaaccctgatgaaggctacaaagtaagcgcaagtacccacgtaaagacgttaggtcaaggtgtagcccatgaggtggcaagaaatgggctacattttctaccccagaaaactacgatagcccttatgaaacttaagggtcgaaggtggatttagcagtaaactgagagtagagtgcttagttgaacagggccctgaagcgcgtacacaccgcccgtcaccctcctcaagtatacttcaaaggacatttaactaaaacccctacgcatttatatagaggagacaagtcgtaacatggtaagtgtactggaaagtgcacttggacgaaccagagtgtagcttaacacaaagcacccaacttacacttaggagatttcaacttaacttgaccgctctgagctaaacctagccccaaacccactccaccttactaccagacaaccttagccaaaccatttacccaaataaagtataggcgatagaaattgaaacctggcgcaatagatatagtaccgcaagggaaagatgaaaaattataaccaagcataatatagcaaggactaacccctataccttctgcataatgaattaactagaaataactttgcaaggagagccaaagctaagacccccgaaaccagacgagctacctaagaacagctaaaagagcacacccgtctatgtagcaaaatagtgggaagatttataggtagaggcgacaaacctaccgagcctggtgatagctggttgtccaagatagaatcttagttcaactttaaatttgcccacagaaccctctaaatccccttgtaaatttaactgttagtccaaagaggaacagctctttggacactaggaaaaaaccttgtagagagagtaaaaaatttaacacccatagtaggcctaaaagcagccaccaattaagaaagcgttcaagctcaacacccactacctaaaaaatcccaaacatataactgaactcctcacacccaattggaccaatctatcaccctatagaagaactaatgttagtataagtaacatgaaaacattctcctccgcataagcctgcgtcagattaaaacactgaactgacaattaacagcccaatatctacaatcaaccaacaagtcattattaccctcactgtcaacccaacacaggcatgctcataaggaaaggttaaaaaaagtaaaaggaactcggcaaatcttaccccgcctgtttaccaaaaacatcacctctagcatcaccagtattagaggcaccgcctgcccagtgacacatgtttaacggccgcggtaccctaaccgtgcaaaggtagcataatcacttgttccttaaatagggacctgtatgaatggctccacgagggttcagctgtctcttacttttaaccagtgaaattgacctgcccgtgaagaggcgggcatgacacagcaagacgagaagaccctatggagctttaatttattaatgcaaacagtacctaacaaacccacaggtcctaaactaccaaacctgcattaaaaatttcggttggggcgacctcggagcagaacccaacctccgagcagtacatgctaagacttcaccagtcaaagcgaactactatactcaattgatccaataacttgaccaacggaacaagttaccctagggataacagcgcaatcctattctagagtccatatcaacaatagggtttacgacctcgatgttggatcaggacatcccgatggtgcagccgctattaaaggttcgtttgttcaacgattaaagtcctacgtgatctgagttcagaccggagtaatccaggtcggtttctatctacnttcaaattcctccctgtacgaaaggacaagagaaataaggcctacttcacaaagcgccttcccccgtaaatgatatcatctcaacttagtattatacccacacccacccaagaacagggtttgttaagatggcagagcccggtaatcgcataaaacttaaaactttacagtcagaggttcaattcctcttcttaacaacatacccatggccaacctcctactcctcattgtacccattctaatcgcaatggcattcctaatgcttaccgaacgaaaaattctaggctatatacaactacgcaaaggccccaacgttgtaggcccctacgggctactacaacccttcgctgacgccataaaactcttcaccaaagagcccctaaaacccgccacatctaccatcaccctctacatcaccgccccgaccttagctctcaccgtcgctcttctactatgaacccccctccccatacccaaccccctggtcaacctcaacctaggcctcctatttattctagccacctctagcctagccgtttactcaatcctctgatcagggtgagcatcaaactcaaactacgccctgatcggcgcactgcgagcagtagcccaaacaatctcatatgaagtcaccctagccatcattctactatcaacattactaataagtggctcctttaacctctccacccttatcacaacacaagaacacctctgattactcctgccatcatgacccttggccataatatgatttatctccacactagcagagaccaaccgaacccccttcgaccttgccgaaggggagtccgaactagtctcaggcttcaacatcgaatacgccgcaggccccttcgccctattcttcatagccgaatacacaaacattattataataaacaccctcaccactacaatcttcctaggaacaacatatgacgcactctcccctgaactctacacaacatattttgtcaccaagaccctacttctaacctccctgttcttatgaattcgaacagcatacccccgattccgctacgaccaactcatacacctcctatgaaaaaacttcctaccactcaccctagcattacttatatgatatgtctccatacccattacaatctccagcattccccctcaaacctaagaaatatgtctgataaaagagttactttgatagagtaaataataggagcttaaacccccttatttctaggactatgagaatcgaacccatccctgagaatccaaaattctccgtgccacctatcacaccccatcctaaagtaaggtcagctaaataagctatcgggcccataccccgaaaatgttggttatacccttcccgtactaattaatcccctggcccaacccgtcatctactctaccatctttgcaggcacactcatcacagcgctaagctcgcactgattttttacctgagtaggcctagaaataaacatgctagcttttattccagttctaaccaaaaaaataaaccctcgttccacagaagctgccatcaagtatttcctcacgcaagcaaccgcatccataatccttctaatagctatcctcttcaacaatatactctccggacaatgaaccataaccaatactaccaatcaatactcatcattaataatcataatggctatagcaataaaactaggaatagccccctttcacttctgagtcccagaagttacccaaggcacccctctgacatccggcctgcttcttctcacatgacaaaaactagcccccatctcaatcatataccaaatctctccctcactaaacgtaagccttctcctcactctctcaatcttatccatcatagcaggcagttgaggtggactaaaccaaacccagctacgcaaaatcttagcatactcctcaattacccacataggatgaataatagcagttctaccgtacaaccctaacataaccattcttaatttaactatttatattatcctaactactaccgcattcctactactcaacttaaactccagcaccacgaccctactactatctcgcacctgaaacaagctaacatgactaacacccttaattccatccaccctcctctccctaggaggcctgcccccgctaaccggctttttgcccaaatgggccattatcgaagaattcacaaaaaacaatagcctcatcatccccaccatcatagccaccatcaccctccttaacctctacttctacctacgcctaatctactccacctcaatcacactactccccatatctaacaacgtaaaaataaaatgacagtttgaacatacaaaacccaccccattcctccccacactcatcgcccttaccacgctactcctacctatctccccttttatactaataatcttatagaaatttaggttaaatacagaccaagagccttcaaagccctcagtaagttgcaatacttaatttctgtaacagctaaggactgcaaaaccccactctgcatcaactgaacgcaaatcagccactttaattaagctaagcccttactagaccaatgggacttaaacccacaaacacttagttaacagctaagcaccctaatcaactggcttcaatctacttctcccgccgccgggaaaaaaggcgggagaagccccggcaggtttgaagctgcttcttcgaatttgcaattcaatatgaaaatcacctcggagctggtaaaaagaggcctaacccctgtctttagatttacagtccaatgcttcactcagccattttacctcacccccactgatgttcgccgaccgttgactattctctacaaaccacaaagacattggaacactatacctattattcggcgcatgagctggagtcctaggcacagctctaagcctccttattcgagccgagctgggccagccaggcaaccttctaggtaacgaccacatctacaacgttatcgtcacagcccatgcatttgtaataatcttcttcatagtaatacccatcataatcggaggctttggcaactgactagttcccctaataatcggtgcccccgatatggcgtttccccgcataaacaacataagcttctgactcttacctccctctctcctactcctgctcgcatctgctatagtggaggccggagcaggaacaggttgaacagtctaccctcccttagcagggaactactcccaccctggagcctccgtagacctaaccatcttctccttacacctagcaggtgtctcctctatcttaggggccatcaatttcatcacaacaattatcaatataaaaccccctgccataacccaataccaaacgcccctcttcgtctgatccgtcctaattacagcagtcctacttctcctatctctcccagtcctagctgctggcatcactatactactaacagaccgcaacctcaacaccaccttcttcgaccccgccggaggaggagaccccattctataccaacacctattctgatttttcggtcaccctgaagtttatattcttatcctaccaggcttcggaataatctcccatattgtaacttactactccggaaaaaaagaaccatttggatacataggtatggtctgagctatgatatcaattggcttcctagggtttatcgtgtgagcacaccatatatttacagtaggaatagacgtagacacacgagcatatttcacctccgctaccataatcatcgctatccccaccggcgtcaaagtatttagctgactcgccacactccacggaagcaatatgaaatgatctgctgcagtgctctgagccctaggattcatctttcttttcaccgtaggtggcctgactggcattgtattagcaaactcatcactagacatcgtactacacgacacgtactacgttgtagctcacttccactatgtcctatcaataggagctgtatttgccatcataggaggcttcattcactgatttcccctattctcaggctacaccctagaccaaacctacgccaaaatccatttcactatcatattcatcggcgtaaatctaactttcttcccacaacactttctcggcctatccggaatgccccgacgttactcggactaccccgatgcatacaccacatgaaacatcctatcatctgtaggctcattcatttctctaacagcagtaatattaataattttcatgatttgagaagccttcgcttcgaagcgaaaagtcctaatagtagaagaaccctccataaacctggagtgactatatggatgccccccaccctaccacacattcgaagaacccgtatacataaaatctagacaaaaaaggaaggaatcgaaccccccaaagctggtttcaagccaaccccatggcctccatgactttttcaaaaaggtattagaaaaaccatttcataactttgtcaaagttaaattataggctaaatcctatatatcttaatggcacatgcagcgcaagtaggtctacaagacgctacttcccctatcatagaagagcttatcacctttcatgatcacgccctcataatcattttccttatctgcttcctagtcctgtatgcccttttcctaacactcacaacaaaactaactaatactaacatctcagacgctcaggaaatagaaaccgtctgaactatcctgcccgccatcatcctagtcctcatcgccctcccatccctacgcatcctttacataacagacgaggtcaacgatccctcccttaccatcaaatcaattggccaccaatggtactgaacctacgagtacaccgactacggcggactaatcttcaactcctacatacttcccccattattcctagaaccaggcgacctgcgactccttgacgttgacaatcgagtagtactcccgattgaagcccccattcgtataataattacatcacaagacgtcttgcactcatgagctgtccccacattaggcttaaaaacagatgcaattcccggacgtctaaaccaaaccactttcaccgctacacgaccgggggtatactacggtcaatgctctgaaatctgtggagcaaaccacagtttcatgcccatcgtcctagaattaattcccctaaaaatctttgaaatagggcccgtatttaccctatagcaccccctctagagcccactgtaaagctaacttagcattaaccttttaagttaaagattaagagaaccaacacctctttacagtgaaatgccccaactaaatactaccgtatggcccaccataattacccccatactccttacactattcctcatcacccaactaaaaatattaaacacaaactaccacctacctccctcaccaaagcccataaaaataaaaaattataacaaaccctgagaaccaaaatgaacgaaaatctgttcgcttcattcattgcccccacaatcctaggcctacccgccgcagtactgatcattctatttccccctctattgatccccacctccaaatatctcatcaacaaccgactaatcaccacccaacaatgactaatcaaactaacctcaaaacaaatgataaccatacacaacactaaaggacgaacctgatctcttatactagtatccttaatcatttttattgccacaactaacctcctcggactcctgcctcactcatttacaccaaccacccaactatctataaacctagccatggccatccccttatgagcgggcgcagtgattataggctttcgctctaagattaaaaatgccctagcccacttcttaccacaaggcacacctacaccccttatccccatactagttattatcgaaaccatcagcctactcattcaaccaatagccctggccgtacgcctaaccgctaacattactgcaggccacctactcatgcacctaattggaagcgccaccctagcaatatcaaccattaaccttccctctacacttatcatcttcacaattctaattctactgactatcctagaaatcgctgtcgccttaatccaagcctacgttttcacacttctagtaagcctctacctgcacgacaacacataatgacccaccaatcacatgcctatcatatagtaaaacccagcccatgacccctaacaggggccctctcagccctcctaatgacctccggcctagccatgtgatttcacttccactccataacgctcctcatactaggcctactaaccaacacactaaccatataccaatgatggcgcgatgtaacacgagaaagcacataccaaggccaccacacaccacctgtccaaaaaggccttcgatacgggataatcctatttattacctcagaagtttttttcttcgcaggatttttctgagccttttaccactccagcctagcccctaccccccaattaggagggcactggcccccaacaggcatcaccccgctaaatcccctagaagtcccactcctaaacacatccgtattactcgcatcaggagtatcaatcacctgagctcaccatagtctaatagaaaacaaccgaaaccaaataattcaagcactgcttattacaattttactgggtctctattttaccctcctacaagcctcagagtacttcgagtctcccttcaccatttccgacggcatctacggctcaacattttttgtagccacaggcttccacggacttcacgtcattattggctcaactttcctcactatctgcttcatccgccaactaatatttcactttacatccaaacatcactttggcttcgaagccgccgcctgatactggcattttgtagatgtggtctgactatttctgtatgtctccatctattgatgagggtcttactcttttagtataaatagtaccgttaacttccaattaactagttttgacaacattcaaaaaagagtaataaacttcgccttaattttaataatcaacaccctcctagccttactactaataattattacattttgactaccacaactcaacggctacatagaaaaatccaccccttacgagtgcggcttcgaccctatatcccccgcccgcgtccctttctccataaaattcttcttagtagctattaccttcttattatttgatctagaaattgccctccttttacccctaccatgagccctacaaacaactaacctgccactaatagttatgtcatccctcttattaatcatcatcctagccctaagtctggcctatgagtgactacaaaaaggattagactgaaccgaattggtatatagtttaaacaaaacgaatgatttcgactcattaaattatgataatcatatttaccaaatgcccctcatttacataaatattatactagcatttaccatctcacttctaggaatactagtatatcgctcacacctcatatcctccctactatgcctagaaggaataatactatcgctgttcattatagctactctcataaccctcaacacccactccctcttagccaatattgtgcctattgccatactagtctttgccgcctgcgaagcagcggtgggcctagccctactagtctcaatctccaacacatatggcctagactacgtacataacctaaacctactccaatgctaaaactaatcgtcccaacaattatattgctaccactgacatgactttccaaaaaacacataatttgaatcaacacaaccacccacagcctaattattagcatcatccctctactattttttaaccaaatcaacaacaacctatttagctgttccccaaccttttcctccgaccccctaacaacccccctcctaatactaactacctgactcctacccctcacaatcatggcaagccaacgccacttatccagtgaaccactatcacgaaaaaaactctacctctctatactaatctccctacaaatctccttaattataacattcacagccacagaactaatcatattttatatcttcttcgaaaccacacttatccccaccttggctatcatcacccgatgaggcaaccagtcagaacgcctgaacgcaggcacatacttcctattctacaccctagtaggctcccttcccctactcatcgcactaatttacactcacaacaccctaggctcactaaacattctactactcactctcactgcccaagaactatcaaactcctgagccaacaacttaatatgactagcttacacaatagcttttatagtaaagatgcctctttacggactccacttatgactccctaaagcccatgtcgaagcccccatcgctgggtcaatagtacttgccgcagtactcttaaaactaggcggctatggtataatacgcctcacactcattctcaaccccctgacaaaacacatagcctaccccttccttgtactatccctatgaggcataattataacaagctccatctgcctacgacaaacagacctaaaatcgctcattgcatactcttcaatcagccacatagccctcgtagtaacagccattctcatccaaaccccctgaagcttcaccggcgcagtcattctcataatcgcccacggacttacatcctcattactattctgcctagcaaactcaaactacgaacgcactcacagtcgcatcataatcctctctcaaggacttcaaactctactcccactaatagctttttgatgacttctagcaagcctcgctaacctcgccttaccccccactattaacctactgggagaactctctgtgctagtaaccacgttctcctgatcaaatatcactctcctacttacaggactcaacatactagtcacagccctatactccctctacatatttaccacaacacaatggggctcactcacccaccacattaacaacataaaaccctcattcacacgagaaaacaccctcatgttcatacacctatcccccattctcctcctatccctcaaccccgacatcattaccgggttttcctcttgtaaatatagtttaaccaaaacatcagattgtgaatctgacaacagaggcttacgaccccttatttaccgagaaagctcacaagaactgctaactcatgcccccatgtctaacaacatggctttctcaacttttaaaggataacagctatccattggtcttaggccccaaaaattttggtgcaactccaaataaaagtaataaccatgcacactactataaccaccctaaccctgacttccctaattccccccatccttaccaccctcgttaaccctaacaaaaaaaactcatacccccattatgtaaaatccattgtcgcatccacctttattatcagtctcttccccacaacaatattcatgtgcctagaccaagaagttattatctcgaactgacactgagccacaacccaaacaacccagctctccctaagcttcaaactagactacttctccataatattcatccctgtagcattgttcgttacatggtccatcatagaattctcactgtgatatataaactcagacccaaacattaatcagttcttcaaatatctactcatcttcctaattaccatactaatcttagttaccgctaacaacctattccaactgttcatcggctgagagggcgtaggaattatatccttcttgctcatcagttgatgatacgcccgagcagatgccaacacagcagccattcaagcaatcctatacaaccgtatcggcgatatcggtttcatcctcgccttagcatgatttatcctacactccaactcatgagacccacaacaaatagcccttctaaacgctaatccaagcctcaccccactactaggcctcctcctagcagcagcaggcaaatcagcccaattaggtctccacccctgactcccctcagccatagaaggccccaccccagtctcagccctactccactcaagcactatagttgtagcaggaatcttcttactcatccgcttccaccccctagcagaaaatagcccactaatccaaactctaacactatgcttaggcgctatcaccactctgttcgcagcagtctgcgcccttacacaaaatgacatcaaaaaaatcgtagccttctccacttcaagtcaactaggactcataatagttacaatcggcatcaaccaaccacacctagcattcctgcacatctgtacccacgccttcttcaaagccatactatttatgtgctccgggtccatcatccacaaccttaacaatgaacaagatattcgaaaaataggaggactactcaaaaccatacctctcacttcaacctccctcaccattggcagcctagcattagcaggaatacctttcctcacaggtttctactccaaagaccacatcatcgaaaccgcaaacatatcatacacaaacgcctgagccctatctattactctcatcgctacctccctaacaagcgcctatagcactcgaataattcttctcaccctaacaggtcaacctcgcttccccacccttactaacattaacgaaaataaccccaccctactaaaccccattaaacgcctggcagccggaagcctattcgcaggatttctcattactaacaacatttcccccgcatcccccttccaaacaacaatccccctctacctaaaactcacagccctcgctgtcactttcctaggacttctaacagccctagacctcaactacctaaccaacaaacttaaaataaaatccccactatgcacattttatttctccaacatactcggattctaccctagcatcacacaccgcacaatcccctatctaggccttcttacgagccaaaacctgcccctactcctcctagacctaacctgactagaaaagctattacctaaaacaatttcacagcaccaaatctccacctccatcatcacctcaacccaaaaaggcataattaaactttacttcctctctttcttcttcccactcatcctaaccctactcctaatcacataacctattcccccgagcaatctcaattacaatatatacaccaacaaacaatgttcaaccagtaactactactaatcaacgcccataatcatacaaagcccccgcaccaataggatcctcccgaatcaaccctgacccctctccttcataaattattcagcttcctacactattaaagtttaccacaaccaccaccccatcatactctttcacccacagcaccaatcctacctccatcgctaaccccactaaaacactcaccaagacctcaacccctgacccccatgcctcaggatactcctcaatagccatcgctgtagtatatccaaagacaaccatcattccccctaaataaattaaaaaaactattaaacccatataacctcccccaaaattcagaataataacacacccgaccacaccgctaacaatcaatactaaacccccataaataggagaaggcttagaagaaaaccccacaaaccccattactaaacccacactcaacagaaacaaagcatacatcattattctcgcacggactacaaccacgaccaatgatatgaaaaaccatcgttgtatttcaactacaagaacaccaatgaccccaatacgcaaaattaaccccctaataaaattaattaaccactcattcatcgacctccccaccccatccaacatctccgcatgatgaaacttcggctcactccttggcgcctgcctgatcctccaaatcaccacaggactattcctagccatgcactactcaccagacgcctcaaccgccttttcatcaatcgcccacatcactcgagacgtaaattatggctgaatcatccgctaccttcacgccaatggcgcctcaatattctttatctgcctcttcctacacatcgggcgaggcctatattacggatcatttctctactcagaaacctgaaacatcggcattatcctcctgcttgcaactatagcaacagccttcataggctatgtcctcccgtgaggccaaatatcattctgaggggccacagtaattacaaacttactatccgccatcccatacattgggacagacctagttcaatgaatctgagggggctactcagtagacagtcccaccctcacacgattctttacctttcacttcatcttgcccttcattattgcagccctagcagcactccacctcctattcttgcacgaaacgggatcaaacaaccccctaggaatcacctcccattccgataaaatcaccttccacccttactacacaatcaaagacgccctcggcttacttctcttccttctctccttaatgacattaacactattctcaccagacctcctaggcgacccagacaattataccctagccaaccccttaaatacccctccccacatcaagcccgaatgatatttcctattcgcctacacaattctccgatccgtccctaacaaactaggaggcgtccttgccctattactatccatcctcatcctagcaataatccccatcctccatatatccaaacaacaaagcataatatttcgcccactaagccaatcactttattgactcctagccgcagacctcctcattctaacctgaatcggaggacaaccagtaagctacccttttaccatcattggacaagtagcatccgtactatacttcacaacaatcctaatcctaataccaactatctccctaattgaaaacaaaatactcaaatggacctgtccttgtagtataaactaatacaccagtcttgtaaaccggagatgaaaacctttttccaaggacaaatcagagaaaaagtctttaactccaccattagcacccaaagctaagattctaatttaaactattctctgttctttcatggggaagcagatttgggtaccacccaagtattgactcacccatcaacaaccgctatgtatttcgtacattactgccagccaccatgaatattgtacggtaccataaatacttgaccacctgtagtacataaaaacccaatccacatcaaacccccccccccacctgcttacaagcaagtacagcaaccaaccctcaactatcacacatcaactgcaactccaaagccatctctcacccactaggataccaacaaacctacccacccttaacagtacatagtacataaagccatttaccgtacatagcacattacagtcaaatccctcctcgtccccatggatgacccccctcagataggggtcccttgaccaccatcctccgtgaaatcaatatcccgcacaagagtgctactctcctcgctccgggcccataacatttgggggtagctaaagtgaactgtatccgacatctggttcctacttcagggccataaagcctaaatagcccacacgttccccttaaataagacatcacgatg

SEQ ID NO: 348 - DNA, 16571 bp, Homo sapiens mitochondrial
  3109: "n" refers to a nucleotide at position 3107 of the Cambridge Reference Sequence (CRS, Anderson et al. 1981 Nature 290:457-465), later determined to be absent from the human mtDNA sequence according to the revised CRS (rCRS, Andrews et al. 1999 Nature Genetics 23:147); "n" therefore represents a single nucleotide deletion at a position corresponding to nucleotide 3107 of SEQ ID NO:1 as provided herein.
gatcacaggtctatcaccctattaaccactcacgggagctctccatgcatttggtattttcgtctggggggtgtgcacgcgatagcattgcgagacgctggagccggagcaccctatgtcgcagtatctgtctttgattcctgcctcatcctattatttatcgcacctacgttcaatattacaggcgaacatacttactaaagtgtgttaattaattaatgcttgtaggacataataataacaattgaatgtctgcacagccgctttccacacagacatcataacaaaaaatttccaccaaaccccccctcccccccgcttctggccacagcacttaaacacatctctgccaaaccccaaaaacaaagaaccctaacaccagcctaaccagatttcaaattttatcttttggcggtatgcacttttaacagtcaccccccaactaacacattattttcccctcccactcccatactactaatctcatcaacacaacccccgcccatcctgcccagcacacacacaccgctgctaaccccataccccgaaccaaccaaaccccaaagacaccccccacagtttatgtagcttacctcctcaaagcaatacactgaaaatgtttagacgggctcacatcaccccataaacaaataggtttggtcctagcctttctattagctcttagtaagattacacatgcaagcatccccgttccagtgagttcaccctctaaatcaccacgatcaaaagggacaagcatcaagcacgcagcaatgcagctcaaaacgcttagcctagccacacccccacgggaaacagcagtgattaacctttagcaataaacgaaagtttaactaagctatactaaccccagggttggtcaatttcgtgccagccaccgcggtcacacgattaacccaagtcaatagaagccggcgtaaagagtgttttagatcaccccctccccaataaagctaaaactcacctgagttgtaaaaaactccagttgacacaaaatagactacgaaagtggctttaacatatctgaacacacaatagctaagacccaaactgggattagataccccactatgcttagccctaaacctcaacagttaaatcaacaaaactgctcgccagaacactacgagccacagcttaaaactcaaaggacctggcggtgcttcatatccctctagaggagcctgttctgtaatcgataaaccccgatcaacctcaccacctcttgctcagcctatataccgccatcttcagcaaaccctgatgaaggctacaaagtaagcgcaagtacccacgtaaagacgttaggtcaaggtgtagcccatgaggtggcaagaaatgggctacattttctaccccagaaaactacgatagcccttatgaaacttaagggtcgaaggtggatttagcagtaaactgagagtagagtgcttagttgaacagggccctgaagcgcgtacacaccgcccgtcaccctcctcaagtatacttcaaaggacatttaactaaaacccctacgcatttatatagaggagacaagtcgtaacatggtaagtgtactggaaagtgcacttggacgaaccagagtgtagcttaacacaaagcacccaacttacacttaggagatttcaacttaacttgaccgctctgagctaaacctagccccaaacccactccaccttactaccagacaaccttagccaaaccatttacccaaataaagtataggcgatagaaattgaaacctggcgcaatagatatagtaccgcaagggaaagatgaaaaattataaccaagcataatatagcaaggactaacccctataccttctgcataatgaattaactagaaataactttgcaaggagagccaaagctaagacccccgaaaccagacgagctacctaagaacagctaaaagagcacacccgtctatgtagcaaaatagtgggaagatttataggtagaggcgacaaacctaccgagcctggtgatagctggttgtccaagatagaatcttagttcaactttaaatttgcccacagaaccctctaaatccccttgtaaatttaattgttagtccaaagaggaacagctctttggacactaggaaaaaaccttgtagagagagtaaaaaatttaacacccatagtaggcctaaaagcagccaccaattaagaaagcgttcaagctcaacacccactacctaaaaaatcccaaacatataactgaactcctcacacccaattggaccaatctatcaccctatagaagaactaatgttagtataagtaacatgaaaacattctcctccgcataagcctgcgtcagattaaaacactgaactgacaattaacagcccaatatctacaatcaaccaacaagtcattattaccctcactgtcaacccaacacaggcatgctcataaggaaaggttaaaaaaagtaaaaggaactcggcaaatcttaccccgcctgtttaccaaaaacatcacctctagcatcaccagtattagaggcaccgcctgcccagtgacacatgtttaacggccgcggtaccctaaccgtgcaaaggtagcataatcacttgttccttaaatagggacctgtatgaatggctccacgagggttcagctgtctcttacttttaaccagtgaaattgacctgcccgtgaagaggcgggcatgacacagcaagacgagaagaccctatggagctttaatttattaatgcaaacagtacctaacaaacccacaggtcctaaactaccaaacctgcattaaaaatttcggttggggcgacctcggagcagaacccaacctccgagcagtacatgctaagacttcaccagtcaaagcgaactactatactcaattgatccaataacttgaccaacggaacaagttaccctagggataacagcgcaatcctattctagagtccatatcaacaatagggtttacgacctcgatgttggatcaggacatcccaatggtgcagccgctattaaaggttcgtttgttcaacgattaaagtcctacgtgatctgagttcagaccggagtaatccaggtcggtttctatctacnttcaaattcctccctgtacgaaaggacaagagaaataaggcctacttcacaaagcgccttcccccgtaaatgatatcatctcaacttagtattatacccacacccacccaagaacagggtttgttaagatggcagagcccggtaatcgcataaaacttaaaactttacagtcagaggttcaattcctcttcttaacaacatacccatggccaacctcctactcctcattgtacccattctaatcgcaatggcattcctaatgcttaccgaacgaaaaattctaggctatatacaactacgcaaaggccccaacgttgtaggcccctacgggctactacaacccttcgctgacgccataaaactcttcaccaaagagcccctaaaacccgccacatctaccatcaccctctacatcaccgccccgaccttagctctcaccatcgctcttctactatgaacccccctccccatacccaaccccctggtcaacctcaacctaggcctcctatttattctagccacctctagcctagccgtttactcaatcctctgatcagggtgagcatcaaactcaaactacgccctgatcggcgcactgcgagcagtagcccaaacaatctcatatgaagtcaccctagccatcattctactatcaacattactaataagtggctcctttaacctctccacccttatcacaacacaagaacacctctgattactcctgccatcatgacccttggccataatatgatttatctccacactagcagagaccaaccgaacccccttcgaccttgccgaaggggagtccgaactagtctcaggcttcaacatcgaatacgccgcaggccccttcgccctattcttcatagccgaatacacaaacattattataataaacaccctcaccactacaatcttcctaggaacaacatatgacgcactctcccctgaactctacacaacatattttgtcaccaagaccctacttctaacctccctgttcttatgaattcgaacagcatacccccgattccgctacgaccaactcatacacctcctatgaaaaaacttcctaccactcaccctagcattacttatatgatatgtctccatacccattacaatctccagcattccccctcaaacctaagaaatatgtctgataaaagagttactttgatagagtaaataataggagcttaaacccccttatttctaggactatgagaatcgaacccatccctgagaatccaaaattctccgtgccacctatcacaccccatcctaaagtaaggtcagctaaataagctatcgggcccataccccgaaaatgttggttatacccttcccgtactaattaatcccctggcccaacccgtcatctactctaccatctttgcaggcacactcatcacagcgctaagctcgcactgattttttacctgagtaggcctagaaataaacatgctagcttttattccagttctaaccaaaaaaataaaccctcgttccacagaagctgccatcaagtatttcctcacgcaagcaaccgcatccataatccttctaatagctatcctcttcaacaatatactctccggacaatgaaccataaccaatactaccaatcaatactcatcattaataatcataatggctatagcaataaaactaggaatagccccctttcacttctgagtcccagaggttacccaaggcacccctctgacatccggcctgcttcttctcacatgacaaaaactagcccctatctcaatcatataccaaatctctccctcactaaacgtaagccttctcctcactctctcaatcttatccatcatagcaggcagttgaggtggattaaaccaaacccagctacgcaaaatcttagcatactcctcaattacccacataggatgaataatagcagttctaccgtacaaccctaacataaccattcttaatttaactatttatattatcctaactactaccgcattcctactactcaacttaaactccagcaccacgaccctactactatctcgcacctgaaacaagataacatgactaacacccttaattccatccaccctcctctccctaggaggcctgcccccgctaaccggctttttgcccaaatgggccattatcgaagaattcacaaaaaacaatagcctcatcatccccaccatcatagccaccatcaccctccttaacctctacttctacctacgcctaatctactccacctcaatcacactactccccatatctaacaacgtaaaaataaaatgacagtttgaacatacaaaacccaccccattcctccccacactcatcgcccttaccacgctactcctacctatctccccttttatactaataatcttatagaaatttaggttaaatacagaccaagagccttcaaagccctcagtaagttgcaatacttaatttctgtaacagctaaggactgcaaaaccccactctgcatcaactgaacgcaaatcagccactttaattaagctaagcccttactagaccaatgggacttaaacccacaaacacttagttaacagctaagcaccctaatcaactggcttcaatctacttctcccgccgccgggaaaaaaggcgggagaagccccggcaggtttgaagctgcttcttcgaatttgcaattcaatatgaaaatcacctcggagctggtaaaaagaggcctaacccctgtctttagatttacagtccaatgcttcactcagccattttacctcacccccactgatgttcgccgaccgttgactattctctacaaaccacaaagacattggaacactatacctattattcggcgcatgagctggagtcctaggcacagctctaagcctccttattcgagccgagctgggccagccaggcaaccttctaggtaacgaccacatctacaacgttatcgtcacagcccatgcatttgtaataatcttcttcatagtaatacccatcataatcggaggctttggcaactgactagttcccctaataatcggtgcccccgatatggcgtttccccgcataaacaacataagcttctgactcttacctccctctctcctactcctgctcgcatctgctatagtggagaccggagcaggaacaggttgaacagtctaccctcccttagcagggaactactcccaccctggagcctccgtagacctaaccatcttctccttacacctagcaggtgtctcctctatcttaggggccatcaatttcatcacaacaattatcaatataaaaccccctgccataacccaataccaaacgcccctcttcgtctgatccgtcctaatcacagcagtcctacttctcctatctctcccagtcctagctgctggcatcactatactactaacagaccgcaacctcaacaccaccttcttcgaccccgccggaggaggagaccccattctataccaacacctattctgatttttcggtcaccctgaagtttatattcttatcctaccaggcttcggaataatctcccatattgtaacttactactccggaaaaaaagaaccatttggatacataggtatggtctgagctatgatatcaattggcttcctagggtttatcgtgtgagcacaccatatatttacagtaggaatagacgtagacacacgagcatatttcacctccgctaccataatcatcgctatccccaccggcgtcaaagtatttagctgactcgccacactccacggaagcaatatgaaatgatctgctgcagtgctctgagccctaggattcatctttcttttcaccgtaggtggcctgactggcattgtattagcaaactcatcactagacatcgtactacacgacacgtactacgttgtagctcacttccactatgtcctatcaataggagctgtatttgccatcataggaggcttcattcactgatttcccctattctcaggctacaccctagaccaaacctacgccaaaatccatttcactatcatattcatcggcgtaaatctaactttcttcccacaacactttctcggcctatccggaatgccccgacgttactcggactaccccgatgcatacaccacatgaaacatcctatcatctgtaggctcattcatttctctaacagcagtaatattaataattttcatgatttgagaagccttcgcttcgaagcgaaaagtcctaatagtagaagaaccctccataaacctggagtgactatatggatgccccccaccctaccacacattcgaagaacccgtatacataaaatctagacaaaaaaggaaggaatcgaaccccccaaagctggtttcaagccaaccccatggcctccatgactttttcaaaaaggtattagaaaaaccatttcataactttgtcaaagttaaattataggctaaatcctatatatcttaatggcacatgcagcgcaagtaggtctacaagacgctacttcccctatcatagaagagcttatcacctttcatgatcacgccctcataatcattttccttatctgcttcctagtcctgtatgcccttttcctaacactcacaacaaaactaactaatactaacatctcagacgctcaggaaatagaaaccgtctgaactatcctgcccgccatcatcctagtcctcatcgccctcccatccctacgcatcctttacataacagacgaggtcaacgatccctcccttaccatcaaatcaattggccaccaatggtactgaacctacgagtacaccgactacggcggactaatcttcaactcctacatacttcccccattattcctagaaccaggcgacctgcgactccttgacgttgacaatcgagtagtactcccgattgaagcccccattcgtataataattacatcacaagacgtcttgcactcatgagctgtccccacattaggcttaaaaacagatgcaattcccggacgtctaaaccaaaccactttcaccgctacacgaccgggggtatactacggtcaatgctctgaaatctgtggagcaaaccacagtttcatgcccatcgtcctagaattaattcccctaaaaatctttgaaatagggcccgtatttaccctatagcaccccctctaccccctctagagcccactgtaaagctaacttagcattaaccttttaagttaaagattaagagaaccaacacctctttacagtgaaatgccccaactaaatactaccgtatggcccaccataattacccccatattccttacactattcctcatcacccaactaaaaatattaaacacaaactaccacctacctccctcaccaaagcccataaaaataaaaaattataacaaaccctgagaaccaaaatgaacgaaaatctgttcgcttcattcattgcccccacaatcctaggcctacccgccgcagtactgatcattctatttccccctctattgatccccacctccaaatatctcatcaacaaccgactaatcaccacccaacaatgactaatcaaactaacctcaaaacaaatgatagccatacacaacactaaaggacgaacctgatctcttatactagtatccttaatcatttttattgccacaactaacctcctcggactcctgcctcactcatttacaccaaccacccaactatctataaacctagccatggccatccccttatgagcgggcgcagtgattataggctttcgctctaagattaaaaatgccctagcccacttcttaccacaaggcacacctacaccccttatccccatactagttattatcgaaaccatcagcctactcattcaaccaatagccctggccgtacgcctaaccgctaacattactgcaggccacctactcatgcacctaattggaagcgccaccctagcaatatcaaccattaaccttccctctacacttatcatcttcacaattctaattctactgactatcctagaaatcgctgtcgccttaatccaagcctacgttttcacacttctagtaagcctctacctgcacgacaacacataatgacccaccaatcacatgcctatcatatagtaaaacccagcccatgacccctaacaggggccctctcagccctcctaatgacctccggcctagccatgtgatttcacttccactccataacgctcctcatactaggcctactaaccaacacactaaccatataccaatgatggcgcgatgtaacacgagaaagcacataccaaggccaccacacaccacctgtccaaaaaggccttcgatacgggataatcctatttattacctcagaagtttttttcttcgcaggatttttctgagccttttaccactccagcctagcccctaccccccaactaggagggcactggcccccaacaggcatcaccccgctaaatcccctagaagtcccactcctaaacacatccgtattactcgcatcaggagtatcaatcacctgagctcaccatagtctaatagaaaacaaccgaaaccaaataattcaagcactgcttattacaattttactgggtctctattttaccctcctacaagcctcagagtacttcgagtctcccttcaccatttccgacggcatctacggctcaacattttttgtagccacaggcttccacggacttcacgtcattattggctcaactttcctcactatctgcttcatccgccaactaatatttcactttacatccaaacatcactttggcttcgaagccgccgcctgatactggcattttgtagatgtggtttgactatttctgtatgtctccatctattgatgagggtcttactcttttagtataaatagtaccgttaacttccaattaactagttttgacaacattcaaaaaagagtaataaacttcgccttaattttaataatcaacaccctcctagccttactactaataattattacattttgactaccacaactcaacggctacatagaaaaatccaccccttacgagtgcggcttcgaccctatatcccccgcccgcgtccctttctccataaaattcttcttagtagctattaccttcttattatttgatctagaaattgccctccttttacccctaccatgagccctacaaacaactaacctgccactaatagttatgtcatccctcttattaatcatcatcctagccctaagtctggcctatgagtgactacaaaaaggattagactgagctgaattggtatatagtttaaacaaaacgaatgatttcgactcattaaattatgataatcatatttaccaaatgcccctcatttacataaatattatactagcatttaccatctcacttctaggaatactagtatatcgctcacacctcatatcctccctactatgcctagaaggaataatactatcgctgttcattatggctactctcataaccctcaacacccactccctcttagccaatattgtgcctattgccatactagtctttgccgcctgcgaagcagcggtgggcctagccctactagtctcaatctccaacacatatggcctagactacgtacataacctaaacctactccaatgctaaaactaatcgtcccaacaattatattactaccactgacatgactttccaaaaaacacataatttgaatcaacacaaccacccacagcctaattattagcatcatccccctactattttttaaccaaatcaacaacaacctatttagctgttccccaaccttttcctccgaccccctaacaacccccctcctaatactaactacctgactcctacccctcacaatcatggcaagccaacgccacttatccagtgaaccactatcacgaaaaaaactctacctctctatactaatctccctacaaatctccttaattataacattcacagccacagaactaatcatattttatatcttcttcgaaaccacacttatccccaccttggctatcatcacccgatgaggcaaccagccagaacgcctgaacgcaggcacatacttcctattctacaccctagtaggctcccttcccctactcatcgcactaatttacactcacaacaccctaggctcactaaacattctactactcactctcactgcccaagaactatcaaactcctgagccaacaacttaatatgactagcttacacaatagcttttatagtaaagatacctctttacggactccacttatgactccctaaagcccatgtcgaagcccccatcgctgggtcaatagtacttgccgcagtactcttaaaactaggcggctatggtataatacgcctcacactcattctcaaccccctgacaaaacacatagcctaccccttccttgtactatccctatgaggcataattataacaagctccatctgcctacgacaaacagacctaaaatcgctcattgcatactcttcaatcagccacatagccctcgtagtaacagccattctcatccaaaccccctgaagcttcaccggcgcagtcattctcataatcgcccacggacttacatcctcattactattctgcctagcaaactcaaactacgaacgcactcacagtcgcatcataatcctctctcaaggacttcaaactctactcccactaatagctttttgatgacttctagcaagcctcgctaacctcgccttaccccccactattaacctactgggagaactctctgtgctagtaaccacgttctcctgatcaaatatcactctcctacttacaggactcaacatactagtcacagccctatactccctctacatatttaccacaacacaatggggctcactcacccaccacattaacaacataaaaccctcattcacacgagaaaacaccctcatgttcatacacctatcccccattctcctcctatccctcaaccccgacatcattaccgggttttcctcttgtaaatatagtttaaccaaaacatcagattgtgaatctgacaacagaggcttacgaccccttatttaccgagaaagctcacaagaactgctaactcatgcccccatgtctaacaacatggctttctcaacttttaaaggataacagctatccattggtcttaggccccaaaaattttggtgcaactccaaataaaagtaataaccatgcacactactataaccaccctaaccctgacttccctaattccccccatccttaccaccctcgttaaccctaacaaaaaaaactcatacccccattatgtaaaatccattgtcgcatccacctttattatcagtctcttccccacaacaatattcatgtgcctagaccaagaagttattatctcgaactgacactgagccacaacccaaacaacccagctctccctaagcttcaaactagactacttctccataatattcatccctgtagcattgttcgttacatggtccatcatagaattctcactgtgatatataaactcagacccaaacattaatcagttcttcaaatatctactcattttcctaattaccatactaatcttagttaccgctaacaacctattccaactgttcatcggctgagagggcgtaggaattatatccttcttgctcatcagttgatgatacgcccgagcagatgccaacacagcagccattcaagcaatcctatacaaccgtatcggcgatatcggtttcatcctcgccttagcatgatttatcctacactccaactcatgagacccacaacaaatagcccttctaaacgctaatccaagcctcaccccactactaggcctcctcctagcagcagcaggcaaatcagcccaattaggtctccacccctgactcccctcagccatagaaggccccaccccagtctcagccctactccactcaagcactatagttgtagcaggaatcttcttactcatccgcttccaccccctagcagaaaatagcccactaatccaaactctaacactatgcttaggcgctatcaccactctgttcgcagcagtctgcgcccttacacaaaatgacatcaaaaaaatcgtagccttctccacttcaagtcaactaggactcataatagttacaatcggcatcaaccaaccacacctagcattcctgcacatctgtacccacgccttcttcaaagccatactatttatgtgctccgggtccatcatccacaaccttaacaatgaacaagatattcgaaaaataggaggactactcaaaaccatacctctcacttcaacctccctcaccattggcagcctagcattagcaggaatacctttcctcacaggtttctactccaaagaccacatcatcgaaaccgcaaacatatcatacacaaacgcctgagccctatctattactctcatcgctacctccctgacaagcgcctatagcactcgaataattcttctcaccctaacaggtcaacctcgcttccccacccttactaacattaacgaaaataaccccaccctactaaaccccattaaacgcctggcagccggaagcctattcgcaggatttctcattactaacaacatttcccccgcatcccccttccaaacaacaatccccctctacctaaaactcacagccctcgctgtcactttcctaggacttctaacagccctagacctcaactacctaaccaacaaacttaaaataaaatccccactatgcacattttatttctccaacatactcggattctaccctagcatcacacaccgcacaatcccctatctaggccttcttacgagccaaaacctgcccctactcctcctagacctaacctgactagaaaagctattacctaaaacaatttcacagcaccaaatctccacctccatcatcacctcaacccaaaaaggcataattaaactttacttcctctctttcttcttcccactcatcctaaccctactcctaatcacataacctattcccccgagcaatctcaattacaatatatacaccaacaaacaatgttcaaccagtaactactactaatcaacgcccataatcatacaaagcccccgcaccaataggatcctcccgaatcaaccctgacccctctccttcataaattattcagcttcctacactattaaagtttaccacaaccaccaccccatcatactctttcacccacagcaccaatcctacctccatcgctaaccccactaaaacactcaccaagacctcaacccctgacccccatgcctcaggatactcctcaatagccatcgctgtagtatatccaaagacaaccatcattccccctaaataaattaaaaaaactattaaacccatataacctcccccaaaattcagaataataacacacccgaccacaccgctaacaatcaatactaaacccccataaataggagaaggcttagaagaaaaccccacaaaccccattactaaacccacactcaacagaaacaaagcatatatcattattctcgcacggactacaaccacgaccaatgatatgaaaaaccatcgttgtatttcaactacaagaacaccaatgaccccaatacgcaaaattaaccccctaataaaactaattaaccactcattcatcgacctccccaccccatccaacatctccgcatgatgaaacttcggctcactccttggcgcctgcctgatcctccaaatcaccacaggactattcctagccatgcactactcaccagacgcctcaaccgccttttcatcaatcgcccacatcactcgagacgtaaattatggctgaatcatccgctaccttcacgccaatggcgcctcaatattctttatctgcctcttcctacacatcggacgaggcctatattacggatcatttctctactcagaaacctgaaacatcggcattatcctcctgcttgcaactatagcaacagccttcataggctatgtcctcccgtgaggccaaatatcattctgaggggccacagtaattacaaacttactatccgccatcccatacattgggacagacctagttcaatgaatctgaggaggctactcagtagacagtcccaccctcacacgattctttacctttcacttcatcttacccttcattattgcagccctagcagcactccacctcctattcttgcacgaaacgggatcaaacaaccccctaggaatcacctcccattccgataaaatcaccttccacccttactacacaatcaaagacgccctcggcttacttctcttccttctctccttaatgacattaacactattctcaccagacctcctaggcgacccagacaattataccctagccaaccccttaaacacccctccccacatcaagcccgaatgatatttcctattcgcctacacaattctccgatccgtccctaacaaactaggaggcgtccttgccctattactatccatcctcatcctagcaataatccccatcctccatatatccaaacaacaaagcataatatttcgcccactaagccaatcactttattgactcctagccgcagacctcctcattctaacctgaatcggaggacaaccagtaagctacccttttaccatcattggacaagtagcatccgtactatacttcacaacaatcctaatcctaataccaactatctccctaattgaaaacaaaatactcaaatgggcctgtccttgtagtataaactaatacaccagtcttgtaaaccggagatgaaaacctttttccaaggacaaatcagagaaaaagtctttaactccaccattagcacccaaagctaagattctaatttaaactattctctgttctttcatggggaagcagatttgggtaccacccaagtattgactcacccatcaacaaccgctatgtatttcgtacattactgccagccaccatgaatattgtacggtaccataaatacttgaccacctgtagtacataaaaacccaatccacatcaaaaccccctccccatgcttacaagcaagtacagcaatcaaccttcaactatcacacatcaactgcaactccaaagccacccctcacccactaggataccaacaaacctacccacccttaacagtacatagtacataaagccattcaccgtacatagcacattacagtcaaatcccttctcgcccccatggatgacccccctcagataggggtcccttgaccaccatcctccgtgaaatcaatatcccgcacaagagtgctactctcctcgctccgggcccataacacttgggggtagctaaagtgaactgtatccgacatctggttcctacttcagggccataaagcctaaatagcccacacgttccccttaaataagacatcacgatg

SEQ ID NO: 349 - DNA, 16570 bp, Homo sapiens mitochondrial
  3108: "n" refers to a nucleotide at position 3107 of the Cambridge Reference Sequence (CRS, Anderson et al. 1981 Nature 290:457-465), later determined to be absent from the human mtDNA sequence according to the revised CRS (rCRS, Andrews et al. 1999 Nature Genetics 23:147); "n" therefore represents a single nucleotide deletion at a position corresponding to nucleotide 3107 of SEQ ID NO:1 as provided herein.
gatcacaggtctatcaccctattaaccactcacgggagctctccatgcatttggtattttcgtctggggggtatgcacgcgatagcattgcgagacgctggagccggagcaccctatgtcgcagtatctgtctttgattcctgcctcatcctattatttatcgcacctacgttcaatattacaggcgaacatacttactaaagtgtgttaattaattaatgcttgtaggacataataataacaattgaatgtctgcacagccgctttccacacagacatcataacaaaaaatttccaccaaaccccccctcccccgccttctggccacagcacttaaacacatctctgccaaaccccaaaaacaaagaaccctaacaccagcctaaccagatttcaaattttatcttttggcggtatgcacttttaacagtcaccccccaactaacacattattttcccctcccactcccatactactaatctcatcaatacaacccccgcccatcctacccagcacacacacaccgctgctaaccccataccccgaaccaaccaaaccccaaagacaccccccacagtttatgtagcttacctcctcaaagcaatacactgaaaatgtttagacgggctcacatcaccccataaacaaataggtttggtcctagcctttctattagctcttagtaagattacacatgcaagcatccccgttccagtgagttcaccctctaaatcaccacgatcaaaagggacaagcatcaagcacgcagcaatgcagctcaaaacgcttagcctagccacacccccacgggaaacagcagtgattaacctttagcaataaacgaaagtttaactaagctatactaaccccagggttggtcaatttcgtgccagccaccgcggtcacacgattaacccaagtcaatagaagccggcgtaaagagtgttttagatcaccccctccccaataaagctaaaactcacctgagttgtaaaaaactccagttgacacaaaatagactacgaaagtggctttaacatatctgaacacacaatagctaagacccaaactgggattagataccccactatgcttagccctaaacctcaacagttaaatcaacaaaactgctcgccagaacactacgagccacagcttaaaactcaaaggacctggcggtgcttcatatccctctagaggagcctgttctgtaatcgataaaccccgatcaacctcaccacctcttgctcagcctatataccgccatcttcagcaaaccctgatgaaggctacaaagtaagcgcaagtacccacgtaaagacgttaggtcaaggtgtagcccatgaggtggcaagaaatgggctacattttctaccccagaaaactacgatagcccttatgaaacttaagggtcgaaggtggatttagcagtaaactgagagtagagtgcttagttgaacagggccctgaagcgcgtacacaccgcccgtcaccctcctcaagtatacttcaaaggacatttaactaaaacccctacgcatttatatagaggagacaagtcgtaacatggtaagtgtactggaaagtgcacttggacgaaccagagtgtagcttaacacaaagcacccaacttacacttaggagatttcaacttaacttgaccgctctgagctaaacctagccccaaacccactccaccttactaccagacaaccttagccaaaccatttacccaaataaagtataggcgatagaaattgaaacctggcgcaatagatatagtaccgcaagggaaagatgaaaaattataaccaagcataatatagcaaggactaacccctataccttctgcataatgaattaactagaaataactttgcaaggagagccaaagctaagacccccgaaaccagacgagctacctaagaacagctaaaagagcacacccgtctatgtagcaaaatagtgggaagatttataggtagaggcgacaaacctaccgagcctggtgatagctggttgtccaagatagaatcttagttcaactttaaatttgcccacagaaccctctaaatccccttgtaaatttaactgttagtccaaagaggaacagctctttggacactaggaaaaaaccttgtagagagagtaaaaaatttaacacccatagtaggcctaaaagcagccaccaattaagaaagcgttcaagctcaacacccactacctaaaaaatcccaaacatataactgaactcctcacacccaattggaccaatctatcaccctatagaagaactaatgttagtataagtaacatgaaaacattctcctccgcataagcctgcgtcagattaaaacactgaactgacaattaacagcccaatatctacaatcaaccaacaagtcattattaccctcactgtcaacccaacacaggcatgctcataaggaaaggttaaaaaaagtaaaaggaactcggcaaatcttaccccgcctgtttaccaaaaacatcacctctagcatcaccagtattagaggcaccgcctgcccagtgacacatgtttaacggccgcggtaccctaaccgtgcaaaggtagcataatcacttgttccttaaatagggacctgtatgaatggctccacgagggttcagctgtctcttacttttaaccagtgaaattgacctgcccgtgaagaggcgggcataacacagcaagacgagaagaccctatggagctttaatttattaatgcaaacagtacctaacaaacccacaggtcctaaactaccaaacctgcattaaaaatttcggttggggcgacctcggagcagaacccaacctccgagcagtacatgctaagacttcaccagtcaaagcgaactactatactcaattgatccaataacttgaccaacggaacaagttaccctagggataacagcgcaatcctattctagagtccatatcaacaatagggtttacgacctcgatgttggatcaggacatcccgatggtgcagccgctattaaaggttcgtttgttcaacgattaaagtcctacgtgatctgagttcagaccggagtaatccaggtcggtttctatctacnttcaaattcctccctgtacgaaaggacaagagaaataaggcctacttcacaaagcgccttcccccgtaaatgatatcatctcaacttagtattatacccacacccacccaagaacagggtttgttaagatggcagagcccggtaatcgcataaaacttaaaactttacagtcagaggttcaattcctcttcttaacaacatacccatggccaacctcctactcctcattgtacccattctaatcgcaatggcattcctaatgcttaccgaacgaaaaattctaggctatatacaactacgcaaaggccccaacgttgtaggcccctacgggctactacaacccttcgctgacgccataaaactcttcaccaaagagcccctaaaacccgccacatctaccatcaccctctacatcaccgccccgaccttagctctcaccatcgctcttctactatgaacccccctccccatacccaaccccctggtcaacctcaacctaggcctcctatttattctagccacctctagcctagccgtttactcaatcctctgatcagggtgagcatcaaactcaaactacgccctgatcggcgcactgcgagcagtagcccaaacaatctcatatgaagtcaccctagccatcattctactatcaacattactaataagtggctcctttaacctctccacccttatcacaacacaagaacacctctgattactcctgccatcatgacccttggccataatatgatttatctccacactagcagagaccaaccgaacccccttcgaccttgccgaaggagagtccgaactagtctcaggcttcaacatcgaatacgccgcaggccccttcgccctattcttcatagccgaatacacaaacattattataataaacaccctcaccactacaatcttcctaggaacaacatatgacgcactctcccctgaactctacacaacatattttgtcaccaagaccctacttctaacctccctgttcttatgaattcgaacagcatacccccgattccgctacgaccaactcatacacctcctatgaaaaaacttcctaccactcaccctagcattacttatatgatatgtctccatacccattacaatctccagcattccccctcaaacctaagaaatatgtctgataaaagagttactttgatagagtaaataataggagcttaaacccccttatttctaggactatgagaatcgaacccatccctgagaatccaaaattctccgtgccacctatcacaccccatcctaaagtaaggtcagctaaataagctatcgggcccataccccgaaaatgttggttatacccttcccgtactaattaatcccctggcccaacccgtcatctactctaccatctttgcaggcacactcatcacagcgctaagctcgcactgattttttacctgagtaggcctagaaataaacatgctagcttttattccagttctaaccaaaaaaataaaccctcgttccacagaagctgccatcaagtatttcctcacgcaagcaaccgcatccataatccttctaatagctatcctcttcaacaatatactctccggacaatgaaccataaccaatactaccaatcaatactcatcattaataatcataatggctatagcaataaaactaggaatagccccctttcacttctgagtcccagaggttacccaaggcacccctctgacatccggcctgcttcttctcacatgacaaaaactagcccccatctcaatcatataccaaatctctccctcactaaacgtaagccttctcctcactctctcaatcttatccatcatagcaggcagttgaggtggattaaaccaaacccagctacgcaaaatcttagcatactcctcaattacccacataggatgaataatagcagttctaccgtacaaccctaacataaccattcttaatttaactatttatattatcctaactactaccgcattcctactactcaacttaaactccagcaccacgaccctactactatctcgcacctgaaacaagctaacatgactaacacccttaattccatccaccctcctctccctaggaggcctgcccccgctaaccggctttttgcccaaatgggccattatcgaagaattcacaaaaaacaatagcctcatcatccccaccatcatagccaccatcaccctccttaacctctacttctacctacgcctaatctactccacctcaatcacactactccccatatctaacaacgtaaaaataaaatgacagtttgaacatacaaaacccaccccattcctccccacactcatcgcccttaccacgctactcctacctatctccccttttatactaataatcttatagaaatttaggttaaatacagaccaagagccttcaaagccctcagtaagttgcaatacttaatttctgtaacagctaaggactgcaaaaccccactctgcatcaactgaacgcaaatcagccactttaattaagctaagcccttactagaccaatgggacttaaacccacaaacacttagttaacagctaagcaccctaatcaactggcttcaatctacttctcccgccgccgggaaaaaaggcgggagaagccccggcaggtttgaagctgcttcttcgaatttgcaattcaatatgaaaatcacctcggagctggtaaaaagaggcctaacccctgtctttagatttacagtccaatgcttcactcagccattttacctcacccccactgatgttcgccgaccgttgactattctctacaaaccacaaagacattggaacactatacctattattcggcgcatgagctggagtcctaggcacagctctaagcctccttattcgagccgagctgggccagccaggcaaccttctaggtaacgaccacatctacaacgttatcgtcacagcccatgcatttgtaataatcttcttcatagtaatacccatcataatcggaggctttggcaactgactagttcccctaataatcggtgcccccgatatggcgtttccccgcataaacaacataagcttctgactcttacctccctctctcctactcctgctcgcatctgctatagtggaggccggagcaggaacaggttgaacagtctaccctcctttagcagggaactactcccaccctggagcctccgtagacctaaccatcttctccttacacctagcaggtgtctcctctatcttaggggccatcaatttcatcacaacaattatcaatataaaaccccctgccataacccaataccaaacgcccctcttcgtctgatccgtcctaatcacagcagtcctacttctcctatctctcccagtcctagctgctggcatcactatactactaacagaccgcaacctcaacaccaccttcttcgaccccgccggaggaggagaccccattctataccaacacctattctgatttttcggtcaccctgaagtttatattcttatcctaccaggcttcggaataatctcccatattgtaacttactactccggaaaaaaagaaccatttggatacataggtatggtctgagctatgatatcaattggcttcctagggtttatcgtgtgagcacaccatatatttacagtaggaatagacgtagacacacgagcatatttcacctccgctaccataatcatcgctatccccaccggcgtcaaagtatttagctgactcgccacactccacggaagcaatatgaaatgatctgctgcagtgctctgagccctaggattcatctttcttttcaccgtaggtggcctgactggcattgtattagcaaactcatcactagacatcgtactacacgacacgtactacgttgtagcccacttccactatgtcctatcaataggagctgtatttgccatcataggaggcttcattcactgatttcccctattctcaggctacaccctagaccaaacctacgccaaaatccatttcactatcatattcatcggcgtaaatctaactttcttcccacaacactttctcggcctatccggaatgccccgacgttactcggactaccccgatgcatacaccacatgaaacatcctatcatctgtaggctcattcatttctctaacagcagtaatattaataattttcatgatttgagaagccttcgcttcgaagcgaaaagtcctaatagtagaagaaccctccataaacctggagtgactatatggatgccccccaccctaccacacattcgaagaacccgtatacataaaatctagacaaaaaaggaaggaatcgaaccccccaaagctggtttcaagccaaccccatggcctccatgactttttcaaaaaggtattagaaaaaccatttcataactttgtcaaagttaaattataggctaaatcctatatatcttaatggcacatgcagcgcaagtaggtctacaagacgctacttcccctatcatagaagagcttatcacctttcatgatcacgccctcataatcattttccttatctgcttcctagtcctgtatgcccttttcctaacactcacaacaaaactaactaatactaacatctcagacgctcgggaaatagaaaccgtctgaactatcctgcccgccatcatcctagtcctcatcgccctcccatccctacgcatcctttacataacagacgaggtcaacgatccctcccttaccatcaaatcaattggccaccaatggtactgaacctacgagtacaccgactacggcggactaatcttcaactcctacatacttcccccattattcctagaaccaggcgacctgcgactccttgacgttgacaatcgagtagtactcccgattgaagcccccattcgtataataattacatcacaagacgtcttgcactcatgagctgtccccacattaggcttaaaaacagatgcaattcccggacgtctaaaccaaaccactttcaccgctacacgaccgggggtatactacggtcaatgctctgaaatctgtggagcaaaccacagtttcatgcccatcgtcctagaattaattcccctaaaaatctttgaaatagggcccgtatttaccctatagcaccccctctaccccctctagagcccactgtaaagctaacttagcattaaccttttaagttaaagattaagagaaccaacacctctttacagtgaaatgccccaactaaatactaccgtatggcccaccataattacccccatactccttacactattcctcatcacccaactaaaaatattaaacacaaactaccacctacctccctcaccaaagcccataaaaataaaaaattataacaaaccctgagaaccaaaatgaacgaaaatctgttcgcttcattcattgcccccacaatcctaggcctacccgccgcagtactgatcattctatttccccctctattgatccccacctccaaatatctcatcaacaaccgactaatcaccacccaacaatgactaatcaaactaacctcaaaacaaatgataaccatacacaacactaaaggacgaacctgatctcttatactagtatccttaatcatttttattgccacaactaacctcctcggactcctgcctcactcatttacaccaaccacccaactatctataaacctagccatggccatccccttatgagcgggcgcagtgattataggctttcgctctaagattaaaaatgccctagcccacttcttaccacaaggcacacctacaccccttatccccatactagttattatcgaaaccatcagcctactcattcaaccaatagccctggccgtacgcctaaccgctaacattactgcaggccacctactcatgcacctaattggaagcgccaccctagcaatatcaaccattaaccttccctctacacttatcatcttcacaattctaattctactgactatcctagaaatcgctgtcgccttaatccaagcctacgttttcacacttctagtaagcctctacctgcacgacaacacataatgacccaccaatcacatgcctatcatatagtaaaacccagcccatgacccctaacaggggccctctcagccctcctaatgacctccggcctagccatgtgatttcacttccactccataacgctcctcatactaggcctactaaccaacacactaaccatataccaatgatggcgcgatgtaacacgagaaagcacataccaaggccaccacacaccacctgtccaaaaaggccttcgatacgggataatcctatttattacctcagaagtttttttcttcgcaggatttttctgagccttttaccactccagcctagcccctaccccccaattaggagggcactggcccccaacaggcatcaccccgctaaatcccctagaagtcccactcctaaacacatccgtattactcgcatcaggagtatcaatcacctgagctcaccatagtctaatagaaaacaaccgaaaccaaataattcaagcactgcttattacaattttactgggtctctattttaccctcctacaagcctcagagtacttcgagtctcccttcaccatttccgacggcatctacggctcaacattttttgtagccacaggcttccacggacttcacgtcattattggctcaactttcctcactatctgcttcatccgccaactaatatttcactttacatccaaacatcactttggcttcgaagccgccgcctgatactggcattttgtagatgtggtttgactatttctgtatgtctccatctattgatgagggtcttactcttttagtataaatagtaccgttaacttccaattaactagttttgacaacattcaaaaaagagtaataaacttcgccttaattttaataatcaacaccctcctagccttactactaataattattacattttgactaccacaactcaacggctacatagaaaaatccaccccttacgagtgcggcttcgaccctatatcccccgcccgcgtccctttctccataaaattcttcttagtagctattaccttcttattatttgatctagaaattgccctccttttacccctaccatgagccctacaaacaactaacctgccactaatagttatgtcatccctcttattaatcatcatcctagccctaagtctggcctatgagtgactacaaaaaggattagactgaaccgaattggtatatagtttaaacaaaacgaatgatttcgactcattaaattatgataatcatatttaccaaatgcccctcatttacataaatattatactagcatttaccatctcacttctaggaatactagtatatcgctcacacctcatatcctccctactatgcctagaaggaataatactatcgctgttcattatagctactctcataaccctcaacacccactccctcttagccaatattgtgcctattgccatactagtctttgccgcctgcgaagcagcggtgggcctagccctactagtctcaatctccaacacatatggcctagactacgtacataacctaaacctactccaatgctaaaactaatcgtcccaacaattatattactaccactgacatgactttccaaaaaacacataatttgaatcaacacaaccacccacagcctaattattagcatcatccctctactattttttaaccaaatcaacaacaacctatttagctgttccccaaccttttcctccgaccccctaacaacccccctcctaatactaactacctgactcctacccctcacaatcatggcaagccaacgccacttatccagtgaaccactatcacgaaaaaaactctacctctctatactaatctccctacaaatctccttaattataacattcacagccacagaactaatcatattttatatcttcttcgaaaccacacttatccccaccttggctatcatcacccgatgaggcaaccagccagaacgcctgaacgcaggcacatacttcctattctacaccctagtaggctcccttcccctactcatcgcactaatttacactcacaacaccctaggctcactaaacattctactactcactctcactgcccaagaactatcaaactcctgagccaacaacttaatatgactagcttacacaatagcttttatagtaaagatacctctttacggactccacttatgactccctaaagcccatgtcgaagcccccatcgctgggtcaatagtacttgccgcagtactcttaaaactaggcggctatggtataatacgcctcacactcattctcaaccccctgacaaaacacatagcctaccccttccttgtactatccctatgaggcataattataacaagctccatctgcctacgacaaacagacctaaaatcgctcattgcatactcttcaatcagccacatagccctcgtagtaacagccattctcatccaaaccccctgaagcttcaccggcgcagtcattctcataatcgcccacgggcttacatcctcattactattctgcctagcaaactcaaactacgaacgcactcacagtcgcatcataatcctctctcaaggacttcaaactctactcccactaatagctttttgatgacttctagcaagcctcgctaacctcgccttaccccccactattaacctactgggagaactctctgtgctagtaaccacgttctcctgatcaaatatcactctcctacttacaggactcaacatactagtcacagccctatactccctctacatatttaccacaacacaatggggctcactcacccaccacattaacaacataaaaccctcattcacacgagaaaacaccctcatgttcatacacctatcccccattctcctcctatccctcaaccccgacatcattaccgggttttcctcttgtaaatatagtttaaccaaaacatcagattgtgaatctgacaacagaggcttacgaccccttatttaccgagaaagctcacaagaactgctaactcatgcccccatgtctaacaacatggctttctcaacttttaaaggataacagctatccattggtcttaggccccaaaaattttggtgcaactccaaataaaagtaataaccatgcacactactataaccaccctaaccctgacttccctaattccccccatccttaccaccctcgttaaccctaacaaaaaaaactcatacccccattatgtaaaatccattgtcgcatccacctttattatcagtctcttccccacaacaatattcatgtgcctagaccaagaagttattatctcgaactgacactgagccacaacccaaacaacccagctctccctaagcttcaaactagactacttctccataatattcatccctgtagcattgttcgttacatggtccatcatagaattctcactgtgatatataaactcagacccaaacattaatcagttcttcaaatatctactcatcttcctaattaccatactaatcttagttaccgctaacaacctattccaactgttcatcggctgagagggcgtaggaattatatccttcttgctcatcagttgatgatacgcccgagcagatgccaacacagcagccattcaagcaatcctatacaaccgtatcggcgatatcggtttcatcctcgccttagcatgatttatcctacactccaactcatgagacccacaacaaatagcccttctaaacgctaatccaagcctcaccccactactaggcctcctcctagcagcagcaggcaaatcagcccaattaggtctccacccctgactcccctcagccatagaaggccccaccccagtctcagccctactccactcaagcactatagttgtagcaggaatcttcttactcatccgcttccaccccctagcagaaaatagcccactaatccaaactctaacactatgcttaggcgctatcaccactctgttcgcagcagtctgcgcccttacacaaaatgacatcaaaaaaatcgtagccttctccacttcaagtcaactaggactcataatagttacaatcggcatcaaccaaccacacctagcattcctgcacatctgtacccacgccttcttcaaagccatactatttatgtgctccgggtccatcatccacaaccttaacaatgaacaagatattcgaaaaataggaggactactcaaaaccatacctctcacttcaacctccctcaccattggcagcctagcattagcaggaatacctttcctcacaggtttctactccaaagaccacatcatcgaaaccgcaaacatatcatacacaaacgcctgagccctatctattactctcatcgctacctccctgacaagcgcctatagcactcgaataattcttctcaccctaacaggtcaacctcgcttccccacccttactaacattaacgaaaataaccccaccctactaaaccccattaaacgcctggcagccggaagcctattcgcaggatttctcattactaacaacatttcccccgcatcccccttccaaacaacaatccccctctacctaaaactcacagccctcgctgtcactttcctaggacttctaacagccctagacctcaactacctaaccaacaaacttaaaataaaatccccactatgcacattttatttctccaacatactcggattctaccctagcatcacacaccgcacaatcccctatctaggccttcttacgagccaaaacctgcccctactcctcctagacctaacctgactagaaaagctattacctaaaacaatttcacagcaccaaatctccacctccatcatcacctcaacccaaaaaggcataattaaactttacttcctctctttcttcttcccactcatcctaaccctactcctaatcacataacctattcccccgagcaatctcaattacaatatatacaccaacaaacaatgttcaaccagtaactactactaatcaacgcccataatcatacaaagcccccgcaccaataggatcctcccgaatcaaccctgacccctctccttcataaattattcagcttcctacactattaaagtttaccacaaccaccaccccatcatactctttcacccacagcaccaatcctacctccatcgctaaccccactaaaacactcaccaagacctcaacccctgacccccatgcctcaggatactcctcaatagccatcgctgtagtatatccaaagacaaccatcattccccctaaataaattaaaaaaactattaaacccatataacctcccccaaaattcagaataataacacacccgaccacaccgctaacaatcaatactaaacccccataaataggagaaggcttagaagaaaaccccacaaaccccattactaaacccacactcaacagaaacaaagcatacatcattattctcgcacggactacaaccacgaccaatgatatgaaaaaccatcgttgtatttcaactacaagaacaccaatgaccccaatacgcaaaactaaccccctaataaaattaattaaccactcattcatcgacctccccaccccatccaacatctccgcatgatgaaacttcggctcactccttggcgcctgcctgatcctccaaatcaccacaggactattcctagccatgcactactcaccagacgcctcaaccgccttttcatcaatcgcccacatcactcgagacgtaaattatggctgaatcatccgctaccttcacgccaatggcgcctcaatattctttatctgcctcttcctacacatcgggcgaggcctatattacggatcatttctctactcagaaacctgaaacatcggcattatcctcctgcttgcaactatagcaacagccttcataggctatgtcctcccgtgaggccaaatatcattctgaggggccacagtaattacaaacttactatccgccatcccatacattgggacagacctagttcaatgaatctgaggaggctactcagtagacagtcccaccctcacacgattctttacctttcacttcatcttgcccttcattattgcagccctagcagcactccacctcctattcttgcacgaaacgggatcaaacaaccccctaggaatcacctcccattccgataaaatcaccttccacccttactacacaatcaaagacgccctcggcttacttctcttccttctctccttaatgacattaacactattctcaccagacctcctaggcgacccagacaattataccctagccaaccccttaaacacccctccccacatcaagcccgaatgatatttcctattcgcctacacaattctccgatccgtccctaacaaactaggaggcgtccttgccctattactatccatcctcatcctagcaataatccccatcctccatatatccaaacaacaaagcataatatttcgcccactaagccaatcactttattgactcctagccgcagacctcctcattctaacctgaatcggaggacaaccagtaagctacccttttaccatcattggacaagtagcatccgtactatacttcacaacaatcctaatcctaataccaactatctccctaattgaaaacaaaatactcaaatgggcctgtccttgtagtataaactaatacaccagtcttgtaaaccggagatgaaaacctttttccaaggacaaatcagagaaaaagtctttaactccaccattagcacccaaagctaagattctaatttaaactattctctgttctttcatggggaagcagatttgggtaccacccaagtattgactcacccatcaacaaccgctatgtatctcgtacattactgccagccaccatgaatattgtacagtaccataaatacttgaccacctgtagtacataaaaacccaatccacatcaaaaccccctccccatgcttacaagcaagtacagcaatcaaccctcaactatcacacatcaactgcaactccaaagccacccctcacccactaggataccaacaaacctacccacccttaacagtacatagtacataaagccatttaccgtacatagcacattacagtcaaatcccttctcgtccccatggatgacccccctcagataggggtcccttgaccaccatcctccgtgaaatcaatatcccgcacaagagtgctactctcctcgctccgggcccataacacttgggggtagctaaagtgaactgtatccgacatctggttcctacttcagggccataaagcctaaatagcccacacgttccccttaaataagacatcacgatg

SEQ ID NO: 350 - DNA, 16571 bp, Homo sapiens mitochondrial
  3109: "n" refers to a nucleotide at position 3107 of the Cambridge Reference Sequence (CRS, Anderson et al. 1981 Nature 290:457-465), later determined to be absent from the human mtDNA sequence according to the revised CRS (rCRS, Andrews et al. 1999 Nature Genetics 23:147); "n" therefore represents a single nucleotide deletion at a position corresponding to nucleotide 3107 of SEQ ID NO:1 as provided herein.
gatcacaggtctatcaccctattaaccactcacgggagctctccatgcatttggtattttcgtctggggggtgtgcacgcgatagcattgcgagacgctggagccggagcaccctatgtcgcagtatctgtctttgattcctgcctcatcctattatttatcgcacctacgttcaatattacaggcgagcatatctactaaagcgtattaattaattaatgcttgtaggacataataataacaattgaatgtctgcacagccgctttccacacagacatcataacaaaaaatttccaccaaaccccccctcccccccgcttctggccacagcacttaaacacatctctgccaaaccccaaaaacaaagaaccctaacaccagcctaaccagatttcaaattttatcttttggcggtatgcacttttaacagtcaccccccaactaacacattattttcccctcccactcccatactactaatctcatcaatacaacccccgcccatcctacccagcacacacacaccgctgctaaccccataccccgaaccaaccaaaccccaaagacaccccccacagtttatgtagcttacctcctcaaagcaatacactgaaaatgtttagacgggctcacatcaccccataaacaaataggtttggtcctagcctttctattagctcttagtaagattacacatgcaagcatccccattccagtgagttcaccctctaaatcaccacgatcaaaagggacaagcatcaagcacgcagcaatgcagctcaaaacgcttagcctagccacacccccacgggaaacagcagtgattaacctttagcaataaacgaaagtttaactaagctatactaaccccagggttggtcaatttcgtgccagccaccgcggtcacacgattaacccaagtcaatagaagccggcgtaaagagtgttttagatcaccccctccccaataaagctaaaactcacctgagttgtaaaaaactccagttgacacaaaatagactacgaaagtggctttaacatatctgaacacacaatagctaagacccaaactgggattagataccccactatgcttagccctaaacctcaacagttaaatcaacaaaactgctcgccagaacactacgagccacagcttaaaactcaaaggacctggcggtgcttcatatccctctagaggagcctgttctgtaatcgataaaccccgatcaacctcaccaccccttgctcagcctatataccgccatcttcagcaaaccctgatgaaggctacaaagtaagcgcaagtacccacgtaaagacgttaggtcaaggtgtagcccatgaggtggcaagaaatgggctacattttctaccccagaaaactacgatagcccttatgaaacctaagggtcgaaggtggatttagcagtaaactgagagtagagtgcttagttgaacagggccctgaagcgcgtacacaccgcccgtcaccctcctcaagtatacttcaaaggacatttaactaaaacccctacgcatttatatagaggagacaagtcgtaacatggtaagtgtactggaaagtgcacttggacgaaccagagtgtagcttaacacaaagcacccaacttacacttaggagatttcaacttaacttgaccgctctgagctaaacctagccccaaacccactccaccttactaccagacaaccttagccaaaccatttacccaaataaagtataggcgatagaaattgaaacctggcgcaatagatatagtaccgcaagggaaagatgaaaaattataaccaagcataatatagcaaggactaacccctataccttctgcataatgaattaactagaaataactttgcaaggagagccaaagctaagacccccgaaaccagacgagctacctaagaacagctaaaagagcacacccgtctatgtagcaaaatagtgggaagatttataggtagaggcgacaaacctaccgagcctggtgatagctggttgtccaagatagaatcttagttcaactttaaatttgcccacagaaccctctaaatccccttgtaaatttaactgttagtccaaagaggaacagctctttggacactaggaaaaaaccttgtagagagagtaaaaaatttaacacccatagtaggcctaaaagcagccaccaattaagaaagcgttcaagctcaacacccactacctaaaaaatcccaaacatataactgaactcctcacacccaattggaccaatctatcaccctatagaagaactaatgttagtataagtaacatgaaaacattctcctccgcataagcctgcgtcagattaaaacactgaactgacaattaacagcccaatatctacaatcaaccaacaagtcattattaccctcactgtcaacccaacacaggcatgctcataaggaaaggttaaaaaaagtaaaaggaactcggcaaatcttaccccgcctgtttaccaaaaacatcacctctagcatcaccagtattagaggcaccgcctgcccagtgacacatgtttaacggccgcggtaccctaaccgtgcaaaggtagcataatcacttgttccttaaatagggacctgtatgaatggctccacgagggttcagctgtctcttacttttaaccagtgaaattgacctgcccgtgaagaggcgggcatgacacagcaagacgagaagaccctatggagctttaatttattaatgcaaacagtacctaacaaacccacaggtcctaaactaccaaacctgcattaaaaatttcggttggggcgacctcggagcagaacccaacctccgagcagtacatgctaagacttcaccagtcaaagcgaactactatactcaattgatccaataacttgaccaacggaacaagttaccctagggataacagcgcaatcctattctagagtccatatcaacaatagggtttacgacctcgatgttggatcaggacatcccgatggtgcagccgctattaaaggttcgtttgttcaacgattaaagtcctacgtgatctgagttcagaccggagtaatccaggtcggtttctatctacnttcaaattcctccctgtacgaaaggacaagagaaataaggcctacttcacaaagcgccttcccccgtaaatgatatcatctcaacttagtattatacccacacccacccaagaacagggtttgttaagatggcagagcccggtaatcgcataaaacttaaaactttacagtcagaggttcaattcctcttcttaacaacatacccatggccaacctcctactcctcattgtacccattctaatcgcaatggcattcctaatgcttaccgaacgaaaaattctaggctatatacaactacgcaaaggccccaacgttgtaggcccctacgggctactacaacccttcgctgacgccataaaactcttcaccaaagagcccctaaaacccgccacatctgccatcaccctctacatcaccgccccgaccttagctctcaccatcgctcttctactatgaacccccctccccatacccaaccccctggtcaacctcaacctaggcctcctatttattctagccacctctagcctagccgtttactcaatcctctgatcagggtgagcatcaaactcaaactacgccctgatcggcgcactgcgagcagtagcccaaacaatctcatatgaagtcaccctagccatcattctactatcaacattactaataagtggctcctttaacctctccacccttatcacaacacaagaacacctctgattactcctgccatcatgacccttggccataatatgatttatctccacactagcagagaccaaccgaacccccttcgaccttgccgaaggggagtccgaactagtctcaggcttcaacatcgaatacgccgcaggccccttcgccctattcttcatagccgaatacacaaacattattataataaacaccctcaccactacaatcttcctaggaacaacatatgacgcactctcccctgaactctacacaacatattttgtcaccaagaccctacttctaacctccctgttcttatgaattcgaacagcatacccccgattccgctacgaccaactcatacacctcctatgaaaaaacttcctaccactcaccctagcattacttatatgatatgtctccatacccattacaatctccagcattccccctcaaacctaagaaatatgtctgataaaagagttactttgatagagtaaataataggagcttaaacccccttatttctaggactatgagaatcgaacccatccctgagaatccaaaattctccgtgccacctatcacaccccatcctaaagtaaggtcagctaaataagctatcgggcccataccccgaaaatgttggttatacccttcccgtactaattaatcccctggcccaacccgtcatctactctaccatctttgcaggcacactcatcacagcgctaagctcgcactgattttttacctgagtaggcctagaaataaacatgctagcttttattccagttctaaccaaaaaaataaaccctcgttccacagaagctgccatcaagtatttcctcacgcaagcaaccgcatccataatccttctaatagctatcctcttcaacaatatactctccggacaatgaaccataaccaatactaccaatcaatactcatcattaataatcataatggctatagcaataaaactaggaatagccccctttcacttctgagtcccagaggttacccaaggcacccctctgacatccggcctgcttcttctcacatgacaaaaactagcccccatctcaatcatataccaaatctctccctcactaaacgtaagccttctcctcactctctcaatcttatccatcatagcaggcagttgaggtggattaaaccaaacccagctacgcaaaatcttagcatactcctcaattacccacataggatgaataatagcaattctaccgtacaaccctaacataaccattcttaatttaactatttatattatcctaactactaccgcattcctactactcaacttaaactccagcaccacgaccctactactatctcgcacctgaaacaagctaacatgactaacacccttaattccatccaccctcctctccctaggaggcctgcccccgctaaccggctttttgcccaaatgggccattatcgaagaattcacaaaaaacaatagcctcatcatccccaccatcatagccaccatcaccctccttaacctctacttctacctacgcctaatctactccacctcaatcacactactccccatatctaacaacgtaaaaataaaatgacagtttgaacatacaaaacccaccccattcctccccacactcatcacccttaccacgctactcctacctatctccccttttatactaataatcttatagaaatttaggttaaatacagaccaagagccttcaaagccctcagtaagttgcaatacttaatttctgtaacagctaaggactgcaaaaccccactctgcatcaactgaacgcaaatcagccactttaattaagctaagcccttactagaccaatgggacttaaacccacaaacacttagttaacagctaagcaccctaatcaactggcttcaatctacttctcccgccgccgggaaaaaaggcgggagaagccccggcaggtttgaagctgcttcttcgaatttgcaattcaatatgaaaatcacctcggagctggtaaaaagaggcctaacccctgtctttagatttacagtccaatgcttcactcagccattttacctcacccccactgatgttcgccgaccgttgactattctctacaaaccacaaagacattggaacactatacctattattcggcgcatgagctggagtcctaggcacagctctaagcctccttattcgagccgagctgggccagccaggcaaccttctaggtaacgaccacatctacaacgttatcgtcacagcccatgcatttgtaataatcttcttcatagtaatacccatcataatcggaggctttggcaactgactagttcccctaataatcggtgcccccgatatggcgtttccccgcataaacaacataagcttctgactcttacctccctctctcctactcctgctcgcatctgctatagtggaggccggagcaggaacaggttgaacagtctaccctcccttagcagggaactactcccaccctggagcctccgtagacctaaccatcttctccttacacctagcaggtgtctcctctatcttaggggccatcaatttcatcacaacaattatcaatataaaaccccctgccataacccaataccaaacgcccctcttcgtctgatccgtcctaatcacagcagtcctacttctcctatctctcccagtcctagctgctggcatcactatactactaacagaccgcaacctcaacaccaccttcttcgaccccgccggaggaggagaccccattctataccaacacctattctgatttttcggtcaccctgaagtttatattcttatcctaccaggcttcggaataatctcccatattgtaacttactactccggaaaaaaagaaccatttggatacataggtatggtctgagctatgatatcaattggcttcctagggtttatcgtgtgagcacaccatatatttacagtaggaatagacgtagacacacgagcatatttcacctccgctaccataatcatcgctatccccaccggcgtcaaagtatttagctgactcgccacactccacggaagcaatatgaaatgatctgctgcagtgctctgagccctaggattcatctttcttttcaccgtaggtggcctgactggcattgtattagcaaactcatcactagacatcgtactacacgacacgtactacgttgtagctcacttccactatgtcctatcaataggagctgtatttgccatcataggaggcttcattcactgatttcccctattctcaggctacaccctagaccaaacctacgccaaaatccatttcactattatattcatcggcgtaaatctaactttcttcccacaacactttctcggcctatccggaatgccccgacgttactcggactaccccgatgcatacaccacatgaaacatcctatcatctgtaggctcattcatttctctaacagcagtaatattaataattttcatgatttgagaagccttcgcttcgaagcgaaaagtcctaatagtagaagaaccctccataaacctggagtgactatatggatgccccccaccctaccacacattcgaagaacccgtatacataaaatctagacaaaaaaggaaggaatcgaaccccccaaagctggtttcaagccaaccccatggcctccatgactttttcaaaaaggtattagaaaaaccatttcataactttgtcaaagttaaattataggctaaatcctatatatcttaatggcacatgcagcgcaagtaggtctacaagacgctacttcccctatcatagaagagcttatcacctttcatgatcacgccctcataatcattttccttatctgcttcctagtcctgtatgcccttttcctaacactcacaacaaaactaactaatactaacatctcagacgctcaggaaatagaaaccgtctgaactatcctgcccgccatcatcctagtcctcatcgccctcccatccctacgcatcctttacataacagacgaggtcaacgatccctcccttaccatcaaatcaattggccaccaatggtactgaacctacgagtacaccgactacggcggactaatcttcaactcctacatacttcccccattattcctagaaccaggcgacctgcgactccttgacgttgacaatcgagtagtactcccgattgaagcccccattcgtataataattacatcacaagacgtcttgcactcatgagctgtccccacattaggcttaaaaacagatgcaattcccggacgtctaaaccaaaccactttcaccgctacacgaccgggggtatactacggtcaatgctctgaaatctgtggagcaaaccacagtttcatgcccatcgtcctagaattaattcccctaaaaatctttgaaataggacccgtatttaccctatagcaccccctctaccccctctagagcccactgtaaagctaacttagcattaaccttttaagttaaagattaagagaaccaacacctctttacagtgaaatgccccaactaaatactaccgtatggcccaccataattacccccatactccttacactattcctcatcacccaactaaaaatactaaacacaaactaccacctacctccctcaccaaagcccataaaaataaaaaattataacaaaccctgagaaccaaaatgaacgaaaatctgttcgcttcattcattgcccccacaatcctaggcctacccgccgcagtactgatcattctatttccccctctattgatccccacctccaaatatctcatcaacaaccgactaatcaccacccaacaatgactaatcaaactaacctcaaaacaaatgataaccatacacaacactaaaggacgaacctgatctcttatactagtatccttaatcatttttattgccacaactaacctcctcggactcctgcctcactcatttacaccaaccacccaactatctataaacctagccatggccatccccttatgagcgggcgcagtgattataggctttcgctctaagattaaaaatgccctagcccacttcttaccacaaggcacacctacaccccttatccccatactagttattatcgaaaccatcagcctactcattcaaccaatagccctagccgtacgcctaaccgctaacattactgcaggccacctactcatgcacctaattggaagcgccaccctagcaatatcaaccattaaccttccctctacacttatcatcttcacaattctaattctactgactaccctagaaatcgctgtcgccttaatccaagcctacgttttcacacttctagtaagcctctacctgcacgacaacacataatgacccaccaatcacatgcctatcatatagtaaaacccagcccatgacccctaacaggggccctctcagccctcctaatgacctccggcctagccatgtgatttcacttccactccataacgctcctcatactaggcctactaaccaacacactaaccatataccaatgatggcgcgatgtaacacgagaaagcacataccaaggccaccacacaccacctgtccaaaaaggccttcgatacgggataatcctatttattacctcagaagtttttttcttcgcaggatttttctgagccttttaccactccagcctagcccctaccccccaattaggagggcactggcccccaacaggcatcaccccgctaaatcccctagaagtcccactcctaaacacatccgtattactcgcatcaggagtatcaatcacctgagctcaccatagtctaatagaaaacaaccgaaaccaaataattcaagcactgcttattacaattttactgggtctctattttaccctcctacaagcctcagagtacttcgagtctcccttcaccatttccgacggcatctacggctcaacattttttgtagccacaggcttccacggacttcacgtcattattggctcaactttcctcactatctgcttcatccgccaactaatatttcactttacatccaaacatcactttggcttcgaagccgccgcctgatactggcattttgtagatgtggtttgactatttctgtatgtctccatctattgatgagggtcttactcttttagtataaatagtaccgttaacttccaattaactagttttgacaacattcaaaaaagagtaataaacttcgccttaattttaataatcaacaccctcctagccttactactaataattattacattttgactaccacaactcaacggctacatagaaaaatccaccccttacgagtgcggcttcgaccctatatcccccgcccgcgtccctttctccataaaattcttcttagtagctattaccttcttattatttgatctagaaattgccctccttttacccctaccatgagccctacaaacaactaacctgccactaatagttatgtcatccctcttattaatcatcatcctagccctaagtctggcctatgagtgactacaaaaaggattagactgaaccgaattggtatatagtttaaacaaaacgaatgatttcgactcattaaattatgataatcatatttaccaaatgcccctcatttacataaatattatactagcatttaccatctcacttctaggaatactagtatatcgctcacacctcatatcctccctactatgcctagaaggaataatactatcgctgttcattatagctactctcataaccctcaacacccactccctcttagccaatattgtgcctattgccatactagtctttgccgcctgcgaagcagcggtgggcctagccctactagtctcaatctccaacacatatggcctagactacgtacataacctaaacctactccaatgctaaaactaatcgtcccaacaattatattactaccactgacatgactttccaaaaaacacataatttgaatcaacacaaccacccacagcctaattattagcatcatccctctactattttttaaccaaatcaacaacaacctatttagctgttccccaaccttttcctccgaccccctaacaacccccctcctaatactaactacctgactcctacccctcacaatcatggcaagccaacgccacttatccagtgaaccactatcacgaaaaaaactctacctctctatactaatctccctacaaatctccttaattataacattcacagccacagaactaatcatattttatatcttcttcgaaaccacacttatccccaccttggctatcatcacccgatgaggcaaccagccagaacgcctgaacgcaggcacatacttcctattctacaccctagtaggctcccttcccctactcatcgcactaatttacactcacaacaccctaggctcactaaacattctactactcactctcactgcccaagaactatcaaactcctgagccaacaacttaatatgactagcttacacaatagcttttatagtaaagatacctctttacggactccacttatgactccctaaagcccatgtcgaagcccccatcgctgggtcaatagtacttgccgcagtactcttaaaactaggcggctatggtataatacgcctcacactcattctcaaccccctgacaaaacacatagcctaccccttccttgtactatccctatgaggcataattataacaagctccatctgcctacgacaaacagacctaaaatcgctcattgcatactcttcaatcagccacatagccctcgtagtaacagccattctcatccaaactccctgaagcttcaccggcgcagtcattctcataatcgcccacggacttacatcctcattactattctgcctagcaaactcaaactacgaacgcactcacagtcgcatcataatcctctctcaaggacttcaaactctactcccactaatagctttttgatgacttctagcaagcctcgctaacctcgccttaccccccactattaacctactgggagaactctctgtgctagtaaccacgttctcctgatcaaatatcactctcctacttacgggactcaacatactagtcacagccctatactccctctacatatttaccacaacacaatggggctcactcacccaccacattaacaacataaaaccctcattcacacgagaaaacaccctcatgttcatacacctatcccccattctcctcctatccctcaaccccgacatcattaccgggttttcctcttgtaaatatagtttaaccaaaacatcagattgtgaatctgacaacagaggcttacgaccccttatttaccgagaaagctcacaagaactgctaactcatgcccccatgtctaacaacatggctttctcaacttttaaaggataacagctatccattggtcttaggccccaaaaattttggtgcaactccaaataaaagtaataaccatgcacactactataaccaccctaaccctgacttccctaattccccccatccttaccaccctcgttaaccccaacaaaaaaaactcatacccccattatgtaaaatccattgtcgcatccacctttattatcagtctcttccccacaacaatattcatgtgcctagaccaagaagttattatctcgaactgacactgagccacaacccaaacaacccagctctccctaagcttcaaactagactacttctccataatattcatccctgtagcattgttcgttacatggtccatcatagaattctcactgtgatatataaactcagacccaaacattaatcagttcttcaaatatctactcattttcctaattaccatactaatcttagttaccgctaacaacctattccaactgttcatcggctgagagggcgtaggaattatatccttcttgctcatcagttgatgatacgcccgagcagatgccaacacagcagccattcaagcaatcctatacaaccgtatcggcgatatcggtttcatcctcgccttagcatgatttatcctacactccaactcatgagacccacaacaaatagcccttctaaacgctaatccaagcctcaccccactactaggcctcctcctagcagcagcaggcaaatcagcccaattaggtctccacccctgactcccctcagccatagaaggccccaccccagtctcagccctactccactcaagcactatagttgtagcaggaatcttcttactcatccgcttccaccccctagcagaaaatagcccactaatccaaactctaacactatgcttaggcgctatcaccactctgttcgcagcagtctgcgcccttacacaaaatgacatcaaaaaaatcgtagccttctccacttcaagtcagctaggactcataatagttacaatcggcatcaaccaaccacacctagcattcctgcacatctgtacccacgccttcttcaaagccatactatttatgtgctccgggtccatcatccacaaccttaacaatgaacaagatattcgaaaaataggaggactactcaaaaccatacctctcacttcaacctccctcaccattggcagcctagcattagcaggaatacctttcctcacaggtttctactccaaagaccacatcatcgaaaccgcaaacatatcatacacaaacgcctgagccctatctattactctcatcgctacctccctgacaagcgcctatagcactcgaataattcttctcaccctaacaggtcaacctcgcttccccacccttactaacattaacgaaaataaccccaccctactaaaccccattaaacgcctggcagccggaagcctattcgcaggatttctcattactaacaacatttcccccgcatcccccttccaaacaacaatccccctctacctaaaactcacagccctcgctgtcactttcctaggacttctaacagccctagacctcaactacctaaccaacaaacttaaaataaaatccccactatgcacattttatttctccaacatactcggattctaccctagcatcacacaccgcacaatcccctatttaggccttcttacgagccaaaacctgcccctactcctcctagacctaacctgactagaaaagctattacctaaaacaatttcacagcaccaaatctccacctccatcatcacctcaacccaaaaaggcataattaaactttacttcctctctttcttcttcccactcatcctaaccctactcctaatcacataacctattcccccgagcaatctcaattacaatatatacaccaacaaacaatgttcaaccagtaactactactaatcaacgcccataatcatacaaagcccccgcaccaataggatcctcccgaatcaaccctgacccctctccttcataaattattcagcttcctacactattaaagtttaccacaaccaccaccccatcatactctttcacccacagcaccaatcctacctccatcgctaaccccactaaaacactcaccaagacctcaacccctgacccccatgcctcaggatactcctcaatagccatcgctgtagtatatccaaagacaaccatcattccccctaaataaattaaaaaaactattaaacccatataacctcccccaaaattcagaataataacacacccgaccacaccgctaacaatcaatactaaacccccataaataggagaaggcttagaagaaaaccccacaaaccccattactaaacccacactcaacagaaacaaagcatacatcattattctcgcacggactacaaccacgaccaatgatatgaaaaaccatcgttgtatttcaactacaagaacaccaatgaccccaatacgcaaaattaaccccctaataaaattaattaaccactcattcatcgacctccccaccccatccaacatctccgcatgatgaaacttcggctcactccttggcgcctgcctgatcctccaaatcaccacaggactattcctagccatgcactactcaccagacgcctcaaccgccttttcatcaatcgcccacatcactcgagacgtaaattatggctgaatcatccgctaccttcacgccaatggcgcctcaatattctttatctgcctcttcctacacatcgggcgaggcctatattacggatcatttctctactcagaaacctgaaacatcggcattatcctcctgctcgcaactatagcaacagccttcataggctatgtcctcccgtgaggccaaatatcattctgaggggccacagtaattacaaacttactatccgccatcccatacattgggacagacctagttcaatgaatctgaggaggctactcagtagacagtcccaccctcacacgattctttacctttcacttcatcttgcccttcattattgcagccctagcagcactccacctcctattcttgcacgaaacgggatcaaacaaccccctaggaatcacctcccattccgataaaatcaccttccacccttactacacaatcaaagacgccctcggcttacttctcttccttctctccttaatgacattaacactattctcaccagacctcctaggcgacccagacaattataccctagccaaccccttaaacacccctccccacatcaagcccgaatgatatttcctattcgcctacacaattctccgatccgtccctaacaaactaggaggcgtccttgccctattactatccatcctcatcctagcaataatccccatcctccatatatccaaacaacaaagcataatatttcgcccactaagccaatcactttattgactcctagccgcagacctcctcattctaacctgaatcggaggacaaccagtaagctacccctttaccatcattggacaagtagcatccgtactatacttcacaacaatcctaatcctaataccaactatctccctaattgaaaacaaaatactcaaatggccctgtccttgtagtataaactaatacaccagtcttgtaaaccggagatgaaaacctttttccaaggacaaatcagagaaaaagtctttaactccaccattagcacccaaagctaagattctaatttaaactattctctgttctttcatggggaagcagatttgggtaccacccaagtattgactcacccatcaacaaccgctatgtatttcgtacattactgccagccaccatgaatattgtacggtaccataaatacttgaccacctgtagtacataaaaacccaatccacatcaaaaccccctccccatgcttacaagcaagtacagcaatcaaccttcaactatcacacatcaactgcaactccaaagccacccctcacccactaggataccaacaaacctacctacccttaacagtacatagtacataaagccatttaccgtacatagcacattacagtcaaatcccttctcgtccccatggatgacccccctcagataggggtcccttgaccaccatcctccgtgaaatcaatatcccgcacaagagtgctactctcctcgctccgggcccataacacttgggggtagctaaagtgaactgtatccgacatctggttcctacttcagggccataaagcctaaatagcccacacgttccccttaaataagacatcacgatg

SEQ ID NO: 351 - DNA, 16568 bp, Homo sapiens mitochondrial
  3106: "n" refers to a nucleotide at position 3107 of the Cambridge Reference Sequence (CRS, Anderson et al. 1981 Nature 290:457-465), later determined to be absent from the human mtDNA sequence according to the revised CRS (rCRS, Andrews et al. 1999 Nature Genetics 23:147); "n" therefore represents a single nucleotide deletion at a position corresponding to nucleotide 3107 of SEQ ID NO:1 as provided herein.
gatcacaggtctatcaccctattaaccactcacgggagctctccatgcatttggtattttcgtctggggggtgtgcacgcgatagcattgcgagacgctggagccggagcaccctatgtcgcagtatctgtctttgattcctgcctcattctattatttatcgcacctacgttcaatattacaggcgaacatacttactaaagtgtgttaattaattaatgcttgtaggacataataataacaattgaatgtctgcacagccgctttccacacagacatcataacaaaaaatttccaccaaaccccccctcccccgccttctggccacagcacttaaacacatctctgccaaaccccaaaaacaaagaaccctaacaccagcctaaccagatttcaaattttatcttttggcggtatgcacttttaacagtcaccccccaactaacacattattttcccctcccactcccatactactaatctcatcaatacaacccccgcccatcctacccagcacacacaccgctgctaaccccataccccgaaccaaccaaaccccaaagacaccccccacagtttatgtagcttacctcctcaaagcaatacactgaaaatgtttagacgggctcacatcaccccataaacaaataggtttggtcctagcctttctattagctcttagtaagattacacatgcaagcatccccattccagtgagttcaccctctaaatcaccacgatcaaaagggacaagcatcaagcacgcagcaatgcagctcaaaacgcttagcctagccacacccccacgggaaacagcagtgattaacctttagcaataaacgaaagtttaactaagctatactaaccccagggttggtcaatttcgtgccagccaccgcggtcacacgattaacccaagtcaatagaagccggcgtaaagagtgttttagatcaccccctccccaataaagctaaaactcacctgagttgtaaaaaactccagttgacacaaaatagactacgaaagtggctttaacatatctgaacacacaatagctaagacccaaactgggattagataccccactatgcttagccctaaacctcaacagttaaatcaacaaaactgctcgccagaacactacgagccacagcttaaaactcaaaggacctggcggtgcttcatatccctctagaggagcctgttctgtaatcgataaaccccgatcaacctcaccacctcttgctcagcctatataccgccatcttcagcaaaccctgatgaaggctacaaagtaagcgcaagtacccacgtaaagacgttaggtcaaggtgtagcccatgaggtggcaagaaatgggctacattttctaccccagaaaactacgatagcccttatgaaacttaagggtcgaaggtggatttagcagtaaactgagagtagagtgcttagttgaacagggccctgaagcgcgtacacaccgcccgtcaccctcctcaagtatacttcaaaggacatttaactaaaacccctacgcatttatatagaggagacaagtcgtaacatggtaagtgtactggaaagtgcacttggacgaaccagagtgtagcttaacacaaagcacccaacttacacttaggagatttcaacttaacttgaccgctctgagctaaacctagccccaaacccactccaccttactaccagacaaccttagccaaaccatttacccaaataaagtataggcgatagaaattgaaacctggcgcaatagatatagtaccgcaagggaaagatgaaaaattataaccaagcataatatagcaaggactaacccctataccttctgcataatgaattaactagaaataactttgcaaggagaaccaaagctaagacccccgaaaccagacgagctacctaagaacagctaaaagagcacacccgtctatgtagcaaaatagtgggaagatttataggtagaggcgacaaacctaccgagcctggtgatagctggttgtccaagatagaatcttagttcaactttaaatttgcccacagaaccctctaaatccccttgtaaatttaactgttagtccaaagaggaacagctctttggacactaggaaaaaaccttgtagagagagtaaaaaatttaacacccatagtaggcctaaaagcagccaccaattaagaaagcgttcaagctcaacacccactacctaaaaaatcccaaacatataactgaactcctcacacccaattggaccaatctatcaccctatagaagaactaatgttagtataagtaacatgaaaacattctcctccgcataagcctgcgtcagattaaaacactgaactgacaattaacagcccaatatctacaatcaaccaacaagtcattattaccctcactgtcaacccaacacaggcatgctcataaggaaaggttaaaaaaagtaaaaggaactcggcaaatcttaccccgcctgtttaccaaaaacatcacctctagcatcaccagtattagaggcaccgcctgcccagtgacacatgtttaacggccgcggtaccctaaccgtgcaaaggtagcataatcacttgttccttaaatagggacctgtatgaatggctccacgagggttcagctgtctcttacttttaaccagtgaaattgacctgcccgtgaagaggcgggcatgacacagcaagacgagaagaccctatggagctttaatttattaatgcaaacagtacctaacaaacccacaggtcctaaactaccaaacctgcattaaaaatttcggttggggcgacctcggagcagaacccaacctccgagcagtacatgctaagacttcaccagtcaaagcgaactactatactcaattgatccaataacttgaccaacggaacaagttaccctagggataacagcgcaatcctattctagagtccatatcaacaatagggtttacgacctcgatgttggatcaggacatcccgatggtgcagccgctattaaaggttcgtttgttcaacgattaaagtcctacgtgatctgagttcagaccggagtaatccaggtcggtttctatctacnttcaaattcctccctgtacgaaaggacaagagaaataaggcctacttcacaaagcgccttcccccgtaaatgatatcatctcaacttagtattatacccacacccacccaagaacagggtttgttaagatggcagagcccggtaatcgcataaaacttaaaactttacagtcagaggttcaattcctcttcttaacaacatacccatggccaacctcctactcctcattgtacccattctaatcgcaatggcattcctaatgcttaccgaacgaaaaattctaggctatatacaactacgcaaaggccccaacgttgtaggcccctacgggctactacaacccttcgctgacgccataaaactcttcaccaaagagcccctaaaacccgccacatctaccatcaccctctacatcaccgccccgaccttagctctcaccatcgctcttctactatgaacccccctccccatacccaaccccctggtcaacctcaacctaggcctcctatttattctagccacctctagcctagccgtttactcaatcctctgatcagggtgagcatcaaactcaaactacgccctgatcggcgcactgcgagcagtagcccaaacaatctcatatgaagtcaccctagccatcattctactatcaacattactaataagtggctcctttaacctctccacccttatcacaacacaagaacacctctgattactcctgccatcatgacccttggccataatatgatttatctccacactagcagagaccaaccgaacccccttcgaccttgccgaaggggagtccgaactagtctcaggcttcaacatcgaatacgccgcaggccccttcgccctattcttcatagccgaatacacaaacattattataataaacaccctcaccactacaatcttcctaggaacaacatatgacgcactctcccctgaactctacacaacatattttgtcaccaagaccctacttctaacctccctgttcttatgaattcgaacagcatacccccgattccgctacgaccaactcatacacctcctatgaaaaaacttcctaccactcaccctagcattacttatatgacatgtctccatacccattacaatctccagcattccccctcaaacctaagaaatatgtctgataaaagagttactttgatagagtaaataataggagcttaaacccccttatttctaggactatgagaatcgaacccatccctgagaatccaaaattctccgtgccacctatcacaccccatcctaaagtaaggtcagctaaataagctatcgggcccataccccgaaaatgttggttatacccttcccgtactaattaatcccctggcccaacccgtcatctactctaccatctttgcaggcacactcatcacagcgctaagctcgcactgattttttacctgagtaggcctagaaataaacatgctagcttttattccagttctaaccaaaaaaataaaccctcgttccacagaagctgccatcaagtatttcctcacgcaagcaaccgcatccataatccttctaatagctatcctcttcaacaatatactctccggacaatgaaccataaccaatactaccaatcaatactcatcattaataatcataatggctatagcaataaaactaggaatagccccctttcacttctgagtcccagaggttacccaaggcacccctctgacatccggcctgcttcttctcacatgacaaaaactagcccccatctcaatcatataccaaatctctccctcactagacgtaagccttctcctcactctctcaatcttatccatcatagcaggcagttgaggtggattaaaccaaacccagctacgcaaaatcttagcatactcctcaattacccacataggatgaataatagcagttctaccgtacaaccctaacataaccattcttaatttaactatttatattatcctaactactaccgcattcctactactcaacttaaactccagcaccacgaccctactactatctcgcacctgaaacaagctaacatgactaacacccttaattccatccaccctcctctccctaggaggcctgcccccgctaaccggctttttgcccaaatgggccattatcgaagaattcacaaaaaacaatagcctcatcatccccaccatcatagccaccatcaccctccttaacctctacttctacctacgcctaatctactccacctcaatcacactactccccatatctaacaacgtaaaaataaaatgacagtttgaacatacaaaacccaccccattcctccccacactcatcgcccttaccacgctactcctacctatctccccttttatactaataatcttatagaaatttaggttaaatacagaccaagagccttcaaagccctcagtaagttgcaatacttaatttctgtaacagctaaggactgcaaaaccccactctgcatcaactgaacgcaaatcagccactttaattaagctaagcccttactagaccaatgggacttaaacccacaaacacttagttaacagctaagcaccctaatcaactggcttcaatctacttctcccgccgccgggaaaaaaggcgggagaagccccggcaggtttgaagctgcttcttcgaatttgcaattcaatatgaaaatcacctcggagctggtaaaaagaggcctaacccctgtctttagatttacagtccaatgcttcactcagccattttacctcacccccactgatgttcgccgaccgttgactattctctacaaaccacaaagacattggaacactatacctattattcggcgcatgagctggagtcctaggcacagctctaagcctccttattcgagccgagctaggccagccaggcaaccttctaggtaacgaccacatctacaacgttatcgtcacagcccatgcatttgtaataatcttcttcatagtaatacccatcataatcggaggctttggcaactgactagttcccctaataatcggtgcccccgatatggcgtttccccgcataaacaacataagcttctgactcttacctccctctctcctactcctgctcgcatctgctatagtggaggccggagcaggaacaggttgaacagtctaccctcccttagcagggaactactcccaccctggagcctccgtagacctaaccatcttctccttacacctagcaggtgtctcctctatcttaggggccatcaatttcatcacaacaattatcaatataaaaccccctgccataacccaataccaaacgcccctcttcgtctgatccgtcctaatcacagcagtcctacttctcctatctctcccagtcctagctgctggcatcactatactactaacagaccgcaacctcaacaccaccttcttcgaccccgccggaggaggagaccccattctataccaacacctattctgatttttcggtcaccctgaagtttatattcttatcctaccaggcttcggaataatctcccatattgtaacttactactccggaaaaaaagaaccatttggatacataggtatggtctgagctatgatatcaattggcttcctagggtttatcgtgtgagcacaccatatatttacagtaggaatagacgtagacacacgagcatatttcacctccgctaccataatcatcgctatccccaccggcgtcaaagtatttagctgactcgccacactccacggaagcaatatgaaatgatctgctgcagtgctctgagccctaggattcatctttcttttcaccgtaggtggcctgactggcattgtattagcaaactcatcactagacatcgtactacacgacacgtactacgttgtagctcacttccactatgtcctatcaataggagctgtatttgccatcataggaggcttcattcactgatttcccctattctcaggctacaccctagaccaaacctacgccaaaatccatttcactatcatattcatcggcgtaaatctaactttcttcccacaacactttctcggcctatccggaatgccccgacgttactcggactaccccgatgcatacaccacatgaaacatcctatcatctgtaggctcattcatttctctaacagcagtaatattaataattttcatgatttgagaagccttcgcttcgaagcgaaaagtcctaatagtagaagaaccctccataaacctggagtgactatatggatgccccccaccctaccacacattcgaagaacccgtatacataaaatctagacaaaaaaggaaggaatcgaaccccccaaagctggtttcaagccaaccccatggcctccatgactttttcaaaaaggtattagaaaaaccatttcataactttgtcaaagttaaattataggctaaatcctatatatcttaatggcacatgcagcgcaagtaggtctacaagacgctacttcccctatcatagaagagcttatcacctttcatgatcacgccctcataatcattttccttatctgcttcctagtcctgtatgcccttttcctaacactcacaacaaaactaactaatactaacatctcagacgctcaggaaatagaaaccgtctgaactatcctgcccgccatcatcctagtcctcatcgccctcccatccctacgcatcctttacataacagacgaggtcaacgatccctcccttaccatcaaatcaattggccaccaatggtactgaacctacgagtacaccgactacggcggactaatcttcaactcctacatacttcccccattattcctagaaccaggcgacctgcgactccttgacgttgacaatcgagtagtactcccgattgaagcccccattcgtataataattacatcacaagacgtcttgcactcatgagctgtccccacattaggcttaaaaacagatgcaattcccggacgtctaaaccaaaccactttcaccgctacacgaccgggggtatactacggtcaatgctctgaaatctgtggagcaaaccacagtttcatgcccatcgtcctagaattaattcccctaaaaatctttgaaatagggcccgtatttaccctatagcaccccctctaccccctctagagcccactgtaaagctaacttagcattaaccttttaagttaaagattaagagaaccaacacctctttacagtgaaatgccccaactaaatactaccgtatggcccaccataattacccccatactccttacactattcctcatcacccaactaaaaatattaaacacaaactaccacctacctccctcaccaaagcccataaaaataaaaaattataacaaaccctgagaaccaaaatgaacgaaaatctgttcgcttcattcattgcccccacaatcctaggcctacccgccgcagtactgatcattctatttccccctctattgatccccacctccaaatatctcatcaacaaccgactaatcaccacccaacaatgactaatcaaactaacctcaaaacaaataataaccatacacaacactaaaggacgaacctgatctcttatactagtatccttaatcatttttattgccacaactaacctcctcggactcctgcctcactcatttacaccaaccacccaactatctataaacctagccatggccatccccttatgagcgggcgcagtgattataggctttcgctctaagattaaaaatgccctagcccacttcttaccacaaggcacacctacaccccttatccccatactagttattatcgaaaccatcagcctactcattcaaccaatagccctggccgtacgcctaaccgctaacattactgcaggccacctactcatgcacctaattggaagcgccaccctagcaatatcaaccattaaccttccctctacacttatcatcttcacaattctaattctactgactatcctagaaatcactgtcgccttaatccaagcctacgttttcacacttctagtaagcctctacctgcacgacaacacataatgacccaccaatcacatgcctatcatatagtaaaacccagcccatgacccctaacaggggccctctcagccctcctaatgacctccggcctagccatgtgatttcacttccactccataacgctcctcatactaggcctactaaccaacacactaaccatataccaatgatggcgcgatgtaacacgagaaagcacataccaaggccaccacacaccacctgtccaaaaaggccttcgatacgggataatcctatttattacctcagaagtttttttcttcgcaggatttttctgagccttttaccactccagcctagcccctaccccccaattaggagggcactggcccccaacaggcatcaccccgctaaatcccctagaagtcccactcctaaacacatccgtattactcgcatcaggagtatcaatcacctgagctcaccatagtctaatagaaaacaaccgaaaccaaataattcaagcactgcttattacaattttactgggtctctattttaccctcctacaagcctcagagtacttcgagtctcccttcaccatttccgacggcatctacggctcaacattttttgtagccacaggcttccacggacttcacgtcattattggctcaactttcctcactatctgcttcatccgccaactaatatttcactttacatccaaacatcactttggcttcgaagccgccgcctgatactggcattttgtagatgtggtttgactatttctgtatgtctccatctattgatgagggtcttactcttttagtataaatagtaccgttaacttccaattaactagttttgacaacattcaaaaaagagtaataaacttcgccttaattttaataatcaacaccctcctagccttactactaataattattacattttgactaccacaactcaacggctacatagaaaaatccaccccttacgagtgcggcttcgaccctatatcccccgcccgcgtccctttctccataaaattcttcttagtagctattaccttcttattatttgatctagaaattgccctccttttacccctaccatgagccctacaaacaactaacctgccactaatagttatgtcatccctcttattaatcatcatcctagccctaagtctggcctatgagtgactacaaaaaggattagactgaaccgaattggtatatagtttaaacaaaacgaatgatttcgactcattaaattatgataatcatatctaccaaatgcccctcatttacataaatattatactagcatttaccatctcacttctaggaatactagtatatcgctcacacctcatatcctccctactatgcctagaaggaataatactatcgctgttcattatagctactctcataaccctcaacacccactccctcttagccaatattgtgcctattgccatactagtctttgccgcctgcgaagcagcggtgggcctagccctactagtctcaatctccaacacatatggcctagactacgtacataacctaaacctactccaatgctaaaactaatcgtcccaacaattatattactaccactgacatgactttccaaaaaacacataatttgaatcaacacaaccacccacagcctaattattagcatcatccctctactattttttaaccaaatcaacaacaacctatttagctgttccccaaccttttcctccgaccccctaacaacccccctcctaatactaactacctgactcctacccctcacaatcatggcaagccaacgccacttatccagtgaaccactatcacgaaaaaaactctacctctctatactaatctccctacaaatctccttaattataacattcacagccacagaactaatcatattttatatcttcttcgaaaccacacttatccccaccttggctatcatcacccgatgaggcaaccagccagaacgcctgaacgcaggcacatacttcctattctacaccctagtaggctcccttcccctactcatcgcactgatttacactcacaacaccctaggctcactaaacattctactactcactctcactgcccaagaactatcaaactcctgagccaacaacttaatatgactagcttacacaatagcttttatagtaaagatacctctttacggactccacttatgactccctaaagcccatgtcgaagcccccatcgctgggtcaatagtacttgccgcagtactcttaaaactaggcggctatggtataatacgcctcacactcattctcaaccccctgacaaaacacatagcctaccccttccttgtactatccctatgaggcataattataacaagctccatctgcctacgacaaacagacctaaaatcgctcattgcatactcttcaatcagccacatagccctcgtagtaacagccattctcatccaaaccccctgaagcttcaccggcgcagtcattctcataatcgcccacggacttacatcctcattactattctgcctagcaaactcaaactacgaacgcactcacagtcgcatcataatcctctctcaaggacttcaaactctgctcccactaatagctttttgatgacttctagcaagcctcgctaacctcgccttaccccccactattaacctactaggagaactctctgtgctagtaaccacgttctcctgatcaaatatcactctcctacttacaggactcaacatactagtcacagccctatactccctctacatatttaccacaacacaatggggctcactcacccaccacattaacaacataaaaccctcattcacacgagaaaacaccctcatgttcatacacctatcccccattctcctcctatccctcaaccccgacatcattaccgggttttcctcttgtaaatatagtttaaccaaaacatcagattgtgaatctgacaacagaggcttacgaccccttatttaccgagaaagctcacaagaactgctaactcatgcccccatgtctaacaacatggctttctcaacttttaaaggataacagctatccattggtcttaggccccaaaaattttggtgcaactccaaataaaagtaataaccatgcacactactataaccaccctaaccctgacttccctaattccccccatccttaccaccctcgttaaccctaacaaaaaaaactcatacccccattatgtaaaatccattgtcgcatccacctttattatcagtctcttccccacaacaatattcatgtgcctagaccaagaagttattatctcgaactgacactgagccacaacccaaacaacccagctctccctaagcttcaaactagactacttctccataatattcatccctgtagcattgttcgttacatggtccatcatagaattctcactgtgatatataaactcagacccaaacattaatcagttcttcaaatatctactcatcttcctaattaccatactaatcttagttaccgctaacaacctattccaactgttcatcggctgagagggcgtaggaattatatccttcttgctcatcagttgatgatacgcccgagcagatgccaacacagcagccattcaagcaatcctatacaaccgtatcggcgatatcggtttcatcctcgccttagcatgatttatcctacactccaactcatgagacccacaacaaatagcccttctaaacgctaatccaagcctcaccccactactaggcctcctcctagcagcagcaggcaaatcagcccaattaggtctccacccctgactcccctcagccatagaaggccccaccccagtctcagccctactccactcaagcactatagttgtagcaggaatcttcttactcatccgcttccaccccctagcagaaaatagcccactaatccaaactctaacactatgcttaggcgctatcaccactctgttcgcagcagtctgcgcccttacacaaaatgacatcaaaaaaatcgtagccttctccacttcaagtcaactaggactcataatagttacaatcggcatcaaccaaccacacctagcattcctgcacatctgtacccacgccttcttcaaagccatactatttatgtgctccggatccatcatccacaaccttaacaatgaacaagatattcgaaaaataggaggactactcaaaaccatacctctcacttcaacctccctcaccattggcagcctagcattagcaggaatacctttcctcacaggtttctactccaaagaccacatcatcgaaaccgcaaacatatcatacacaaacgcctgagccctatctattactctcatcgctacctccctgacaagcgcctatagcactcgaataattcttctcaccctaacaggtcaacctcgcttccccacccttactaacattaacgaaaataaccccaccctactaaaccccattaaacgcctggcagccggaagcctattcgcaggatttctcattactaacaacatttcccccgcatcccccttccaaacaacaatccccctctacctaaaactcacagccctcgctgtcactttcctaggacttctaacagccctagacctcaactacctaaccaacaaacttaaaataaaatccccactatgcacattttatttctccaacatactcggattctaccctagcatcacacaccgcacaatcccctatctaggccttcttacgagccaaaacctgcccctactcctcctagacctaacctgactagaaaagctattacctaaaacaatttcacagcaccaaatctccacctccatcatcacctcaacccaaaaaggcataattaaactttacttcctctctttcttcttcccactcatcctaaccctactcctaatcacataacctattcccccgagcaatctcaattacaatatatacaccaacaaacaatgttcaaccagtaactactactaatcaacgcccatagtcatacaaagcccccgcaccaataggatcctcccgaatcaaccctgacccctctccttcataaattattcagcttcctacactattaaagtttaccacaaccaccaccccatcatactctttcacccacagcaccaatcctacctccatcgctaaccccactaaaacactcaccaagacctcaacccctgacccccatgcctcaggatactcctcaatagccatcgctgtagtatatccaaagacaaccatcattccccctaaataaattaaaaaaactattaaacccatataacctcccccaaaattcagaataataacacacccgaccacaccgctaacaatcaatactaaacccccataaataggagaaggcttagaagaaaaccccacaaaccccattactaaacccacactcaacagaaacaaagcatacatcattattctcgcacggactacaaccacgaccaatgatatgaaaaaccatcgttgtatttcaactacaagaacaccaatgaccccaatacgcaaaattaaccccctaataaaattaattaaccactcattcatcgacctccccaccccatccaacatctccgcatgatgaaacttcggctcactccttggcgcctgcctgatcctccaaatcaccacaggactattcctagccatacactactcaccagacgcctcaaccgccttttcatcaatcgcccacatcactcgagacgtaaattatggctgaatcatccgctaccttcacgccaatggcgcctcaatattctttatctgcctcttcctacacatcgggcgaggcctatattacggatcatttctctactcagaaacctgaaacatcggcattatcctcctgcttgcaactatagcaacagccttcataggctatgtcctcccgtgaggccaaatatcattctgaggggccacagtaattacaaacttactatccgccatcccatacattgggacagacctagttcaatgaatctgaggaggctactcagtagacagtcccaccctcacacgattctttacctttcacttcatcttgcccttcattattgcagccctagcagcactccacctcctattcttgcacgaaacgggatcaaacaaccccctaggaatcacctcccattccgataaaatcaccttccacccttactacacaatcaaagacgccctcggcttacttctcttcattctctccttaatgacattaacactattctcaccagacctcctaggcgacccagacaattataccctagccaaccccttaaacacccctccccacatcaagcccgaatgatatttcctattcgcctacacaattctccgatccgtccctaacaagctaggaggcgtccttgccctattactatccatcctcatcctagcaataatccccatcctccatatatccaaacaacaaagcataatatttcgcccactaagccaatcactttattgactcctagccgcagacctcctcattctaacctgaatcggaggacaaccagtaagctacccttttaccatcattggacaagtagcatccgtactatacttcacaacaatcctaatcctaataccaactatctccctaattgaaaacaaaatactcaaatgggcctgtccttgtagtataaactaatacaccagtcttgtaaaccgaagatgaaaacctttttccaaggacaaatcagagaaaaagtctttaactccaccattagcacccaaagctaagattctaatttaaactattctctgttctttcatggggaagcagatttgggtaccacccaagtattgactcacccatcaacaaccgctatgtatttcgtacattactgccagccaccatgaatattgcacggtaccataaatacttgaccacctatagtacataaaaacccaatccacatcaaaaccccctccccatgcttacaagcaagtacagcaatcaaccctcaactatcacacatcaactgcaactccaaagccacccctcatccactaggataccaacaaacctacccatctttaacagtacatagtacataaagccatttaccgtacatagcacattacagtcaaatcccttctcgtccccatggatgacccccctcagataggggtcccttgaccaccatcctccgtgaaatcaatatcccgcacaagagtgctactctcctcgctccgggcccataacacttgggggtagctaaagtgaactgtatccgacatctggttcctacttcagggccataaagcctaaatagcccacacgttccccttaaataagacatcacgatg

SEQ ID NO: 352 - DNA, 16571 bp, Homo sapiens mitochondrial
  3109: "n" refers to a nucleotide at position 3107 of the Cambridge Reference Sequence (CRS, Anderson et al. 1981 Nature 290:457-465), later determined to be absent from the human mtDNA sequence according to the revised CRS (rCRS, Andrews et al. 1999 Nature Genetics 23:147); "n" therefore represents a single nucleotide deletion at a position corresponding to nucleotide 3107 of SEQ ID NO:1 as provided herein.
gatcacaggtctatcaccctattaaccactcacgggagctctccatgcatttggtattttcgtctggggggtatgcacgcgatagcattgcgagacgctggagccggagcaccctatgtcgcagtatctgtctttgattcctgcctcatcccattatttatcgcacctacgttcaatattacaggcgaacatacttactaaagtgtgttaattaattaatgcttgtaggacataataataacaattgaatgtctgcacagccgctttccacacagacatcataacaaaaaatttccaccaaaccccccctcccccccgcttctggccacagcacttaaacacatctctgccaaaccccaaaaacaaagaaccctaacaccagcctaaccagatttcaaattttatcttttggcggtatgcacttttaacagtcaccccccaactaacacattattttcccctcccactcccatactactaatctcatcaatacaacccccgcccatcctacccagcacacacacaccgctgctaaccccataccccgaaccaaccaaaccccaaagacaccccccacagtttatgtagcttacctcctcaaagcaatacactgaaaatgtttagacgggctcacatcaccccataaacaaataggtttggtcctagcctttctattagctcttagtaagattacacatgcaagcatccccgttccagtgagttcaccctctaaatcaccacgatcaaaagggacaagcatcaagcacgcagcaatgcagctcaaaacgcttagcctagccacacccccacgggaaacagcagtgattaacctttagcaataaacgaaagtttaactaagctatactaaccccagggttggtcaatttcgtgccagccaccgcggtcacacgattaacccaagtcaatagaagccggcgtaaagagtgttttagatcaccccctccccaataaagctaaaactcacctgagttgtaaaaaactccagttgacacaaaatagactacgaaagtggctttaacatatctgaacacacaatagctaagacccaaactgggattagataccccactatgcttagccctaaacctcaacagttaaatcaacaaaactgctcgccagaacactacgagccacagcttaaaactcaaaggacctggcggtgcttcatatccctctagaggagcctgttctgtaatcgataaaccccgatcaacctcaccacctcttgctcagcctatataccgccatcttcagcaaaccctgatgaaggctacaaagtaagcgcaagtacccacgtaaagacgttaggtcaaggtgtagcccatgaggtggcaagaaatgggctacattttctaccccagaaaactacgatagcccttatgaaacttaagggtcgaaggtggatttagcagtaaactgagagtagagtgcttagttgaacagggccctgaagcgcgtacacaccgcccgtcaccctcctcaagtatacttcaaaggacatttaactaaaacccctacgcatttatatagaggagacaagtcgtaacatggtaagtgtactggaaagtgcacttggacgaaccagagtgtagcttaacacaaagcacccaacttacacttaggagatttcaacttaacttgaccgctctgagctaaacctagccccaaacccactccaccttactaccagacaaccttagccaaaccatttacccaaataaagtataggcgatagaaattgaaacctggcgcaatagatatagtaccgcaagggaaagatgaaaaattataaccaagcataatatagcaaggactaacccctataccttctgcataatgaattaactagaaataactttgcaaggagagccaaagctaagacccccgaaaccagacgagctacctaagaacagctaaaagagcacacccgtctatgtagcaaaatagtgggaagatttataggtagaggcgacaaacctaccgagcctggtgatagctggttgtccaagatagaatcttagttcaactttaaatttgcccacagaaccctctaaatccccttgtaaatttaactgttagtccaaagaggaacagctctttggacactaggaaaaaaccttgtagagagagtaaaaaatttaacacccatagtaggcctaaaagcagccaccaattaagaaagcgttcaagctcaacacccactacctaaaaaatcccaaacatataactgaactcctcacacccaattggaccaatctatcaccctatagaagaactaatgttagtataagtaacatgaaaacattctcctccgcataagcctgcgtcagattaaaacactgaactgacaattaacagcccaatatctacaatcaaccaacaagtcattattaccctcactgtcaacccaacacaggcatgctcataaggaaaggttaaaaaaagtaaaaggaactcggcaaatcttaccccgcctgtttaccaaaaacatcacctctagcatcaccagtattagaggcaccgcctgcccagtgacacatgtttaacggccgcggtaccctaaccgtgcaaaggtagcataatcacttgttccttaaatagggacctgtatgaatggctccacgagggttcagctgtctcttacttttaaccagtgaaattgacctgcccgtgaagaggcgggcataacacagcaagacgagaagaccctatggagctttaatttattaatgcaaacagtacctaacaaacccacaggtcctaaactaccaaacctgcattaaaaatttcggttggggcgacctcggagcagaacccaacctccgagcagtacatgctaagacttcaccagtcaaagcgaactactatactcaattgatccaataacttgaccaacggaacaagttaccctagggataacagcgcaatcctattctagagtccatatcaacaatagggtttacgacctcgatgttggatcaggacatcccgatggtgcagccgctattaaaggttcgtttgttcaacgattaaagtcctacgtgatctgagttcagaccggagtaatccaggtcggtttctatctacnttcaaattcctccctgtacgaaaggacaagagaaataaggcctacttcacaaagcgccttcccccgtaaatgatatcatctcaacttagtattatacccacacccacccaagaacagggtttgttaagatggcagagcccggtaatcgcataaaacttaaaactttacaatcagaggttcaattcctcttcttaacaacatacccatggccaacctcctactcctcattgtacccattctaatcgcaatggcattcctaatgcttaccgaacgaaaaattctaggctatatacaactacgcaaaggccccaacgttgtaggcccctacgggctactacaacccttcgctgacgccataaaactcttcaccaaagagcccctaaaacccgccacatctaccatcaccctctacatcaccgccccgaccttagctctcaccatcgctcttctactatgaacccccctccccatacccaaccccctggtcaacctcaacctaggcctcctatttattctagccacctctagcctagccgtttactcaatcctctgatcagggtgagcatcaaactcaaactacgccctgatcggcgcactgcgagcagtagcccaaacaatctcatatgaagtcaccctagccatcattctactatcaacattactaataagtggctcctttaacctctccacccttatcacaacacaagaacacctctgattactcctgccatcatgacccttggccataatatgatttatctccacactagcagagaccaaccgaacccccttcgaccttgccgaaggggagtccgaactagtctcaggcttcaacatcgaatacgccgcaggccccttcgccctattcttcatagccgaatacacaaacattattataataaacaccctcaccactacaatcttcctaggaacaacatatgacgcactctcccctgaactctacacaacatattttgtcaccaagaccctacttctaacctccctgttcttatgaattcgaacagcatacccccgattccgctacgaccaactcatacacctcctatgaaaaaacttcctaccactcaccctagcattacttatatgatatgtctccatacccattacaatctccagcattccccctcaaacctaagaaatatgtctgataaaagagttactttgatagagtaaataataggagcttaaacccccttatttctaggactatgagaatcgaacccatccctgagaatccaaaattctccgtgccacctatcacaccccatcctaaagtaaggtcagctaaataagctatcgggcccataccccgaaaatgttggttatacccttcccgtactaattaatcccctggcccaacccgtcatctactctaccatctttgcaggcacactcatcacagcgctaagctcgcactgattttttacctgagtaggcctagaaataaacatgctagcttttattccagttctaaccaaaaaaataaaccctcgttccacagaagctgccatcaagtatttcctcacgcaagcaaccgcatccataatccttctaatagctatcctcttcaacaatatactctccggacaatgaaccataaccaatactaccaatcaatactcatcattaataatcataatggctatagcaataaaactaggaatagccccctttcacttctgagtcccagaggttacccaaggcacccctctgacatccggcctgcttcttctcacatgacaaaaactagcccccatctcaatcatataccaaatctctccctcactaaacgtaagccttctcctcactctctcaatcttatccatcatagcaggcagttgaggtggattaaaccaaacccagctacgcaaaatcttagcatactcctcaattacccacataggatgaataatagcagttctaccgtacaaccctaacataaccattcttaatttaactatttatattatcctaactactaccgcattcctactactcaacttaaactccagcaccacgaccctactactatctcgcacctgaaacaagctaacatgactaacacccttaattccatccaccctcctctccctaggaggcctgcccccgctaaccggctttttgcccaaatgggccattatcgaagaattcacaaaaaacaatagcctcatcatccccaccatcatagccaccatcaccctccttaacctctacttctacctacgcctaatctactccacctcaatcacactactccccatatctaacaacgtaaaaataaaatgacagtttgaacatacaaaacccaccccattcctccccacactcatcgcccttaccacgctactcctacctatctccccttttatactaataatcttatagaaatttaggttaaatacagaccaagagccttcaaagccctcagtaagttgcaatacttaatttctgtaacagctaaggactgcaaaaccccactctgcatcaactgaacgcaaatcagccactttaattaagctaagcccttactagaccaatgggacttaaacccacaaacacttagttaacagctaagcaccctaatcaactggcttcaatctacttctcccgccgccgggaaaaaaggcgggagaagccccggcaggtttgaagctgcttcttcgaatttgcaattcaatatgaaaatcacctcggagctggtaaaaagaggcctaacccctgtctttagatttacagtccaatgcttcactcagccattttacctcacccccactgatgttcgccgaccgttgactattctctacaaaccacaaagacattggaacactatacctattattcggcgcatgagctggagtcctaggcacagctctaagcctccttattcgagccgagctgggccagccaggcaaccttctaggtaacgaccacatctacaacgttatcgtcacagcccatgcatttgtaataatcttcttcatagtaatacccatcataatcggaggctttggcaactgactagttcccctaataatcggtgcccccgatatggcgtttccccgcataaacaacataagcttctgactcttacctccctctctcctactcctgctcgcatctgctatagtggaggccggagcaggaacaggttgaacagtctaccctcccttagcagggaactactcccaccctggagcctccgtagacctaaccatcttctccttacacctagcaggtgtctcctctatcttaggggccatcaatttcatcacaacaattatcaatataaaaccccctgccataacccaataccaaacgcccctcttcgtctgatccgtcctaatcacagcagtcctacttctcctatctctcccagtcctagctgctggcatcactatactactaacagaccgcaacctcaacaccaccttcttcgaccccgccggaggaggagaccccattctataccaacacctattctgatttttcggtcaccctgaagtttatattcttatcctaccaggcttcggaataatctcccatattgtaacttactactccggaaaaaaagaaccatttggatacataggtatggtctgagctatgatatcaattggcttcctagggtttatcgtgtgagcacaccatatatttacagtaggaatagacgtagacacacgagcatatttcacctccgctaccataatcatcgctatccccaccggcgtcaaagtatttagctgactcgccacactccacggaagcaatatgaaatgatctgctgcagtgctctgagccctaggattcatctttcttttcaccgtaggtggcctgactggcattgtattagcaaactcatcactagacatcgtactacacgacacgtactacgttgtagcccacttccactatgtcctatcaataggagctgtatttgccatcataggaggcttcattcactgatttcccctattctcaggctacaccctagaccaaacctacgccaaaatccatttcactatcatattcatcggcgtaaatctaactttcttcccacaacactttctcggcctatccggaatgccccgacgttactcggactaccccgatgcatacaccacatgaaacatcctatcatctgtaggctcattcatttctctaacagcagtaatattaataattttcatgatttgagaagccttcgcttcgaagcgaaaagtcctaatagtagaagaaccctccataaacctggagtgactatatggatgccccccaccctaccacacattcgaagaacccgtatacataaaatctagacaaaaaaggaaggaatcgaaccccccaaagctggtttcaagccaaccccatggcctccatgactttttcaaaaaggtattagaaaaaccatttcataactttgtcaaagttaaattataggctaaatcctatatatcttaatggcacatgcagcgcaagtaggtctacaagacgctacttcccctatcatagaagagcttatcacctttcatgatcacgccctcataatcattttccttatctgcttcctagtcctgtatgcccttttcctaacactcacaacaaaactaactaatactaacatctcagacgctcaggaaatagaaaccgtctgaactatcctgcccgccatcatcctagtcctcatcgccctcccatccctacgcatcctttacataacagacgaggtcaacgatccctcccttaccatcaaatcaattggccaccaatggtactgaacctacgagtacaccgactacggcggactaatcttcaactcctacatacttcccccattattcctagaaccaggcgacctgcgactccttgacgttgacaatcgagtagtactcccgattgaagcccccattcgtataataattacatcacaagacgtcttgcactcatgagctgtccccacattaggcttaaaaacagatgcaattcccggacgtctaaaccaaaccactttcaccgctacacgaccgggggtatactacggtcaatgctctgaaatctgtggagcaaaccacagtttcatgcccatcgtcctagaattaattcccctaaaaatctttgaaatagggcccgtatttaccctatagcaccccctctaccccctctagagcccactgtaaagctaacttagcattaaccttttaagttaaagattaagagaaccaacacctctttacagtgaaatgccccaactaaatactaccgtatggcccaccataattacccccatactccttacactattcctcatcacccaactaaaaatattaaacacaaactaccacctacctccctcaccaaagcccataaaaataaaaaattataacaaaccctgagaaccaaaatgaacgaaaatctgttcgcttcattcattgcccccacaatcctaggcctacccgccgcagtactgatcattctatttccccctctattgatccccacctccaaatatctcatcaacaaccgactaatcaccacccaacaatgactaatcaaactaacctcaaaacaaatgataaccatacacaacactaaaggacgaacctgatctcttatactagtatccttaatcatttttattgccacaactaacctcctcggactcctgcctcactcatttacaccaaccacccaactatctataaacctagccatggccatccccttatgagcgggcgcagtgattataggctttcgctctaagattaaaaatgccctagcccacttcttaccacaaggcacacctacaccccttatccccatactagttattatcgaaaccatcagcctactcattcaaccaatagccctggccgtacgcctaaccgctaacattactgcaggccacctactcatgcacctaattggaagcgccaccctagcaatatcaaccattaaccttccctctacacttatcatcttcacaattctaattctactgactatcctagaaatcgctgtcgccttaatccaagcctacgttttcacacttctagtaagcctctacctgcacgacaacacataatgacccaccaatcacatgcctatcatatagtaaaacccagcccatgacccctaacaggggccctctcagccctcctaatgacctccggcctagccatgtgatttcacttccactccataacgctcctcatactaggcctactaaccaacacactaaccatataccaatgatggcgcgatgtaacacgagaaagcacataccaaggccaccacacaccacctgtccaaaaaggccttcgatacgggataatcctatttattacctcagaagtttttttcttcgcaggatttttctgagccttttaccactccagcctagcccctaccccccaattaggagggcactggcccccaacaggcatcaccccgctaaatcccctagaagtcccactcctaaacacatccgtattactcgcatcaggagtatcaatcacctgagctcaccatagtctaatagaaaacaaccgaaaccaaataattcaagcactgcttattacaattttactgggtctctattttaccctcctacaagcctcagagtacttcgagtctcccttcaccatttccgacggcatctacggctcaacattttttgtagccacaggcttccacggacttcacgtcattattggctcaactttcctcactatctgcttcatccgccaactaatatttcactttacatccaaacatcactttggcttcgaagccgccgcctgatactggcattttgtagatgtggtttgactatttctgtatgtctccatctattgatgagggtcttactcttttagtataaatagtaccgttaacttccaattaactagttttgacaacattcaaaaaagagtaataaacttcgccttaattttaataatcaacaccctcctagccttactactaataattattacattttgactaccacaactcaacggctacatagaaaaatccaccccttacgagtgcggcttcgaccctatatcccccgcccgcgtccctttctccataaaattcttcttagtagctattaccttcttattatttgatctagaaattgccctccttttacccctaccatgagccctacaaacaactaacctgccactaatagttatgtcatccctcttattaatcatcatcctagccctaagtctggcctatgagtgactacaaaaaggattagactgaaccgaattggtatatagtttaaacaaaacgaatgatttcgactcattaaattatgataatcatatttaccaaatgcccctcatttacataaatattatactagcatttaccatctcacttctaggaatactagtatatcgctcacacctcatatcctccctactatgcctagaaggaataatactatcgctgttcattatagctactctcataaccctcaacacccactccctcttagccaatattgtgcctattgccatactagtctttgccgcctgcgaagcagcggtgggcctagccctactagtctcaatctccaacacatatggcctagactacgtacataacctaaacctactccaatgctaaaactaatcgtcccaacaattatattactaccactgacatgactttccaaaaaacacataatttgaatcaacacaaccacccacagcctaattattagcatcatccctctactattttttaaccaaatcaacaacaacctatttagctgttccccaaccttttcctccgaccccctaacaacccccctcctaatactaactacctgactcctacccctcacaatcatggcaagccaacgccacttatccagtgaaccactatcacgaaaaaaactctacctctctatactaatctccctacaaatctccttaattataacattcacagccacagaactaatcatattttatatcttcttcgaaaccacacttatccccaccttggctatcatcacccgatgaggcaaccagccagaacgcctgaacgcaggcacatacttcctattctacaccctagtaggctcccttcccctactcatcgcactaatttacactcacaacaccctaggctcactaaacattctactactcactctcactgcccaagaactatcaaactcctgagccaacaacttaatatgactagcttacacaatagcttttatagtaaagatacctctttacggactccacttatgactccctaaagcccatgtcgaagcccccatcgctgggtcaatagtacttgccgcagtactcttaaaactaggcggctatggtataatacgcctcacactcattctcaaccccctgacaaaacacatagcctaccccttccttgtactatccctatgaggcataattataacaagctccatctgcctacgacaaacagacctaaaatcgctcattgcatactcttcaatcagccacatagccctcgtagtaacagccattctcatccaaaccccctgaagcttcaccggcgcagtcattctcataatcgcccacgggcttacatcctcattactattctgcctagcaaactcaaactacgaacgcactcacagtcgcatcataatcctctctcaaggacttcaaactctactcccactaatagctttttgatgacttctagcaagcctcgctaacctcgccttaccccccactattaacctactgggagaactctctgtgctagtaaccacgttctcctgatcaaatatcactctcctacttacaggactcaacatactagtcacagccctatactccctctacatatttaccacaacacaatggggctcactcacccaccacattaacaacataaaaccctcattcacacgagaaaacaccctcatgttcatacacctatcccccattctcctcctatccctcaaccccgacatcattaccgggttttcctcttgtaaatatagtttaaccaaaacatcagattgtgaatctgacaacagaggcttacgaccccttatttaccgagaaagctcacaagaactgctaactcatgcccccatgtctaacaacatggctttctcaacttttaaaggataacagctatccattggtcttaggccccaaaaattttggtgcaactccaaataaaagtaataaccatgcacactactataaccaccctaaccctgacttccctaattccccccatccttaccaccctcgttaaccctaacaaaaaaaactcatacccccattatgtaaaatccattgtcgcatccacctttattatcagtctcttccccacaacaatattcatgtgcctagaccaagaagttattatctcgaactgacactgagccacaacccaaacaacccagctctccctaagcttcaagctagactacttctccataatattcatccctgtagcattgttcgttacatggtccatcatagaattctcactgtgatatataaactcagacccaaacattaatcagttcttcaaatatctactcatcttcctaattaccatactaatcttagttaccgctaacaacctattccaactgttcatcggctgagagggcgtaggaattatatccttcttgctcatcagttgatgatacgcccgagcagatgccaacacagcagccattcaagcaatcctatacaaccgtatcggcgatatcggtttcatcctcgccttagcatgatttatcctacactccaactcatgagacccacaacaaatagcccttctaaacgctaatccaagcctcaccccactactaggcctcctcctagcagcagcaggcaaatcagcccaattaggtctccacccctgactcccctcagccatagaaggccccaccccagtctcagccctactccactcaagcactatagttgtagcaggaatcttcttactcatccgcttccaccccctagcagaaaatagcccactaatccaaactctaacactatgcttaggcgctatcaccactctgttcgcagcagtctgcgcccttacacaaaatgacatcaaaaaaatcgtagccttctccacttcaagtcaactaggactcataatagttacaatcggcatcaaccaaccacacctagcattcctgcacatctgtacccacgccttcttcaaagccatactatttatgtgctccgggtccatcatccacaaccttaacaatgaacaagatattcgaaaaataggaggactactcaaaaccatacctctcacttcaacctccctcaccattggcagcctagcattagcaggaatacctttcctcacaggtttctactccaaagaccacatcatcgaaaccgcaaacatatcatacacaaacgcctgagccctatctattactctcatcgctacctccctgacaagcgcctatagcactcgaataattcttctcaccctaacaggtcaacctcgcttccccacccttactaacattaacgaaaataaccccaccctactaaaccccattaaacgcctggcagccggaagcctattcgcaggatttctcattactaacaacatttcccccgcatcccccttccaaacaacaatccccctctacctaaaactcacagccctcgctgtcactttcctaggacttctaacagccctagacctcaactacctaaccaacaaacttaaaataaaatccccactatgcacattttatttctccaacatactcggattctaccctagcatcacacaccgcacaatcccctatctaggccttcttacgagccaaaacctgcccctactcctcctagacctaacctgactagaaaagctattacctaaaacaatttcacagcaccaaatctccacctccatcatcacctcaacccaaaaaggcataattaaactttacttcctctctttcttcttcccactcatcctaaccctactcctaatcacataacctattcccccgagcaatctcaattacaatatatacaccaacaaacaatgttcaaccagtaactactactaatcaacgcccataatcatacaaagcccccgcaccaataggatcctcccgaatcaaccctgacccctctccttcataaattattcagcttcctacactattaaagtttaccacaaccaccaccccatcatactctttcacccacagcaccaatcctacctccatcgctaaccccactaaaacactcaccaagacctcaacccctgacccccatgcctcaggatactcctcaatagccatcgctgtagtatatccaaagacaaccatcattccccctaaataaattaaaaaaactattaaacccatataacctcccccaaaattcagaataataacacacccgaccacaccgctaacaatcaatactaaacccccataaataggagaaggcttagaagaaaaccccacaaaccccattactaaacccacactcaacagaaacaaagcatacatcattattctcgcacggactacaaccacgaccaatgatatgaaaaaccatcgttgtatttcaactacaagaacaccaatgaccccaatacgcaaaactaaccccctaataaaattaattaaccactcattcatcgacctccccaccccatccaacatctccgcatgatgaaacttcggctcactccttggcgcctgcctgatcctccaaatcaccacaggactattcctagccatgcactactcaccagacgcctcaaccgccttttcatcaatcgcccacatcactcgagacgtaaattatggctgaatcatccgctaccttcacgccaatggcgcctcaatattctttatctgcctcttcctacacatcgggcgaggcctatattacggatcatttctctactcagaaacctgaaacatcggcattatcctcctgcttgcaactatagcaacagccttcataggctatgtcctcccgtgaggccaaatatcattctgaggggccacagtaattacaaacttactatccgccatcccatacattgggacagacctagttcaatgaatctgaggaggctactcagtagacagtcccaccctcacacgattctttacctttcacttcatcttgcccttcattattgcagccctagcagcactccacctcctattcttgcacgaaacgggatcaaacaaccccctaggaatcacctcccattccgataaaatcaccttccacccttactacacaatcaaagacgccctcggcttacttctcttccttctctccttaatgacattaacactattctcaccagacctcctaggcgacccagacaattataccctagccaaccccttaaacacccctccccacatcaagcccgaatgatatttcctattcgcctacacaattctccgatccgtccctaacaaactaggaggcgtccttgccctattactatccatcctcatcctagcaataatccccatcctccatatatccaaacaacaaagcataatatttcgcccactaagccaatcactttattgactcctagccgcagacctcctcattctaacctgaatcggaggacaaccagtaagctacccttttaccatcattggacaagtagcatccgtactatacttcacaacaatcctaatcctaataccaactatctccctaattgaaaacaaaatactcaaatgggcctgtccttgtagtataaactaatacaccagtcttgtaaaccggagatgaaaacctttttccaaggacaaatcagagaaaaagtctttaactccaccattagcacccaaagctaagattctaatttaaactattctctgttctttcatggggaagcagatttgggtaccacccaagtattgactcacccatcaacaaccgctatgtatttcgtacattactgccagccaccatgaatattgtacggtaccataaatacttgaccacctgtagtacataaaaacccaatccacatcaaaaccccctccccatgcttacaagcaagtacagcaatcaaccctcaactatcacacatcaactgcaactccaaagccacccctcacccactaggataccaacaaacctacccacccttaacagtacatagtacataaagccatttaccgtacatagcacattacagtcaaatcccttctcgtccccatggatgacccccctcagataggggtcccttgaccaccatcctccgtgaaatcaatatcccgcacaagagtgctactctcctcgctccgggcccataacacttgggggtagctaaagtgaactgtatccgacatctggttcctacttcagggccataaagcctaaatagcccacacgttccccttaaataagacatcacgatg

SEQ ID NO: 353 - DNA, 16571 bp, Homo sapiens mitochondrial
  3109: "n" refers to a nucleotide at position 3107 of the Cambridge Reference Sequence (CRS, Anderson et al. 1981 Nature 290:457-465), later determined to be absent from the human mtDNA sequence according to the revised CRS (rCRS, Andrews et al. 1999 Nature Genetics 23:147); "n" therefore represents a single nucleotide deletion at a position corresponding to nucleotide 3107 of SEQ ID NO:1 as provided herein.
gatcacaggtctatcaccctattaaccactcacgggagctctccatgcatttggtattttcgtctggggggtatgcacgcgatagcattgcgagacgctggagccggagcaccctatgtcgcagtatctgtctttgattcctgcctcatcccattatttatcgcacctacgttcaatattacaggcgaacatacttactaaagtgtgttaattaattaatgcttgtaggacataataataacaattgaatgtctgcacagccgctttccacacagacatcataacaaaaaatttccaccaaaccccccctcccccccgcttctggccacagcacttaaacacatctctgccaaaccccaaaaacaaagaaccctaacaccagcctaaccagatttcaaattttatcttttggcggtatgcacttttaacagtcaccccccaactaacacattattttcccctcccactcccatactactaatctcatcaatacaacccccgcccatcctacccagcacacacacaccgctgctaaccccataccccgaaccaaccaaaccccaaagacaccccccacagtttatgtagcttacctcctcaaagcaatacactgaaaatgtttagacgggctcacatcaccccataaacaaataggtttggtcctagcctttctattagctcttagtaagattacacatgcaagcatccccgttccagtgagttcaccctctaaatcaccacgatcaaaagggacaagcatcaagcacgcagcaatgcagctcaaaacgcttagcctagccacacccccacgggaaacagcagtgattaacctttagcaataaacgaaagtttaactaagctatactaaccccagggttggtcaatttcgtgccagccaccgcggtcacacgattaacccaagtcaatagaagccggcgtaaagagtgttttagatcaccccctccccaataaagctaaaactcaccttagttgtaaaaaactccagttgacacaaaatagactacgaaagtggctttaacatatctgaacacacaatagctaagacccaaactgggattagataccccactatgcttagccctaaacctcaacagttaaatcaacaaaactgctcgccagaacactacgagccacagcttaaaactcaaaggacctggcggtgcttcatatccctctagaggagcctgttctgtaatcgataaaccccgatcaacctcaccacctcttgctcagcctatataccgccatcttcagcaaaccctgatgaaggctacaaagtaagcgcaagtacccacgtaaagacgttaggtcaaggtgtagcccatgaggtggcaagaaatgggctacattttctaccccagaaaactacgatagcccttatgaaacttaagggtcgaaggtggatttagcagtaaactgagagtagagtgcttagttgaacagggccctgaagcgcgtacacaccgcccgtcaccctcctcaagtatacttcaaaggacatttaactaaaacccctacgcatttatatagaggagacaagtcgtaacatggtaagtgtactggaaagtgcacttggacgaaccagagtgtagcttaacacaaagcacccaacttacacttaggagatttcaacttaacttgaccgctctgagctaaacctagccccaaacccactccaccttactaccagacaaccttaaccaaaccatttacccaaataaagtataggcgatagaaattgaaacctggcgcaatagatatagtaccgcaagggaaagatgaaaaattataaccaagcataatatagcaaggactaacccctataccttctgcataatgaattaactagaaataactttgcaaggagagccaaagctaagacccccgaaaccagacgagctacctaagaacagctaaaagagcacacccgtctatgtagcaaaatagtgggaagatttataggtagaggcgacaaacctaccgagcctggtgatagctggttgtccaagatagaatcttagttcaactttaaatttgcccacagaaccctctaaatccccttgtaaatttaactgttagtccaaagaggaacagctctttggacactaggaaaaaaccttgtagagagagtaaaaaatttaacacccatagtaggcctaaaagcagccaccaattaagaaagcgttcaagctcaacacccactacctaaaaaatcccaaacatataactgaactcctcacacccaattggaccaatctatcaccctatagaagaactaatgttagtataagtaacatgaaaacattctcctccgcataagcctgcgtcagattaaaacactgaactgacaattaacagcccaatatctacaatcaaccaacaagtcattattaccctcactgtcaacccaacacaggcatgctcataaggaaaggttaaaaaaagtaaaaggaactcggcaaatcttaccccgcctgtttaccaaaaacatcacctctagcatcaccagtattagaggcaccgcctgcccagtgacacatgtttaacggccgcggtaccctaaccgtgcaaaggtagcataatcacttgttccttaaatagggacctgtatgaatggctccacgagggttcagctgtctcttacttttaaccagtgaaattgacctgcccgtgaagaggcgggcatgacacagcaagacgagaagaccctatggagctttaatttattaatgcaaacagtacctaacaaacccacaggtcctaaactaccaaacctgcattaaaaatttcggttggggcgacctcggagcagaacccaacctccgagcagtacatgctaagacttcaccagtcaaagcgaactactatactcaattgatccaataacttgaccaacggaacaagttaccctagggataacagcgcaatcctattctagagtccatatcaacaatagggtttacgacctcgatgttggatcaggacatcccgatggtgcagccgctattaaaggttcgtttgttcaacgattaaagtcctacgtgatctgagttcagaccggagtaatccaggtcggtttctatctacnttcaaattcctccctgtacgaaaggacaagagaaataaggcctacttcacaaagcgccttcccccgtaaatgatatcatctcaacttagtattatacccacacccacccaagaacagggtttgttaagatggcagagcccggtaatcgcataaaacttaaaactttacagtcagaggttcaattcctcttcttaacaacatacccatggccaacctcctactcctcattgtacccattctaatcgcaatggcattcctaatgcttaccgaacgaaaaattctaggctatatacaactacgcaaaggccccaacgttgtaggcccctacgggctactacaacccttcgctgacgccataaaactcttcaccaaagagcccctaaaacccgccacatctaccatcaccctctacatcaccgccccgaccttagctctcaccatcgctcttctactatgaacccccctccccatacccaaccccctggtcaacctcaacctaggcctcctatttattctagccacctctagcctagccgtttactcaatcctctgatcagggtgagcatcaaactcaaactacgccctgatcggcgcactgcgagcagtagcccaaacaatctcatatgaagtcaccctagccatcattctactatcaacattactaataagtggctcctttaacctctccacccttatcacaacacaagaacacctctgattactcctgccatcatgacccttggccataatatgatttatctccacactagcagagaccaaccgaacccccttcgaccttgccgaaggggagtccgaactagtctcaggcttcaacatcgaatacgccgcaggccccttcgccctattcttcatagccgaatacacaaacattattataataaacaccctcaccactacaatcttcctaggaacaacatatgacgcactctcccctgaactctacacaacatattttgtcaccaagaccctacttctaacctccctgttcttatgaattcgaacagcatacccccgattccgctacgaccaactcatacacctcctatgaaaaaacttcctaccactcaccctagcattacttatatgatatgtctccatacccattacaatctccagcattccccctcaaacctaagaaatatgtctgataaaagagttactttgatagagtaaataataggagcttaaacccccttatttctaggactatgagaatcgaacccatccctgagaatccaaaattctccgtgccacctatcacaccccatcctaaagtaaggtcagctaaataagctatcgggcccataccccgaaaatgttggttatacccttcccgtactaattaatcccctggcccaacccgtcatctactctaccatctttgcaggcacactcatcacagcgctaagctcgcactgattttttacctgagtaggcctagaaataaacatgctagcttttattccagttctaaccaaaaaaataaaccctcgttccacagaagctgccatcaagtatttcctcacgcaagcaaccgcatccataatccttctaatagctatcctcttcaacaatatactctccggacaatgaaccataaccaatactaccaatcaatactcatcattaataatcataatggctatagcaataaaactaggaatagccccctttcacttctgagtcccagaggttacccaaggcacccctctgacatccggcctgcttcttctcacatgacaaaaactagcccccatctcaatcatataccaaatctctccctcactaaacgtaagccttctcctcactctctcaatcttatccatcatagcaggcagttgaggtggattaaaccaaacccagctacgcaaaatcttagcatactcctcaattacccacataggatgaataatagcagttctaccgtacaaccctaacataaccattcttaatttaactatttatattatcctaactactaccgcattcctactactcaacttaaactccagcaccacgaccctactactatctcgcacctgaaacaagctaacatgactaacacccttaattccatccaccctcctctccctaggaggcctgcccccgctaaccggctttttgcccaaatgggccattatcgaagaattcacaaaaaacaatagcctcatcatccccaccatcatagccaccatcaccctccttaacctctacttctacctacgcctaatctactccacctcaatcacactactccccatatctaacaacgtaaaaataaaatgacagtttgaacatacaaaacccaccccattcctccccacactcatcgcccttaccacgctactcctacctatctccccttttatactaataatcttatagaaatttaggttaaatacagaccaagagccttcaaagccctcagtaagttgcaatacttaatttctgtaacagctaaggactgcaaaaccccactctgcatcaactgaacgcaaatcagccactttaattaagctaagcccttactagaccaatgggacttaaacccacaaacacttagttaacagctaagcaccctaatcaactggcttcaatctacttctcccgccgccgggaaaaaaggcgggagaagccccggcaggtttgaagctgcttcttcgaatttgcaattcaatatgaaaatcacctcggagctggtaaaaagaggcctaacccctgtctttagatttacagtccaatgcttcactcagccattttacctcacccccactgatgttcgccgaccgttgactattctctacaaaccacaaagacattggaacactatacctattattcggcgcatgagctggagtcctaggcacagctctaagcctccttattcgagccgagctgggccagccaggcaaccttctaggtaacgaccacatctacaacgttatcgtcacagcccatgcatttgtaataatcttcttcatagtaatacccatcataatcggaggctttggcaactgactagttcccctaataatcggtgcccccgatatggcgtttccccgcataaacaacataagcttctgactcttacctccctctctcctactcctgctcgcatctgctatagtggaggccggagcaggaacaggttgaacagtctaccctcccttagcagggaactactcccaccctggagcctccgtagacctaaccatcttctccttacacctagcaggtgtctcctctatcttaggggccatcaatttcatcacaacaattatcaatataaaaccccctgccataacccaataccaaacgcccctcttcgtctgatccgtcctaatcacagcagtcctacttctcctatctctcccagtcctagctgctggcatcactatactactaacagaccgcaacctcaacaccaccttcttcgaccccgccggaggaggagaccccattctataccaacacctattctgatttttcggtcaccctgaagtttatattcttatcctaccaggcttcggaataatctcccatattgtaacttactactccggaaaaaaagaaccatttggatacataggtatggtctgagctatgatatcaattggcttcctagggtttatcgtgtgagcacaccatatatttacagtaggaatagacgtagacacacgagcatatttcacctctgctaccataatcatcgctatccccaccggcgtcaaagtatttagctgactcgccacactccacggaagcaatatgaaatgatctgctgcagtgctctgagccctaggattcatctttcttttcaccgtaggtggcctgactggcattgtattagcaaactcatcactagacatcgtactacacgacacgtactacgttgtagctcacttccactatgtcctatcaataggagctgtatttgccatcataggaggcttcattcactgatttcccctattctcaggctacaccctagaccaaacctacgccaaaatccatttcactatcatattcatcggcgtaaatctaactttcttcccacaacactttctcggcctatccggaatgccccgacgttactcggactaccccgatgcatacaccacatgaaacatcctatcatctgtaggctcattcatttctctaacagcagtaatattaataattttcatgatttgagaagccttcgcttcgaagcgaaaagtcctaatagtagaagaaccctccataaacctggagtgactatatggatgccccccaccctaccacacattcgaagaacccgtatacataaaatctagacaaaaaaggaaggaatcgaaccccccaaagctggtttcaagccaaccccatggcctccatgactttttcaaaaaggtattagaaaaaccatttcataactttgtcaaagttaaattataggctaaatcctatatatcttaatggcacatgcagcgcaagtaggtctacaagacgctacttcccctatcatagaagagcttatcacctttcatgatcacgccctcataatcattttccttatctgcttcctagtcctgtatgcccttttcctaacactcacaacaaaactaactaatactaacatctcagacgctcaggaaatagaaaccgtctgaactatcctgcccgccatcatcctagtcctcatcgccctcccatccctacgcatcctttacataacagacgaggtcaacgatccctcccttaccatcaaatcaattggccaccaatggtactgaacctacgagtacaccgactacggcggactaatcttcaactcctacatacttcccccattattcctagaaccaggcgacctgcgactccttgacgttgacaatcgagtagtactcccgattgaagcccccattcgtataataattacatcacaagacgtcttgcactcatgagctgtccccacattaggcttaaaaacagatgcaattcccggacgtctaaaccaaaccactttcaccgctacacgaccgggggtatactacggtcaatgctctgaaatctgtggagcaaaccacagtttcatgcccatcgtcctagaattaattcccctaaaaatctttgaaatagggcccgtatttaccctatagcaccccctctaccccctctagagcccactgtaaagctaacttagcattaaccttttaagttaaagattaagagaaccaacacctctttacagtgaaatgccccaactaaatactaccgtatggcccaccataattacccccatactccttacactattcctcatcacccaactaaaaatattaaacacaaactaccacctacctccctcaccaaagcccataaaaataaaaaattataacaaaccctgagaaccaaaatgaacgaaaatctgttcgcttcattcattgcccccacaatcctaggcctacccgccgcagtactgatcattctatttccccctctattgatccccacctccaaatatctcatcaacaaccgactaatcaccacccaacaatgactaatcaaactaacctcaaaacaaatgataaccatacacaacactaaaggacgaacctgatctcttatactagtatccttaatcatttttattgccacaactaacctcctcggactcctgcctcactcatttacaccaaccacccaactatctataaacctagccatggccatccccttatgagcgggcgcagtgattataggctttcgctctaagattaaaaatgccctagcccacttcttaccacaaggcacacctacaccccttatccccatactagttattatcgaaaccatcagcctactcattcaaccaatagccctggccgtacgcctaaccgctaacattactgcaggccacctactcatgcacctaattggaagcgccaccctagcaatatcaaccattaaccttccctctacacttatcatcttcacaattctaattctactgactatcctagaaatcgctgtcgccttaatccaagcctacgttttcacacttctagtaagcctctacctgcacgacaacacataatgacccaccaatcacatgcctatcatatagtaaaacccagcccatgacccctaacaggggccctctcagccctcctaatgacctccggcctagccatgtgatttcacttccactccataacgctcctcatactaggcctactaaccaacacactaaccatataccaatgatggcgcgatgtaacacgagaaagcacataccaaggccaccacacaccacctgtccaaaaaggccttcgatacgggataatcctatttattacctcagaagtttttttcttcgcaggatttttctgagccttttaccactccagcctagcccctaccccccaattaggagggcactggcccccaacaggcatcaccccgctaaatcccctagaagtcccactcctaaacacatccgtattactcgcatcaggagtatcaatcacctgagctcaccatagtctaatagaaaacaaccgaaaccaaataattcaagcactgcttattacaattttactgggtctctattttaccctcctacaagcctcagagtacttcgagtctcccttcaccatttccgacggcatctacggctcaacattttttgtagccacaggcttccacggacttcacgtcattattggctcaactttcctcactatctgcttcatccgccaactaatatttcactttacatccaaacatcactttggcttcgaagccgccgcctgatactggcattttgtagatgtggtttgactatttctgtatgtctccatctattgatgagggtcttactcttttagtataaatagtaccgttaacttccaattaactagttttgacaacattcaaaaaagagtaataaacttcgccttaattttaataatcaacaccctcctagccttactactaataattattacattttgactaccacaactcaacggctacatagaaaaatccaccccttacgagtgcggcttcgaccctatatcccccgcccgcgtccctttctccataaaattcttcttagtagctattaccttcttattatttgatctagaaattgccctccttttacccctaccatgagccctacaaacaactaacctgccactaatagttatgtcatccctcttattaatcatcatcctagccctaagtctggcctatgagtgactacaaaaaggattagactgaaccgaattggtatatagtttaaacaaaacgaatgatttcgactcattaaattatgataatcatatttaccaaatgcccctcatttacataaatattatactagcatttaccatctcacttctaggaatactagtatatcgctcacacctcatatcctccctactatgcctagaaggaataatactatcgctgttcattatagctactctcataaccctcaacacccactccctcttagccaatattgtgcctattgccatactagtctttgccgcctgcgaagcagcggtgggcctagccctactagtctcaatctccaacacatatggcctagactacgtacataacctaaacctactccaatgctaaaactaatcgtcccaacaattatattactaccactgacatgactttccaaaaaacacataatttgaatcaacacaaccacccacagcctaattattagcatcatccctctactattttttaaccaaatcaacaacaacctatttagctgttccccaaccttttcctccgaccccctaacaacccccctcctaatactaactacctgactcctacccctcacaatcatggcaagccaacgccacttatccagtgaaccactatcacgaaaaaaactctacctctctatactaatctccctacaaatctccttaattataacattcacagccacagaactaatcatattttatatcttcttcgaaaccacacttatccccaccttggctatcatcacccgatgaggcaaccagccagaacgcctgaacgcaggcacatacttcctattctacaccctagtaggctcccttcccctactcatcgcactaatttacactcacaacaccctaggctcactaaacattctactactcactctcactgcccaagaactatcaaactcctgagccaacaacttaatatgactagcttacacaatagcttttatagtaaagatacctctttacggactccacttatgactccctaaagcccatgtcgaagcccccatcgctgggtcaatagtacttgccgcagtactcttaaaactaggcggctatggtataatacgcctcacactcattctcaaccccctgacaaaacacatagcctaccccttccttgtactatccctatgaggcataattataacaagctccatctgcctacgacaaacagacctaaaatcgctcattgcatactcttcaatcagccacatagccctcgtagtaacagccattctcatccaaaccccctgaagcttcaccggcgcagtcattctcataatcgcccacgggcttacatcctcattactattctgcctagcaaactcaaactacgaacgcactcacagtcgcatcataatcctctctcaaggacttcaaactctactcccactaatagctttttgatgacttctagcaagcctcgctaacctcgccttaccccccactattaacctactgggagaactctctgtgctagtaaccacgttctcctgatcaaatatcactctcctacttacaggactcaacatactagtcacagccctatactccctctacatatttaccacaacacaatggggctcactcacccaccacattaacaacataaaaccctcattcacacgagaaaacaccctcatgttcatacacctatcccccattctcctcctatccctcaaccccgacatcattaccgggttttcctcttgtaaatatagtttaaccaaaacatcagattgtgaatctgacaacagaggcttacgaccccttatttaccgagaaagctcacaagaactgctaactcatgcccccatgtctaacaacatggctttctcaacttttaaaggataacagctatccattggtcttaggccccaaaaattttggtgcaactccaaataaaagtaataaccatgcacactactataaccaccctaaccctgacttccctaattccccccatccttaccaccctcgttaaccctaacaaaaaaaactcatacccccattatgtaaaatccattgtcgcatccacctttattatcagtctcttccccacaacaatattcatgtgcctagaccaagaagttattatctcgaactgacactgagccacaacccaaacaacccagctctccctaagcttcaaactagactacttctccataatattcatccctgtagcattgttcgttacatggtccatcatagaattctcactgtgatatataaactcagacccaaacattaatcagttcttcaaatatctactcatcttcctaattaccatactaatcttagttaccgctaacaacctattccaactgttcatcggctgagagggcgtaggaattatatccttcttgctcatcagttgatgatacgcccgagcagatgccaacacagcagccattcaagcaatcctatacaaccgtatcggcgatatcggtttcatcctcgccttagcatgatttatcctacactccaactcatgagacccacaacaaatagcccttctaaacgctaatccaagcctcaccccactactaggcctcctcctagcagcagcaggcaaatcagcccaattaggtctccacccctgactcccctcagccatagaaggccccaccccagtctcagccctactccactcaagcactatagttgtagcaggaatcttcttactcatccgcttccaccccctagcagaaaatagcccactaatccaaactctaacactatgcttaggcgctatcaccactctgttcgcagcagtctgcgcccttacacaaaatgacatcaaaaaaatcgtagccttctccacttcaagtcaactaggactcataatagttacaatcggcatcaaccaaccacacctagcattcctgcacatctgtacccacgccttcttcaaagccatactatttatgtgctccgggtccatcatccacaaccttaacaatgaacaagatattcgaaaaataggaggactactcaaaaccatacctctcacttcaacctccctcaccattggcagcctagcattagcaggaatacctttcctcacaggtttctactccaaagaccacatcatcgaaaccgcaaacatatcatacacaaacgcctgagccctatctattactctcatcgctacctccctgacaagcgcctatagcactcgaataattcttctcaccctaacaggtcaacctcgcttccccacccttactaacattaacgaaaataaccccaccctactaaaccccattaaacgcctggcagccggaagcctattcgcaggatttctcattactaacaacatttcccccgcatcccccttccaaacaacaatccccctctacctaaaactcacagccctcgctgtcactttcctaggacttctaacagccctagacctcaactacctaaccaacaaacttaaaataaaatccccactatgcacattttatttctccaacatactcggattctaccctagcatcacacaccgcacaatcccctatctaggccttcttacgagccaaaacctgcccctactcctcctagacctaacctgactagaaaagctattacctaaaacaatttcacagcaccaaatctccacctccatcatcacctcaacccaaaaaggcataattaaactttacttcctctctttcttcttcccactcatcctaaccctactcctaatcacataacctattcccccgagcaatctcaattacaatatatacaccaacaaacaatgttcaaccagtaactactactaatcaacgcccataatcatacaaagcccccgcaccaataggatcctcccgaatcaaccctgacccctctccttcataaattattcagcttcctacactattaaagtttaccacaaccaccaccccatcatactctttcacccacagcaccaatcctacctccatcgctaaccccactaaaacactcaccaagacctcaacccctgacccccatgcctcaggatactcctcaatagccatcgctgtagtatatccaaagacaaccatcattccccctaaataaattaaaaaaactattaaacccatataacctcccccaaaattcagaataataacacacccgaccacaccgctaacaatcaatactaaacccccataaataggagaaggcttagaagaaaaccccacaaaccccattactaaacccacactcaacagaaacaaagcatacatcattattctcgcacggactacaaccacgaccaatgatatgaaaaaccatcgttgtatttcaactacaagaacaccaatgaccccaatacgcaaaactaaccccctaataaaattaattaaccactcattcatcgacctccccaccccatccaacatctccgcatgatgaaacttcggctcactccttggcgcctgcctgatcctccaaatcaccacaggactattcctagccatgcactactcaccagacgcctcaaccgccttttcatcaatcgcccacatcactcgagacgtaaattatggctgaatcatccgctaccttcacgccaatggcgcctcaatattctttatctgcctcttcctacacatcgggcgaggcctatattacggatcatttctctactcagaaacctgaaacatcggcattatcctcctgcttgcaactatagcaacagccttcataggctatgtcctcccgtgaggccaaatatcattctgaggggccacagtaattacaaacttactatccgccatcccatacattgggacagacctagttcaatgaatctgaggaggctactcagtagacagtcccaccctcacacgattctttacctttcacttcatcttgcccttcattattgcagccctagcagcactccacctcctattcttgcacgaaacgggatcaaacaaccccctaggaatcacctcccattccgataaaatcaccttccacccttactacacaatcaaagacgccctcggcttacttctcttccttctctccttaatgacattaacactattctcaccagacctcctaggcgacccagacaattataccctagccaaccccttaaacacccctccccacatcaagcccgaatgatatttcctattcgcctacacaattctccgatccgtccctaacaaactaggaggcgtccttgccctattactatccatcctcatcctagcaataatccccatcctccatatatccaaacaacaaagcataatatttcgcccactaagccaatcactttattgactcctagccgcagacctcctcattctaacctgaatcggaggacaaccagtaagctacccttttaccatcattggacaagtagcatccgtactatacttcacaacaatcctaatcctaataccaactatctccctaattgaaaacaaaatactcaaatgggcctgtccttgtagtataaactaatacaccagtcttgtaaaccggagatgaaaacctttttccaaggacaaatcagagaaaaagtctttaactccaccattagcacccaaagctaagattctaatttaaactattctctgttctttcatggggaagcagatttgggtaccacccaagtattgactcacccatcaacaaccgctatgtatttcgtacattactgccagccaccatgaatattgtacggtaccataaatacttgaccacctgtagtacataaaaacccaatccacatcaaaaccccctccccatgcttacaagcaagtacagcaatcaaccctcaactatcacacatcaactgcaactccaaagccacccctcacccactaggataccaacaaacctacccacccttaacagtacatagcacataaagccatttaccgtacatagcacattacagtcaaatcccttctcgtccccatggatgacccccctcagataggggtcccttgaccaccatcctccgtgaaatcaatatcccgcacaagagtgctactctcctcgctccgggcccataacacttgggggtagctaaagtgaactgtatccgacatctggttcctacttcagggtcataaagcctaaatagcccacacgttccccttaaataagacatcacgatg

SEQ ID NO: 354 - DNA, 16573 bp, Homo sapiens mitochondrial
  3111: "n" refers to a nucleotide at position 3107 of the Cambridge Reference Sequence (CRS, Anderson et al. 1981 Nature 290:457-465), later determined to be absent from the human mtDNA sequence according to the revised CRS (rCRS, Andrews et al. 1999 Nature Genetics 23:147); "n" therefore represents a single nucleotide deletion at a position corresponding to nucleotide 3107 of SEQ ID NO:1 as provided herein.
gatcacaggtctatcaccctattaaccactcacgggagctctccatgcatttggtattttcgtctggggggtgtgcacgcgatagcattgcgagacgctggagccggagcaccctatgtcgcagtatctgtctttgattcctgcctcatcccattatttatcgcacctacgttcaatattacaggcggacatacttactaaagtgtgttaattaattaatgcttgtaggacataataataacaattgaatgtctgcacagccgctttccacacagacatcataacaaaaaatttccaccaaaccccccctcccccccgcttctggccacagcacttaaacacatctctgccaaaccccaaaaacaaagaaccctaacaccagcctaaccagatttcaaattttatcttttggcggtatgcacttttaacagtcaccccccaactaacacattattttcccctcccactcccatactactaatctcatcaatacaacccccgcccatcctacccagcacacacacaccacgctgctaaccccataccccgaaccaaccaaaccccaaagacaccccccacagtttatgtagcttacctcctcaaagcaatacactgaaaatgtttagacgggctcacatcaccccataaacaaataggtttggtcctagcctttctattagctcttagtaagattacacatgcaagcatccccgttccagtgagttcaccctctaaatcaccacgatcaaaagggacaagcatcaagcacgcagcaatgcagctcaaaacgcttagcctagccacacccccacgggaaacagcagtgattaacctttagcaataaacgaaagtttaactaagctatactaaccccagggttggtcaatttcgtgccagccaccgcggtcacacgattaacccaagtcaatagaagccggcgtaaagagtgttttagatcaccccctccccaataaagctaaaactcacctgagttgtaaaaaactccagttgacacaaaatagactacgaaagtggctttaacatatctgaacacacaatagctaagacccaaactgggattagataccccactatgcttagccctaaacctcaacagttaaatcaacaaaactgctcgccagaacactacgagccacagcttaaaactcaaaggacctggcggtgcttcatacccctctagaggagcctgttctgtaatcgataaaccccgatcaacctcaccacctcttgctcagcctatataccgccatcttcagcaaaccctgatgaaggctacaaagtaagcgcaagtacccacgtaaagacgttaggtcaaggtgtagcccatgaggtggcaagaaatgggctacattttctaccccagaaaactacgatagcccttatgaaacttaagggtcgaaggtggatttagcagtaaactgagagtagagtgcttagttgaacagggccctgaagcgcgtacacaccgcccgtcaccctcctcaagtatacttcaaaggacatttaactaaaacccctacgcatttatatagaggagacaagtcgtaacatggtaagtgtactggaaagtgcacttggacgaaccagagtgtagcttaacacaaagcacccaacttacacttaggagatttcaacttaacttgaccgctctgagctaaacctagccccaaacccactccaccttactaccagacaaccttagccaaaccatttacccaaataaagtataggcgatagaaattgaaacctggcgcaatagatatagtaccgcaagggaaagatgaaaaattatagccaagcataatatagcaaggactaacccctataccttctgcataatgaattaactagaaataactttgcaaggagagccaaagctaagacccccgaaaccagacgagctacctaagaacagctaaaagagcacacccgtctatgtagcaaaatagtgggaagatttataggtagaggcgacaaacctaccgagcctggtgatagctggttgtccaagatagaatcttagttcaactttaaatttgcccacagaaccctctaaatccccttgtaaatttaactgttagtccaaagaggaacagctctttggacactaggaaaaaaccttgtagagagagtaaaaaatttaacacccatagtaggcctaaaagcagccaccaattaagaaagcgttcaagctcaacacccactacctaaaaaatcccaaacatataactgaactcctcacacccaattggaccaatctatcaccctatagaagaactaatgttagtataagtaacatgaaaacattctcctccgcataagcctgcgtcagattaaaacactgaactgacaattaacagcccaatatctacaatcaaccaacaagtcattattaccctcactgtcaacccaacacaggcatgctcataaggaaaggttaaaaaaagtaaaaggaactcggcaaatcttaccccgcctgtttaccaaaaacatcacctctagcatcaccagtattagaggcaccgcctgcccagtgacacatgtttaacggccgcggtaccctaaccgtgcaaaggtagcataatcacttgttccttaaatagggacctgtatgaatggctccacgagggttcagctgtctcttacttttaaccagtgaaattgacctgcccgtgaagaggcgggcatgacacagcaagacgagaagaccctatggagctttaatttattaatgcaaacagtacctaacaaacccacaggtcctaaactaccaaacctgcattaaaaatttcggttggggcgacctcggagcagaacccaacctccgagcagtacatgctaagacttcaccagtcaaagcgaactactatactcaattgatccaataacttgaccaacggaacaagttaccctagggataacagcgcaatcctattctagagtccatatcaacaatagggtttacgacctcgatgttggatcaggacatcccgatggtgcagccgctattaaaggttcgtttgttcaacgattaaagtcctacgtgatctgagttcagaccggagtaatccaggtcggtttctatctacnttcaaattcctccctgtacgaaaggacaagagaaataaggcctacttcacaaagcgccttcccccgtaaatgatatcatctcaacttagtattatacccacacccacccaagaacagggtttgttaagatggcagagcccggtaatcgcataaaacttaaaactttacagtcagaggttcaattcctcttcttaacaacatacccatggccaacctcctactcctcattgtacccattctaatcgcaatggcattcctaatgcttaccgaacgaaaaattctaggctatatacaactacgcaaaggccccaacgttgtaggcccctacgggctactacaacccttcgctgacgccataaaactcttcaccaaggagcccctaaaacccgccacatctaccatcaccctctacatcaccgccccgaccttagctctcaccatcgctcttctactatgaacccccctccccatacccaaccccctggtcaacctcaacctaggcctcctatttattctagccacctctagcctagccgtttactcaatcctctgatcagggtgagcatcaaactcaaactacgccctgatcggcgcactgcgagcagtagcccaaacaatctcatatgaagtcaccctagccatcattctactatcaacattactaataagtggctcctttaacctctccacccttatcacaacacaagaacacctctgattactcctgccatcatgacccttggccataatatgatttatctccacactagcagagaccaaccgaacccccttcgaccttgccgaaggggagtccgaactagtctcaggcttcaacatcgaatacgccgcaggccccttcgccctattcttcatagccgaatacacaaacattattataataaacaccctcaccactacaatcttcctaggaacaacatatgacgcactctcccctgaactctacacaacatattttgtcaccaagaccctacttctaacctccctgttcttatgaattcgaacagcatacccccgattccgctacgaccaactcatacacctcctatgaaaaaacttcctaccactcaccctagcattacttatatgatatgtctccatacccattacaatctccagcattccccctcaaacctaagaaatatgtctgataaaagagttactttgatagagtaaataataggagcttaaacccccttatttctaggactatgagaatcgaacccatccctgagaatccaaaattctccgtgccacctatcacaccccatcctaaagtaaggtcagctaaataagctatcgggcccataccccgaaaatgttggttatacccttcccgtactaattaatcccctggcccaacccgtcatctactctaccatctttgcaggcacactcatcacagcgctaagctcgcactgattttttacctgagtaggcctagaaataaacatgctagcttttattccagttctaaccaaaaaaataaaccctcgttccacagaagctgccatcaagtatttcctcacgcaagcaaccgcatccataatccttctaatagctatcctcttcaacaatatactctccggacaatgaaccataaccaatactaccaatcaatactcatcattaataatcataatggctatagcaataaaactaggaatagccccctttcacttctgagtcccagaggttacccaaggcacccctctgacatccggcctgcttcttctcacatgacaaaaactagcccccatctcaatcatataccaaatctctccctcactaaacgtaagccttctcctcactctctcaatcttatccatcatagcaggcagttgaggtggattaaaccaaacccagctacgcaaaatcttagcatactcctcaattacccacataggatgaataatagcagttctaccgtacaaccctaacataaccattcttaatttaactatttatattatcctaactactaccgcattcctactactcaacttaaactccagcaccacgaccctactactatctcgcacctgaaacaagctaacatgactaacacccttaattccatccaccctcctctccctaggaggcctgcccccgctaaccggctttttgcccaaatgggccattatcgaagaattcacaaaaaacaatagcctcatcatccccaccatcatagccaccatcaccctccttaacctctacttctacctacgcctaatctactccacctcaatcacactactccccatatctaacaacgtaaaaataaaatgacagtttgaacatacaaaacccaccccattcctccccacactcatcgcccttaccacgctactcctacctatctccccttttatactaataatcttatagaaatttaggttaaatacagaccaagagccttcaaagccctcagtaagttgcaatacttaatttctgtaacagctaaggactgcaaaaccccactctgcatcaactgaacgcaaatcagccactttaattaagctaagcccttactagaccaatgggacttaaacccacaaacacttagttaacagctaagcaccctaatcaactggcttcaatctacttctcccgccgccgggaaaaaaggcgggagaagccccggcaggtttgaagctgcttcttcgaatttgcaattcaatatgaaaatcacctcggagctggtaaaaagaggcctaacccctgtctttagatttacagtccaatgcttcactcagccattttacctcacccccactgatgttcgccaaccgttgactattctctacaaaccacaaagacattggaacactatacctattattcggcgcatgagctggagtcctaggcacagctctaagcctccttattcgagccgagctgggccagccaggcaaccttctaggtaacgaccacatctacaacgttatcgtcacagcccatgcatttgtaataatcttcttcatagtaatacccatcataatcggaggctttggcaactgactagttcccctaataatcggtgcccccgatatggcgtttccccgcataaacaacataagcttctgactcttacctccctctctcctactcctgctcgcatctgctatagtggaggccggagcaggaacaggttgaacagtctaccctcccttagcagggaactactcccaccctggagcctccgtagacctaaccatcttctccttacacctagcaggtgtctcctctatcttaggggccatcaatttcatcacaacaattatcaatataaaaccccctgccataacccaataccaaacgcccctcttcgtctgatccgtcctaatcacagcagtcctacttctcctatctctcccagtcctagctgctggcatcactatactactaacagaccgcaacctcaacaccaccttcttcgaccccgccggaggaggagaccccattctataccaacacctattctgatttttcggtcaccctgaagtttatattcttatcctaccaggcttcggaataatctcccatattgtaacttactactccggaaaaaaagaaccatttggatacataggtatggtctgagctatgatatcaattggcttcctagggtttatcgtgtgagcacaccatatatttacagtaggaatagacgtagacacacgagcatatttcacctccgctaccataatcatcgctatccccaccggcgtcaaagtatttagctgactcgccacactccacggaagcaatatgaaatgatctgctgcagtgctctgagccctaggattcatctttcttttcaccgtaggtggcctgactggcattgtattagcaaactcatcactagacatcgtactacacgacacgtactacgttgtagctcacttccactatgtcctatcaataggagctgtatttgccatcataggaggcttcattcactgatttcccctattctcaggctacaccctagaccaaacctacgccaaaatccatttcactatcatattcatcggcgtaaatctaactttcttcccacaacactttctcggcctatccggaatgccccgacgttactcggactaccccgatgcatacaccacatgaaacatcctatcatctgtaggctcattcatttctctaacagcagtaatattaataattttcatgatttgagaagccttcgcttcgaagcgaaaagtcctaatagtagaagaaccctccataaacctggagtgactatatggatgccccccaccctaccacacattcgaagaacccgtatacataaaatctagacaaaaaaggaaggaatcgaaccccccaaagctggtttcaagccaaccccatggcctccatgactttttcaaaaaggtattagaaaaaccatttcataactttgtcaaagttaaattataggctaaatcctatatatcttaatggcacatgcagcgcaagtaggtctacaagacgctacttcccctatcatagaagagcttatcacctttcatgatcacgccctcataatcattttccttatctgcttcctagtcctgtatgcccttttcctaacactcacaacaaaactaactaatactaacatctcagacgctcaggaaatagaaaccgtctgaactatcctgcccgccatcatcctagtcctcatcgccctcccatccctacgcatcctttacataacagacgaggtcaacgatccctcccttaccatcaaatcaattggccaccaatggtactgaacctacgagtacaccgactacggcggactaatcttcaactcctacatacttcccccattattcctagaaccaggcgacctgcgactccttgacgttgacaatcgagtagtactcccgattgaagcccccattcgtataataattacatcacaagacgtcttgcactcatgagctgtccccacattaggcttaaaaacagatgcaattcccggacgtctaaaccaaaccactttcaccgctacacgaccgggggtatactacggtcaatgctctgaaatctgtggagcaaaccacagtttcatgcccatcgtcctagaattaattcccctaaaaatctttgaaatagggcccgtatttaccctatagcaccccctctaccccctctagagcccactgtaaagctaacttagcattaaccttttaagttaaagattaagagaaccaacacctctttacagtgaaatgccccaactaaatactaccgtatggcccaccataattacccccatactccttacactattcttcatcacccaactaaaaatattaaacacaaactaccacctacctccctcaccaaagcccataaaaataaaaaattataacaaaccctgagaaccaaaatgaacgaaaatctgttcgcttcattcattgcccccacaatcctaggcctacccgccgcagtactgatcattctatttccccctctattgatccccacctccaaatatctcatcaacaaccgactaatcaccacccaacaatgactaatcaaactaacctcaaaacaaatgataaccatacacaacactaaaggacgaacctgatctcttatactagtatccttaatcatttttattgccacaactaacctcctcggactcctgcctcactcatttacgccaaccacccaactatctataaacctagccatggccatccccttatgagcgggcgcagtgattataggctttcgctctaagattaaaaatgccctagcccacttcttaccacaaggcacacctacaccccttatccccatactagttattatcgaaaccatcagcctactcattcaaccaatagccctggccgtacgcctaaccgctaacattactgcaggccacctactcatgcacctaattggaagcaccaccctagcaatatcaaccattaaccttccctctacacttatcatcttcacaattctaattctactgactatcctagaaatcgctgtcgccttaatccaagcctacgttttcacacttctagtaagcctctacctgcacgacaacacataatgacccaccaatcacatgcctatcatatagtaaaacccagcccatgacccctaacaggggccctctcagccctcctaatgacctccggcctagccatgtgatttcacttccactccataacgctcctcatactaggcctactaaccaacacactaaccatataccaatgatggcgcgatgtaacacgagaaagcacataccaaggccaccacacaccacctgtccaaaaaggccttcgatacgggataatcctatttattacctcagaagtttttttcttcgcaggatttttctgagccttttaccactccagcctagcccctaccccccaattaggagggcactggcccccaacaggcatcaccccgctaaatcccctagaagtcccactcctaaacacatccgtattactcgcatcaggagtatcaatcacctgagctcaccatagtctaatagaaaacaaccgaaaccaaataattcaagcactgctcattacaattttactgggtctctattttaccctcctacaagcctcagagtacttcgagtctcccttcaccatttccgacggcatctacggctcaacattttttgtagccacaggcttccacggacttcacgtcattattggctcaactttcctcactatctgcttcatccgccaactaatatttcactttacatccaaacatcactttggcttcgaagccgccgcctgatactggcattttgtagatgtggtttgactatttctatatgtctccatctattgatgagggtcttactcttttagtataaatagtaccgttaacttccaattaactagttttgacaacattcaaaaaagagtaataaacttcgccttaattttaataatcaacaccctcctagccttactactaataattattacattttgactaccacaactcaacggctacatagaaaaatccaccccttacgagtgcggcttcgaccctatatcccccgcccgcgtccctttctccataaaattcttcttagtagctattaccttcttattatttgatctagaaattgccctccttttacccctaccatgggccctacaaacaactaacctgccactaatagttatgtcatccctcttattaatcatcatcctagccctaagtctggcctatgagtgactacaaaaaggattagactgagccgaattggtatatagtttaaacaaaacgaatgatttcgactcattaaattatgataatcatatttaccaaatgcccctcatttacataaatattatactagcatttaccatctcacttctaggaatactagtatatcgctcacacctcatgtcctccctactatgcctagaaggaataatactatcgctgttcattatagctactctcataaccctcaacacccactccctcttagccaatattgtgcctattgccatactagtctttgccgcctgcgaagcagcggtgggcctagccctactagtctcaatctccaacacatatggcctagactacgtacataacctaaacctactccaatgctaaaactaatcgtcccaacaattatattactaccactgacatgactttccaaaaaacacataatttgaatcaacacaaccacccacagcctaattattagcatcatccctctactattttttaaccaaatcaacaacaacctatttagctgttccccaaccttttcctccgaccccctaacaacccccctcctaatactaactacctgactcctacccctcacaatcatggcaagccaacgccacttatccagtgaaccactatcacgaaaaaaactctacctctctatactaatctccctacaaatctccttaattataacattcacagccacagaactaatcatattttatatcttcttcgaaaccacacttatccccaccttggctatcatcacccgatgaggcaaccagccagaacgcctgaacgcaggcacatacttcctattctacaccctagtaggctcccttcccctactcatcgcactaatttacactcacaacaccctaggctcactaaacattctactactcaccctcactgcccaagaactatcaaactcctgagccaacaacttaatatgactagcttacacaatagcttttatagtaaagatacctctttacggactccacttatgactccctaaagcccatgtcgaagcccccatcgctgggtcaatagtacttgccgcagtactcttaaaactaggcggctatggtataatacgcctcacactcattctcaaccccctgacaaaacacatagcctaccccttccttgtactatccctatgaggcataattataacaagctccatctgcctacgacaaacagacctaaaatcgctcattgcatactcttcaatcagccacatagccctcgtagtaacagccattctcatccaaaccccctgaagcttcaccggcgcagtcattctcataatcgcccacggacttacatcctcattactattctgcctagcaaactcaaactacgaacgcactcacagtcgcatcataatcctctctcaaggacttcaaactctactcccactaatagctttttgatgacttctagcaagcctcgctaacctcgccttaccccccactattaacctactgggagaactctctgtgctagtaaccacgttctcctggtcaaatatcactctcctacttacaggactcaacatactagtcacagccctatactccctctacatatttaccacaacacaatggggctcactcacccaccacattaacaacataaaaccctcattcacacgagaaaacaccctcatgttcatacacctatcccccattctcctcctatccctcaaccccgacatcattaccgggttttcctcttgtaaatatagtttaaccaaaacatcagattgtgaatctgacaacagaggcttacgaccccttatttaccgagaaagctcacaagaactgctaactcatgcccccatgtctaacaacatggctttctcaacttttaaaggataacagctatccattggtcttaggccccaagaattttggtgcaactccaaataaaagtaataaccatgcacactactataaccaccctaaccctaacttccctaattccccccatccttaccaccctcgttaaccctaacaaaaaaaactcatacccccattatgtaaaatccattgtcgcatccacctttattatcagtctcttccccacaacaatattcatgtgcctagaccaagaagttattatctcgaactgacactgagccacaacccaaacaacccagctctccctaagcttcaaactagactacttctccataatattcatccctgtagcattgttcgttacatggtccatcatagaattctcactgtgatatataaactcagacccaaacattaatcagttcttcaaatatctactcatcttcctaattaccatactaatcttagttaccgctaacaacctattccaactgttcatcggctgagagggcgtaggaattatatccttcttgctcatcagttgatgatacgcccgagcagatgccaacacagcagccattcaagcaatcctatacaaccgtatcggcgatatcggtttcatcctcgccttagcatgatttatcctacactccaactcatgagacccacaacaaatagcccttctaaacgctaatccaagcctcaccccactactaggcctcctcctagcagcagcaggcaaatcagcccaattaggtctccacccctgactcccctcagccatagaaggccccaccccagtctcagccctactccactcaagcactatagttgtagcaggaatcttcttactcatccgcttccaccccctagcagaaaatagcccactaatccaaactctaacactatgcttaggcgctatcaccactctgttcgcagcagtctgcgcccttacacaaaatgacatcaaaaaaatcgtagccttctccacttcaagtcaactaggactcataatagttacaatcggcatcaaccaaccacacctagcattcctgcacatctgtacccacgccttcttcaaagccatactatttatgtgctccgggtccatcatccacaaccttaacaatgaacaagatattcgaaaaataggaggactactcaaaaccatacctctcacttcaacctccctcaccattggcagcctagcattagcaggaatacctttcctcacaggtttctactccaaagaccacatcatcgaaaccgcaaacatatcatacacaaacgcctgagccctatctattactctcatcgctacctccctgacaagcgcctatagcactcgaataattcttctcaccctaacaggtcaacctcgcttccccacccttactaacattaacgaaaataaccccaccctactaaaccccattaaacgcctggcagccggaagcctattcgcaggatttctcattactaacaacatttcccccgcatcccccttccaaacaacaatccccctctacctaaaactcacagccctcgctgtcactttcctaggacttctaacagccctagacctcaactacctaaccaacaaacttaaaataaaatccccactatgcacattttatttctccaacatactcggattctaccctagcatcacacaccgcacaatcccctatctaggccttcttatgagccaaaacctgcccctactcctcctagacctaacctgactagaaaagctattacctaaaacaatttcacagcaccaaatctccacctccatcatcacctcaacccaaaaaggcataattaaactttacttcctctctttcttcttcccactcatcctaaccctactcctaatcacataacctattcccccgagcaatttcaattacaatatatacaccaacaaacaatgttcaaccagtaactactactaatcaacgcccataatcatacaaagcccccgcaccaataggatcctcccgaatcaaccctgacccctctccttcataaattattcagcttcctacactattaaagtttaccacaaccaccaccccatcatactctttcacccacagcaccaatcctacctccatcgctaaccccactaaaacactcaccaagacctcaacccctgacccccatgcctcaggatactcctcaatagccatcgctgtagtatatccaaagacaaccatcattccccctaaataaattaaaaaaactattaaacccatataacctcccccaaaattcagaataataacacacccgaccacaccgctaacaatcaatactaaacccccataaataggagaaggcttagaagaaaaccccacaaaccccattactaaacccacactcaacagaaacaaagcatacatcattattctcgcacggactacaaccacgaccaatgatatgaaaaaccatcgttgtatttcaactacaagaacaccaatgaccccaatacgcaaaattaaccccctaataaaattaattaaccactcactcatcgacctccccaccccatccaacatctccgcatgatgaaacttcggctcactccttggcgcctgcctgatcctccaaatcaccacaggactattcctagccatgcactactcaccagacgcctcaaccgccttttcatcaatcgcccacatcactcgagacgtaaattatggctgaatcatccgctaccttcacgccaatggcgcctcaatattctttatctgcctcttcctacacatcgggcgaggcctatattacggatcatttctctactcagaaacctgaaacatcggcattatcctcctgcttgcaactatagcaacagccttcataggctatgtcctcccgtgaggccaaatatcattctgaggggccacagtaattacaaacttactatccgccatcccatacattgggacagacctagttcaatgaatctgaggaggctactcagtaaacagtcccaccctcacacgattctttacctttcacttcatcttgcccttcattattgcagccctagcagcactccacctcctattcttgcacgaaacgggatcaaacaaccccctaggaatcacctcccattccgataaaatcaccttccacccttactacacaatcaaagacgccctcggcttacttctcttccttctctccttaatgacattaacactattctcaccagacctcctaggcgacccagacaattataccctagccaaccccttaaacacccctccccacatcaagcccgaatgatatttcctattcgcctacacaattctccgatccgtccctaacaaactaggaggcgtccttgccctattactatccatcctcatcctagcaataatccccatcctccatatatccaaacaacaaagcataatatttcgcccactaagccaatcactttattgactcctagccgcagacctcctcattctaacctgaatcggaggacaaccagtaagctacccttttaccatcattggacaagtagcatccgtactatacttcacaacaatcctaatcctaataccaactatctccctaattgaaaacaaaatactcaaatgggcctgtccttgtagtataaactaatacaccagtcttgtaaaccggagatgaaaacctttttctaaggacaaatcagagaaaaagtctttaactccaccattagcacccaaagctaagattctaatttaaactattctctgttctttcatggggaagcagatttgggtaccacccaagtattgactcacccatcaacaaccgctatgtatttcgtacattactgccagccaccatgaatattgtacggtaccataaatacttgaccacctgtagtacataaaaacccaatccacatcaaaaccccctccccatgcttacaagcaagtacagcaatcaacccccaactatcacacatcaactgcaactccaaagccacccctcacccactaggataccaacaaacctacccacccttaacagtacatagcacataaaaccatttaccgtacatagcacattacagtcaaatcccttctcgtccccatggatgacccccctcagataggggtcccttgaccaccatcctccgtgaaatcaatatcccgcacaagagtgctactctcctcgctccgggcccataacacttgggggtagctaaagtgaactgtatccgacatctggttcctacttcagggccataaagcctaaatagcccacacgttccccttaaataagacatcacgatg

SEQ ID NO: 355 - DNA, 16570 bp, Homo sapiens mitochondrial
  3108: "n" refers to a nucleotide at position 3107 of the Cambridge Reference Sequence (CRS, Anderson et al. 1981 Nature 290:457-465), later determined to be absent from the human mtDNA sequence according to the revised CRS (rCRS, Andrews et al. 1999 Nature Genetics 23:147); "n" therefore represents a single nucleotide deletion at a position corresponding to nucleotide 3107 of SEQ ID NO:1 as provided herein.
gatcacaggtctatcaccctattaaccactcacgggagctctccatgcatttggtattttcgtctggggggtgtgcacgcgatagcattgcgagacgctggagccggagcaccctatgtcgcagtatctgtctttgattcctgcctcatcctattatttatcgcacctacgttcaatattacaggcgaacatacttactaaagtgtgttaattaattaatgcttgtaggacataataataacaattgaatgtctgcacagccgctttccacacagacatcataacaaaaaatttccaccaaaccccccctcccccgccttctggccacagcacttaaacacatctctgccaaaccccaaaaacaaagaaccctaacaccagcctaaccagatttcaaattttatcttttggcggtatgcacttttaacagtcaccccccaactaacacattattttcccctcccactcccatactactaatctcatcaatacaacccccgcccatcctacccagcacacacacaccgctgctaaccccataccccgaaccaaccaaaccccaaagacaccccccacagtttatgtagcttacctcctcaaagcaatacactgaaaatgtttagacgggctcacatcaccccataaacaaataggtttggtcctagcctttctattagctcttagtaagattacacatgcaagcatccccgttccagtgagttcaccctctaaatcaccacgatcaaaagggacaagcatcaagcacgcagcaatgcagctcaaaacgcttagcctagccacacccccacgggaaacagcagtgattaacctttagcaataaacgaaagtttaactaagctatactaaccccagggttggtcaatttcgtgccagccaccgcggtcacacgattaacccaagtcaatagaagccggcgtaaagagtgttttagatcaccccctccccaataaagctaaaactcacctgagttgtaaaaaactccagttgacacaaaatagactacgaaagtggctttaacatatctgaacacacaatagctaagacccaaactgggattagataccccactatgcttagccctaaacctcaacagttaaatcaacaaaactgctcgccagaacactacgagccacagcttaaaactcaaaggacctggcggtgcttcatatccctctagaggagcctgttctgtaatcgataaaccccgatcaacctcaccacctcttgctcagcctatataccgccatcttcagcaaaccctgatgaaggctacaaagtaagcgcaagtacccacgtaaagacgttaggtcaaggtgtagcccatgaggtggcaagaaatgggctacattttctaccccagaaaactacgatagcccttatgaaacttaagggtcgaaggtggatttagcagtaaactgagagtagagtgcttagttgaacagggccctgaagcgcgtacacaccgcccgtcaccctcctcaagtatacttcaaaggacatttaactaaaacccctacgcatttatatagaggagacaagtcgtaacatggtaagtgtactggaaagtgcacttggacgaaccagagtgtagcttaacacaaagcacccaacttacacttaggagatttcaacttaacttgaccgctctgagctaaacctagccccaaacccactccaccttactaccagacaaccttagccaaaccatttacccaaataaagtataggcgatagaaattgaaacctggcgcaatagatatagtaccgcaagggaaagatgaaaaattataaccaagcataatatagcaaggactaacccctataccttctgcataatgaattaactagaaataactttgcaaggagagccaaagctaagacccccgaaaccagacgagctacctaagaacagctaaaagagcacacccgtctatgtagcaaaatagtgggaagatttataggtagaggcgacaaacctaccgagcctggtgatagctggttgtccaagatagaatcttagttcaactttaaatttgcccacagaaccctctaaatccccttgtaaatttaactgttagtccaaagaggaacagctctttggacactaggaaaaaaccttgtagagagagtaaaaaatttaacacccatagtaggcctaaaagcagccaccaattaagaaagcgttcaagctcaacacccactacctaaaaaatcccaaacatataactgaactcctcacacccaattggaccaatctatcaccctatagaagaactaatgttagtataagtaacatgaaaacattctcctccgcataagcctgcgtcagattaaaacactgaactgacaattaacagcccaatatctacaatcaaccaacaagtcattattaccctcactgtcaacccaacacaggcatgctcataaggaaaggttaaaaaaagtaaaaggaactcggcaaatcttaccccgcctgtttaccaaaaacatcacctctagcatcaccagtattagaggcaccgcctgcccagtgacacatgtttaacggccgcggtaccctaaccgtgcaaaggtagcataatcacttgttccttaaatagggacctgtatgaatggctccacgagggttcagctgtctcttacttttaaccagtgaaattgacctgcccgtgaagaggcgggcatgacacagcaagacgagaagaccctatggagctttaatttattaatgcaaacagtacctaacaaacccacaggtcctaaactaccaaacctgcattaaaaatttcggttggggcgacctcggagcagaacccaacctccgagcagtacatgctaagacttcaccagtcaaagcgaactactatactcaattgatccaataacttgaccaacggaacaagttaccctagggataacagcgcaatcctattctagagtccatatcaacaatagggtttacgacctcgatgttggatcaggacatcccgatggtgcagccgctattaaaggttcgtttgttcaacgattaaagtcctacgtgatctgagttcagaccggagtaatccaggtcggtttctatctacnttcaaattcctccctgtacgaaaggacaagagaaataaggcctacttcacaaagcgccttcccccgtaaatgatatcatctcaacttagcattatacccacacccacccaagaacagggtttgttaagatggcagagcccggtaatcgcataaaacttaaaactttacagtcagaggttcaattcctcttcttaacaacatacccatggccaacctcctactcctcattgtacccattctaatcgcaatggcattcctaatgcttaccgaacgaaaaattctaggctatatacaactacgcaaaggccccaacgttgtaggcccctacgggctactacaacccttcgctgacgccataaaactcttcaccaaagagcccctaaaacccgccacatctaccatcaccctctacatcaccgccccgaccttagctctcaccatcgctcttctactatgaacccccctccccatacccaaccccctggtcaacctcaacctaggcctcctatttattctagccacctctagcctagccgtttactcaatcctctgatcagggtgagcatcaaactcaaactacgccctgatcggcgcactgcgagcagtagcccaaacaatctcatatgaagtcaccctagccatcattctactatcaacattactaataagtggctcctttaacctctccacccttatcacaacacaagaacacctctgattactcctgccatcatgacccttggccataatatgatttatctccacactagcagagaccaaccgaacccccttcgaccttgccgaaggggagtccgaactagtctcaggcttcaacatcgaatacgccgcaggccccttcgccctattcttcatagccgaatacacaaacattattataataaacaccctcaccactacaatcttcctaggaacaacatatgacgcactctcccctgaactctacacaacatattttgtcaccaagaccctacttctaacctccctgttcttatgaattcgaacagcatacccccgattccgctacgaccaactcatacacctcctatgaaaaaacttcctaccactcaccctagcattacttatatgatatgtctccatacccattacaatctccagcattccccctcaaacctaagaaatatgtctgataaaagagttactttgatagagtaaataataggagcttaaacccccttatttctaggactatgagaatcgaacccatccctgagaatccaaaattctccgtgccacctatcacaccccatcctaaagtaaggtcagctaaataagctatcgggcccataccccgaaaatgttggttatacccttcccgtactaattaatcccctggcccaacccgtcatctactctaccatctttgcaggcacactcatcacagcgctaagctcgcactgattttttacctgagtaggcctagaaataaacatgctagcttttattccagttctaaccaaaaaaataaaccctcgttccacagaagctgccatcaagtatttcctcacgcaagcaaccgcatccataatccttctaatagctatcctcttcaacaatatactctccggacaatgaaccataaccaatactaccaatcaatactcatcattaataatcataatggctatagcaataaaactaggaatagccccctttcacttctgagtcccagaggttacccaaggcacccctctgacatccggcctgcttcttctcacatgacaaaaactagcccccatctcaatcatataccaaatctctccctcactaaacgtaagccttctcctcactctctcaatcttatccatcatagcaggcagttgaggtggattaaaccaaacccagctacgcaaaatcttagcatactcctcaattacccacataggatgaataatagcagttctaccgtacaaccctaacataaccattcttaatttaactatttatattatcctaactactaccgcattcctactactcaacttaaactccagcaccacgaccctactactatctcgcacctgaaacaagctaacatgactaacacccttaattccatccaccctcctctccctaggaggcctgcccccgctaaccggctttttgcccaaatgggccattatcgaagaattcacaaaaaacaatagcctcatcatccccaccatcatagccaccatcaccctccttaacctctacttctacctacgcctaatctactccacctcaatcacactactccccatatctaacaacgtaaaaataaaatgacagtttgaacatacaaaacccaccccattcctccccacactcatcgcccttaccacgctactcctacctatctccccttttatactaataatcttatagaaatttaggttaaatacagaccaagagccttcaaagccctcagtaagttgcaatacttaatttctgtaacagctaaggactgcaaaaccccactctgcatcaactgaacgcaaatcagccactttaattaagctaagcccttactagaccaatgggacttaaacccacaaacacttagttaacagctaagcaccctaatcaactggcttcaatctacttctcccgccgccgggaaaaaaggcgggagaagccccggcaggtttgaagctgcttcttcgaatttgcaattcaatatgaaaatcacctcggagctggtaaaaagaggcctaacccctgtctttagatttacagtccaatgcttcactcagccattttacctcacccccactgatgttcgccgaccgttgactattctctacaaaccacaaagacattggaacactatacctattattcggcgcatgagctggagtcctaggcacagctctaagcctccttattcgagccgagctgggccagccaggcaaccttctaggtaacgaccacatctacaacgttatcgtcacagcccatgcatttgtaataatcttcttcatagtaatacccatcataatcggaggctttggcaactgactagttcccctaataatcggtgcccccgatatggcgtttccccgcataaacaacataagcttctgactcttacctccctctctcctactcctgctcgcatctgctatagtggaggccggagcaggaacaggttgaacagtctaccctcccttagcagggaactactcccaccctggagcctccgtagacctaaccatcttctccttacacctagcaggtgtctcctctatcttaggggccatcaatttcatcacaacaattatcaatataaaaccccctgccataacccaataccaaacgcccctcttcgtctgatccgtcctaatcacagcagtcctacttctcctatctctcccagtcctagctgctggcatcactatactactaacagaccgcaacctcaacaccaccttcttcgaccccgccggaggaggagaccccattctataccaacacctattctgatttttcggtcaccctgaagtttatattcttatcctaccaggcttcggaataatctcccatattgtaacttactactccggaaaaaaagaaccatttggatacataggtatggtctgagctatgatatcaattggcttcctagggtttatcgtgtgagcacaccatatatttacagtaggaatagacgtagacacacgagcatatttcacctccgctaccataatcatcgctatccccaccggcgtcaaagtatttagctgactcgccacactccacggaagcaatatgaaatgatctgctgcagtgctctgagccctaggattcatctttcttttcaccgtaggtggcctgactggcattgtattagcaaactcatcactagacatcgtactacacgacacgtactacgttgtagctcacttccactatgtcctatcaataggagctgtatttgccatcataggaggcttcattcactgatttcccctattctcaggctacaccctagaccaaacctacgccaaaatccatttcactatcatattcatcggcgtaaatctaactttcttcccacaacactttctcggcctatccggaatgccccgacgttactcggactaccccgatgcatacaccacatgaaacatcctatcatctgtaggctcattcatttctctaacagcagtaatattaataattttcatgatttgagaagccttcgcttcgaagcgaaaagtcctaatagtagaagaaccctccataaacctggagtgactatatggatgccccccaccctaccacacattcgaagaacccgtatacataaaatctagacaaaaaaggaaggaatcgaaccccccaaagctggtttcaagccaaccccatggcctccatgactttttcaaaaaggtattagaaaaaccatttcataactttgtcaaagttaaattataggctaaatcctatatatcttaatggcacatgcagcgcaagtaggtctacaagacgctacttcccctatcatagaagagcttatcacctttcatgatcacgccctcataatcattttccttatctgcttcctagtcctgtatgcccttttcctaacactcacaacaaaactaactaatactaacatctcagacgctcaggaaatagaaaccgtctgaactatcctgcccgccatcatcctagtcctcatcgccctcccatccctacgcatcctttacataacagacgaggtcaacgatccctcccttaccatcaaatcaattggccaccaatggtactgaacctacgagtacaccgactacggcggactaatcttcaactcctacatacttcccccattattcctagaaccaggcgacctgcgactccttgacgttgacaatcgagtagtactcccgattgaagcccccattcgtataataattacatcacaagacgtcttgcactcatgagctgtccccacattaggcttaaaaacagatgcaattcccggacgtctaaaccaaaccactttcaccgctacacgaccgggggtatactacggtcaatgctctgaaatctgtggagcaaaccacagtttcatgcccatcgtcctagaattaattcccctaaaaatctttgaaatagggcccgtatttaccctatagcaccccctctaccccctctagagcccactgtaaagctaacttagcattaaccttttaagttaaagattaagagaaccaacacctctttacagtgaaatgccccaactaaatactaccgtatggcccaccataattacccccatactccttacactattcctcatcacccaactaaaaatattaaacacaaactaccacctacctccctcaccaaagcccataaaaataaaaaattataacaaaccctgagaaccaaaatgaacgaaaatctgttcgcttcattcattgcccccacaatcctaggcctacccgccgcagtactgatcattctatttccccctctattgatccccacctccaaatatctcatcaacaaccgactaatcaccacccaacaatgactaatcaaactaacctcaaaacaaatgataaccatacacaacactaaaggacgaacctgatctcttatactagtatccttaatcatttttattgccacaactaacctcctcggactcctgcctcactcatttacaccaaccacccaactatctataaacctagccatggccatccccttatgagcgggcgcagtgattataggctttcgctctaagattaaaaatgccctagcccacttcttaccacaaggcacacctacaccccttatccccatactagttattatcgaaaccatcagcctactcattcaaccaatagccctggccgtacgcctaaccgctaacattactgcaggccacctactcatgcacctaattggaagcgccaccctagcaatatcaaccattaaccttccctctacacttatcatcttcacaattctaattctactgactatcctagaaatcgctgtcgccttaatccaagcctacgttttcacacttctagtaagcctctacctgcacgacaacacataatgacccaccaatcacatgcctatcatatagtaaaacccagcccatgacccctaacaggggccctctcagccctcctaatgacctccggcctagccatgtgatttcacttccactccataacgctcctcatactaggcctactaaccaacacactaaccatataccaatgatggcgcgatgtaacacgagaaagcacataccaaggccaccacacaccacctgtccaaaaaggccttcgatacgggataatcctatttattacctcagaaatttttttcttcgcaggatttttctgagccttttaccactccagcctagcccctaccccccaattaggagggcactggcccccaacaggcatcaccccgctaaatcccctagaagtcccactcctaaacacatccgtattactcgcatcaggagtgtcaatcacctgagctcaccatagtctaatagaaagcaaccgaaaccaaataattcaagcactgcttattacaattttactgggtctctattttaccctcctacaagcctcagagtacttcgagtctcccttcaccatttccgacggcatctacggctcaacattttttgtagccacaggcttccacggacttcacgtcattattggctcaactttcctcactatctgcttcatccgccaactaatatttcactttacatccaaacatcactttggcttcgaagccgccgcctgatactggcattttgtagatgtggtttgactatttctgtatgtctccatctattgatgagggtcttactcttttagtataaatagtaccgttaacttccaattaactagttttgacaacattcaaaaaagagtaataaacttcgccttaattttaataatcaacaccctcctagccttactactaataattattacattttgactaccacaactcaacggctacatagaaaaatccaccccttacgagtgcggcttcgaccctatatcccccgcccgcgtccctttctccataaaattcttcttagtagctattaccttcttattatttgatctagaaattgccctccttttacccctaccatgagccctacaaacaactaacctgccactaatagttatgtcatccctcttattaatcatcatcctagccctaagtctggcctatgagtgactacaaaaaggattagactgaaccgaattggtatatagtttaaacaaaacgaatgatttcgactcattaaattatgataatcatatttaccaaatgcccctcatttacataaatattatactagcatttaccatctcacttctaggaatactagtatatcgctcacacctcatatcctccctactatgcctagaaggaataatactatcgctgttcattatagctactctcataaccctcaacacccactccctcttagccaatattgtgcctattgccatactagtctttgccgcctgcgaagcagcggtgggcctagccctactagtctcaatctccaacacatatggcctagactacgtacataacctaaacctactccaatgctaaaactaatcgtcccaacaattatattactaccactgacatgactttccaaaaaacacataatttgaatcaacacaaccacccacagcctaattattagcatcatccctctactattttttaaccaaatcaacaacaacctatttagctgttccccaaccttttcctccgaccccctaacaacccccctcctaatactaactacctgactcctacccctcacaatcatggcaagccaacgccacttatccagtgaaccactatcacgaaaaaaactctacctctctatactaatctccctacaaatctccttaattataacattcacagccacagaactaatcatattttatatcttcttcgaaaccacacttatccccaccttggctatcatcacccgatgaggcaaccagccagaacgcctgaacgcaggcacatacttcctattctacaccctagtaggctcccttcccctactcatcgcactaatttacactcacaacaccctaggctcactaaacattctactactcactctcactgcccaagaactatcaaactcctgagccaacaacttaatatgactagcttacacaatagcttttatagtaaagatacctctttacggactccacttatgactccctaaagcccatgtcgaagcccccatcgctgggtcaatagtacttgccgcagtactcttgaaactaggcggctatggtataatacgcctcacactcattctcaaccccctgacaaaacacatagcctaccccttccttgtactatccctatgaggcataattataacaagctccatctgcctacgacaaacagacctaaaatcgctcattgcatactcttcaatcagccacatagccctcgtagtaacagccattctcatccaaaccccctgaagcttcaccggcgcagtcattctcataatcgcccacggacttacatcctcattactattctgcctagcaaactcaaactacgaacgcactcacagtcgcatcataatcctctctcaaggacttcaaactctactcccactaatagctttttgatgacttctagcaagcctcgctaacctcgccttaccccccactattaacctactgggagaactctctgtgctagtaaccacgttctcctgatcaaatatcactctcctacttacaggactcaacatactagtcacagccctatactccctctacatatttaccacaacacaatggggctcactcacccaccacattaacaacataaaaccctcattcacacgagaaaacaccctcatgttcatacacctatcccccattctcctcctatccctcaaccccgacatcattaccgggttttcctcttgtaaatatagtttaaccaaaacatcagattgtgaatctgacaacagaggcttacgaccccttatttaccgagaaagctcacaagaactgctaactcatgcccccatgtctaacaacatggctttctcaacttttaaaggataacagctatccattggtcttaggccccaagaattttggtgcaactccaaataaaagtaataaccatgcacactactataaccaccctaaccctaacttccctaattccccccatccttaccaccctcgttaaccctaacaaaaaaaactcatacccccattatgtaaaatccattgtcgcatccacctttattatcagtctcttccccacaacaatattcatgtgcctagaccaagaagttattatctcgaactgacactgagccacaacccaaacaacccagctctccctaagcttcaaactagactacttctccataatattcatccctgtagcattgttcgttacatggtccatcatagaattctcactgtgatatataaactcagacccaaacattaatcagttcttcaaatatctactcatcttcctaattaccatactaatcttagttaccgctaacaacctattccaactgttcatcggctgagagggcgtaggaattatatccttcttgctcatcagttgatgatacgcccgagcagatgccaacacagcagccattcaagcaatcctatacaaccgtatcggcgatatcggtttcatcctcgccttagcatgatttatcctacactccaactcatgagacccacaacaaatagcccttctaaacgctaatccaagcctcaccccactactaggcctcctcctagcagcagcaggcaaatcagcccaattaggtctccacccctgactcccctcagccatagaaggccccaccccagtctcagccctactccactcaagcactatagttgtagcaggaatcttcttactcatccgcttccaccccctagcagaaaatagcccactaatccaaactctaacactatgcttaggcgctatcaccactctgttcgcagcagtctgcgcccttacacaaaatgacatcaaaaaaatcgtagccttctccacttcaagtcaactaggactcataatagttacaatcggcatcaaccaaccacacctagcattcctgcacatctgtacccacgccttcttcaaagccatactatttatgtgctccgggtccatcatccacaaccttaacaatgaacaagatattcgaaaaataggaggactactcaaaaccatacctctcacttcaacctccctcaccattggcagcctagcattagcaggaatacctttcctcacaggtttctactccaaagaccacatcatcgaaaccgcaaacatatcatacacaaacgcctgagccctatctattactctcatcgctacctccctgacaagcgcctatagcactcgaataatccttctcaccctaacaggtcaacctcgcttccccacccttactaacattaacgaaaataaccccaccctactaaaccccattaaacgcctggcagccggaagcctattcgcaggatttctcattactaacaacatttcccccgcatcccccttccaaacaacaatccccctctacctaaaactcacagccctcgctgtcactttcctaggacttctaacagccctagacctcaactacctaaccaacaaacttaaaataaaatccccactatgcacattttatttctccaacatactcggattctaccctagcatcacacaccgcacaatcccctatctaggccttcttacgagccaaaacctgcccctactcctcctagacctaacctgactagaaaagctattacctaaaacaatttcacagcaccaaatctccacctccatcatcacctcaacccaaaaaggcataattaaactttacttcctctctttcttcttcccactcatcctaaccctactcctaatcacataacctattcccccgagcaatctcaattacaatatatacaccaacaaacaatgttcaaccagtaactactactaatcaacgcccataatcatacaaagcccccgcaccaataggatcctcccgaatcaaccctgacccctctccttcataaattattcagcttcctacactattaaagtttaccacaaccaccaccccatcatactctttcacccacagcaccaatcctacctccatcgctaaccccactaaaacactcaccaagacctcaacccctgacccccatgcctcaggatactcctcaatagccatcgctgtagtatatccaaagacaaccatcattccccctaaataaattaaaaaaactattaaacccatataacctcccccaaaattcagaataataacacacccgaccacaccgctaacaatcaatactaaacccccataaataggagaaggcttagaagaaaaccccacaaaccccattactaaacccacactcaacagaaacaaagcatacatcattattctcgcacggactacaaccacgaccaatgatatgaaaaaccatcgttgtatttcaactacaagaacaccaatgaccccaatacgcaaaattaaccccctaataaaattaattaaccgctcattcatcgacctccccaccccatccaacatctccgcatgatgaaacttcggctcactccttggcgcctgcctgatcctccaaatcaccacaggactattcctagccatgcactactcaccagacgcctcaaccgccttttcatcaatcgcccacatcactcgagacgtaaattatggctgaatcatccgctaccttcacgccaatggcgcctcaatattctttatctgcctcttcctacacatcgggcgaggcctatattacggatcatttctctactcagaaacctgaaacatcggcattatcctcctgcttgcaactatagcaacagccttcataggctatgtcctcccgtgaggccaaatatcattctgaggggccacagtaattacaaacttactatccgccatcccatacattggggcagacctagttcaatgaatctgaggaggctactcagtagacagtcccaccctcacacgattctttacctttcacttcatcttgcccttcattattgcagccctagcagcactccacctcctattcttgcacgaaacgggatcaaacaaccccctaggaatcacctcccattccgataaaatcaccttccacccttactacacaatcaaagacgccctcggcttacttctcttccttctctccttaatgacattaacactattctcaccagacctcctaggcgacccagacaattataccctagccaaccccttaaacacccctccccacatcaagcccgaatgatatttcctattcgcctacacaattctccgatccgtccctaacaaactaggaggcgtccttgccctattactatccatcctcatcctagcaataatccccatcctccatatatccaaacaacaaagcataatatttcgcccactaagccaatcactttattgactcctagccgcagacctcctcattctaacctgaatcggaggacaaccagtaagctacccttttaccatcattggacaagtagcatccgtactatacttcacaacaatcctaatcctaataccaactatctccctaattgaaaacaaaatactcaaatgggcctgtccttgtagtataaactaatacaccagtcttgtaaaccggagatgaaaacctttttccaaggacaaatcagagaaaaagtctttaactccaccattagcacccaaagctaagattctaatttaaactattctctgttctttcatggggaagcagatttgggtaccacccaagtattgactcacccatcaacaaccgctatgtatttcgtacattactgccagccaccatgaatattgtacggtaccataaatacttgaccacctgtagtacataaaaacccaatccacatcaaaaccccctcctcatgcttacaagcaagtacagcaatcaaccctcaactatcacacatcaactgcaactccaaagtcacccctcacccattaggataccaacaaacctacccacccttaacagtacatagtacataaagccatttaccgtacatagcacattacagtcaaatcccttctcgtccccatggatgacccccctcagataggggtcccttggccaccatcctccgtgaaatcaatatcccgcacaagagtgctactctcctcgctccgggcccataacacttgggggtagctaaagtgaactgtatccgacatctggttcctacttcagggtcataaagcctaaatagcccacacgttccccttaaataagacatcacgatg

SEQ ID NO: 356 - DNA, 16570 bp, Homo sapiens mitochondrial
  3108: "n" refers to a nucleotide at position 3107 of the Cambridge Reference Sequence (CRS, Anderson et al. 1981 Nature 290:457-465), later determined to be absent from the human mtDNA sequence according to the revised CRS (rCRS, Andrews et al. 1999 Nature Genetics 23:147); "n" therefore represents a single nucleotide deletion at a position corresponding to nucleotide 3107 of SEQ ID NO:1 as provided herein.
gatcacaggtctatcaccctattaaccactcacgggagctctccatgcatttggtattttcgtctggggggtatgcacgcgatagcattgcgagacgctggagccggagcaccctatgtcgcagtatctgtctttgattcctgcctcatcctattatttatcgcacctacgttcaatattacaggcgaacatacttactaaagtgtgttaattaattaatgcttgtaggacataataataacaattgaatgtctgcacagccgctttccacacagacatcataacaaaaaatttccaccaaaccccccctcccccgccttctggccacagcacttaaacacatctctgccaaaccccaaaaacaaagaaccctaacaccagcctaaccagatttcaaattttatcttttggcggtatgcacttttaacagtcaccccccaactaacacattattttcccctcccactcccatactactaatctcatcaatacaacccccgcccatcctacccagcacacacacaccgctgctaaccccataccccgaaccaaccaaaccccaaagacaccccccacagtttatgtagcttacctcctcaaagcaatacactgaaaatgtttagacgggctcacatcaccccataaacaaataggtttggtcctagcctttctattagctcttagtaagattacacatgcaagcatccccgttccagtgagttcaccctctaaatcaccacgatcaaaagggacaagcatcaagcacgcagcaatgcagctcaaaacgcttagcctagccacacccccacgggaaacagcagtgattaacctttagcaataaacgaaagtttaactaagctatactaaccccagggttggtcaatttcgtgccagccaccgcggtcacacgattaacccaagtcaatagaagccggcgtaaagagtgttttagatcaccccctccccaataaagctaaaactcacctgagttgtaaaaaactccagttgacacaaaatagactacgaaagtggctttaacatatctgaacacacaatagctaagacccaaactgggattagataccccactatgcttagccctaaacctcaacagttaaatcaacaaaactgctcgccagaacactacgagccacagcttaaaactcaaaggacctggcggtgcttcatatccctctagaggagcctgttctgtaatcgataaaccccgatcaacctcaccacctcttgctcagcctatataccgccatcttcagcaaaccctgatgaaggctacaaagtaagcgcaagtacccacgtaaagacgttaggtcaaggtgtagcccatgaggtggcaagaaatgggctacattttctaccccagaaaactacgatagcccttatgaaacttaagggtcgaaggtggatttagcagtaaactgagagtagagtgcttagttgaacagggccctgaagcgcgtacacaccgcccgtcaccctcctcaagtatacttcaaaggacatttaactaaaacccctacgcatttatatagaggagacaagtcgtaacatggtaagtgtactggaaagtgcacttggacgaaccagagtgtagcttaacacaaagcacccaacttacacttaggagatttcaacttaacttgaccgctctgagctaaacctagccccaaacccactccaccttactaccagacaaccttagccaaaccatttacccaaataaagtataggcgatagaaattgaaacctggcgcaatagatatagtaccgcaagggaaagatgaaaaattataaccaagcataatatagcaaggactaacccctataccttctgcataatgaattaactagaaataactttgcaaggagagccaaagctaagacccccgaaaccagacgagctacctaagaacagctaaaagagcacacccgtctatgtagcaaaatagtgggaagatttataggtagaggcgacaaacctaccgagcctggtgatagctggttgtccaagatagaatcttagttcaactttaaatttgcccacagaaccctctaaatccccttgtaaatttaactgttagtccaaagaggaacagctctttggacactaggaaaaaaccttgtagagagagtaaaaaatttaacacccatagtaggcctaaaagcagccaccaattaagaaagcgttcaagctcaacacccactacctaaaaaatcccaaacatataactgaactcctcacacccaattggaccaatctatcaccctatagaagaactaatgttagtataagtaacatgaaaacattctcctccgcataagcctgcgtcagattaaaacactgaactgacaattaacagcccaatatctacaatcaaccaacaagtcattattaccctcactgtcaacccaacacaggcatgctcataaggaaaggttaaaaaaagtaaaaggaactcggcaaatcttaccccgcctgtttaccaaaaacatcacctctagcatcaccagtattagaggcaccgcctgcccagtgacacatgtttaacggccgcggtaccctaaccgtgcaaaggtagcataatcacttgttccttaaatagggacctgtatgaatggctccacgagggttcagctgtctcttacttttaaccagtgaaattgacctgcccgtgaagaggcgggcataacacagcaagacgagaagaccctatggagctttaatttattaatgcaaacagtacctaacaaacccacaggtcctaaactaccaaacctgcattaaaaatttcggttggggcgacctcggagcagaacccaacctccgagcagtacatgctaagacttcaccagtcaaagcgaactactatactcaattgatccaataacttgaccaacggaacaagttaccctagggataacagcgcaatcctattctagagtccatatcaacaatagggtttacgacctcgatgttggatcaggacatcccaatggtgcagccgctattaaaggttcgtttgttcaacgattaaagtcctacgtgatctgagttcagaccggagtaatccaggtcggtttctatctacnttcaaattcctccctgtacgaaaggacaagagaaataaggcctacttcacaaagcgccttcccccgtaaatgatatcatctcaacttagtattatacccacacccacccaagaacagggtttgttaagatggcagagcccggtaatcgcataaaacttaaaactttacagtcagaggttcaattcctcttcttaacaacatacccatggccaacctcctactcctcattgtacccattctaatcgcaatggcattcctaatgcttaccgaacgaaaaattctaggctacatacaactacgcaaaggccccaacgttgtaggcccctacgggctactacaacccttcgctgacgccataaaactcttcaccaaagagcccctaaaacccgccacatctaccatcaccctctacatcaccgccccgaccttagctctcaccatcgctcttctactatgaacccccctccccatacccaaccccctggtcaacctcaacctaggcctcctatttattctagccacctctagcctagccgtttactcaatcctctgatcagggtgagcatcaaactcaaactacgccctgatcggcgcactgcgagcagtagcccaaacaatctcatatgaagtcaccctagccatcattctactatcaacattactaataagtggctcctttaacctctccacccttatcacaacacaagaacacctctgattactcctgccatcatgacccttggccataatatgatttatctccacactagcagagaccaaccgaacccccttcgaccttgccgaaggggagtccgaactagtctcaggcttcaacatcgaatacgccgcaggccccttcgccctattcttcatagccgaatacacaaacattattataataaacaccctcaccactacaatcttcctaggaacaacatatgacgcactctcccctgaactctacacaacatattttgtcaccaagaccctacttctaacctccctgttcttatgaattcgaacagcatacccccgattccgctacgaccaactcatacacctcctatgaaaaaacttcctaccactcaccctagcattacttatatgatatgtctccatacccattacaatctccagcattccccctcaaacctaagaaatatgtctgataaaagagttactttgatagagtaaataataggagcttaaacccccttatttctaggactatgagaatcgaacccatccctgagaatccaaaattctccgtgccacctatcacaccccatcctaaagtaaggtcagctaaataagctatcgggcccataccccgaaaatgttggttatacccttcccgtactaattaatcccctggcccaacccgtcatctactctaccatctttgcaggcacactcatcacagcgctaagctcgcactgattttttacctgagtaggcctagaaataaacatgctagcttttattccagttctaaccaaaaaaataaaccctcgttccacagaagctgccatcaagtatttcctcacgcaagcaaccgcatccataatccttctaatagctatcctcttcaacaatatactctccggacaatgaaccataaccaatactaccaatcaatactcatcattaataatcataatggctatagcaataaaactaggaatagccccctttcacttctgagtcccagaggttacccaaggcacccctctgacatccggcctgcttcttctcacatgacaaaaactagcccccatctcaatcatataccaaatctctccctcactaaacgtaagccttctcctcactctctcaatcttatccatcatagcaggcagttgaggtggattaaaccaaacccagctacgcaaaatcttagcatactcctcaattacccacataggatgaataatagcagttctaccgtacaaccctaacataaccattcttaatttaactatttatattatcctaactactaccgcattcctactactcaacttaaactccagcaccacgaccctactactatctcgcacctgaaacaagctaacatgactaacacccttaattccatccaccctcctctccctaggaggcctgcccccgctaaccggctttttgcccaaatgggccattatcgaagaattcacaaaaaacaatagcctcatcatccccaccatcatagccaccatcaccctccttaacctctacttctacctacgcctaatctactccacctcaatcacactactccccatatctaacaacgtaaaaataaaatgacagtttgaacatacaaaacccaccccattcctccccacactcatcgcccttaccacgctactcctacctatctccccttttatactaataatcttatagaaatttaggttaaatacagaccaagagccttcaaagccctcagtaagttgcaatacttaatttctgtaacagctaaggactgcaaaaccccactctgcatcaactgaacgcaaatcagccactttaattaagctaagcccttactagaccaatgggacttaaacccacaaacacttagttaacagctaagcaccctaatcaactggcttcaatctacttctcccgccgccgggaaaaaaggcgggagaagccccggcaggtttgaagctgcttcttcgaatttgcaattcaatatgaaaatcacctcggagctggtaaaaagaggcctaacccctgtctttagatttacagtccaatgcttcactcagccattttacctcacccccactgatgttcgccgaccgttgactattctctacaaaccacaaagacattggaacactatacctattattcggcgcatgagctggagtcctaggcacagctctaagcctccttattcgagccgagctgggccagccaggcaaccttctaggtaacgaccacatctacaacgttatcgtcacagcccatgcatttgtaataatcttcttcatagtaatacccatcataatcggaggctttggcaactgactagttcccctaataatcggtgcccccgatatggcgtttccccgcataaacaacataagcttctgactcttacctccctctctcctactcctgctcgcatctgctatagtggaggccggagcaggaacaggttgaacagtctaccctcccttagcagggaactactcccaccctggagcctccgtagacctaaccatcttctccttacacctagcaggtgtctcctctatcttaggggccatcaatttcatcacaacaattatcaatataaaaccccctgccataacccaataccaaacgcccctcttcgtctgatccgtcctaatcacagcagtcctacttctcctatctctcccagtcctagctgctggcatcactatactactaacagaccgcaacctcaacaccaccttcttcgaccccgccggaggaggagaccccattctataccaacacctattctgatttttcggtcaccctgaagtttatattcttatcctaccaggcttcggaataatctcccatattgtaacttactactccggaaaaaaagaaccatttggatacataggtatggtctgagctatgatatcaattggcttcctagggtttatcgtgtgagcacaccatatatttacagtaggaatagacgtagacacacgagcatatttcacctccgctaccataatcatcgctatccccaccggcgtcaaagtatttagctgactcgccacactccacggaagcaatatgaaatgatctgctgcagtgctctgagccctaggattcatctttcttttcaccgtaggtggcctgactggcattgtattagcaaactcatcactagacatcgtactacacgacacgtactacgttgtagcccacttccactatgtcctatcaataggagctgtatttgccatcataggaggcttcattcactgatttcccctattctcaggctacaccctagaccaaacctacgccaaaatccatttcactatcatattcatcggcgtaaatctaactttcttcccacaacactttctcggcctatccggaatgccccgacgttactcggactaccccgatgcatacaccacatgaaacatcctatcatctgtaggctcattcatttctctaacagcagtaatattaataattttcatgatttgagaagccttcgcttcgaagcgaaaagtcctaatagtagaagaaccctccataaacctggagtgactatatggatgccccccaccctaccacacattcgaagaacccgtatacataaaatctagacaaaaaaggaaggaatcgaaccccccaaagctggtttcaagccaaccccatggcctccatgactttttcaaaaaggtattagaaaaaccatttcataactttgtcaaagttaaattataggctaaatcctatatatcttaatggcacatgcagcgcaagtaggtctacaagacgctacttcccctatcatagaagagcttatcacctttcatgatcacgccctcataatcattttccttatctgcttcctagtcctgtatgcccttttcctaacactcacaacaaaactaactaatactaacatctcagacgctcaggaaatagaaaccgtctgaactatcctgcccgccatcatcctagtcctcatcgccctcccatccctacgcatcctttacataacagacgaggtcaacgatccctcccttaccatcaaatcaattggccaccaatggtactgaacctacgagtacaccgactacggcggactaatcttcaactcctacatacttcccccattattcctagaaccaggcgacctgcgactccttgacgttgacaatcgagtagtactcccgattgaagcccccattcgtataataattacatcacaagacgtcttgcactcatgagctgtccccacattaggcttaaaaacagatgcaattcccggacgtctaaaccaaaccactttcaccgctacacgaccgggggtatactacggtcaatgctctgaaatctgtggagcaaaccacagtttcatgcccatcgtcctagaattaattcccctaaaaatctttgaaatagggcccgtatttaccctatagcaccccctctaccccctctagagcccactgtaaagctaacttagcattaaccttttaagttaaagattaagagaaccaacacctctttacagtgaaatgccccaactaaatactaccgtatggcccaccataattacccccatactccttacactattcctcatcacccaactaaaaatattaaacacaaattaccacctacctccctcaccaaagcccataaaaataaaaaattataacaaaccctgagaaccaaaatgaacgaaaatctgttcgcttcattcattgcccccacaatcctaggcctacccgccgcagtactgatcattctatttccccctctattgatccccacctccaaatatctcatcaacaaccgactaatcaccacccaacaatgactaatcaaactaacctcaaaacaaatgataaccatacacaacactaaaggacgaacctgatctcttatactagtatccttaatcatttttattgccacaactaacctcctcggactcctgcctcactcatttacaccaaccacccaactatctataaacctagccatggccatccccttatgagcgggcgcagtgattataggctttcgctctaagattaaaaatgccctagcccacttcttaccacaaggcacacctacaccccttatccccatactagttattatcgaaaccatcagcctactcattcaaccaatagccctggccgtacgcctaaccgctaacattactgcaggccacctactcatgcacctaattggaagcgccaccctagcaatatcaaccattaaccttccctctacacttatcatcttcacaattctaattctactgactatcctagaaatcgctgtcgccttaatccaagcctacgttttcacacttctagtaagcctctacctgcacgacaacacataatgacccaccaatcacatgcctatcatatagtaaaacccagcccatgacccctaacaggggccctctcagccctcctaatgacctccggcctagccatgtgatttcacttccactccataacgctcctcatactaggcctactaaccaacacactaaccatataccaatgatggcgcgatgtaacacgagaaagcacataccaaggccaccacacaccacctgtccaaaaaggccttcgatacgggataatcctatttattacctcagaagtttttttcttcgcaggatttttctgagccttttaccactccagcctagcccctaccccccaattaggagggcactggcccccaacaggcatcaccccgctaaatcccctagaagtcccactcctaaacacatccgtattactcgcatcaggagtatcaatcacctgagctcaccatagtctaatagaaaacaaccgaaaccaaataattcaagcactgcttattacaattttactgggtctctattttaccctcctacaagcctcagagtacttcgagtctcccttcaccatttccgacggcatctacggctcaacattttttgtagccacaggcttccacggacttcacgtcattattggctcaactttcctcactatctgcttcatccgccaactaatatttcactttacatccaaacatcactttggcttcgaagccgccgcctgatactggcattttgtagatgtggtttgactatttctgtatgtctccatctattgatgagggtcttactcttttagtataaatagtaccgttaacttccaattaactagttttgacaacattcaaaaaagagtaataaacttcgccttaattttaataatcaacaccctcctagccttactactaataattattacattttgactaccacaactcaacggctacatagaaaaatccaccccttacgagtgcggcttcgaccctatatcccccgcccgcgtccctttctccataaaattcttcttagtagctattaccttcttattatttgatctagaaattgccctccttttacccctaccatgagccctacaaacaactaacctgccactaatagttatgtcatccctcttattaatcatcatcctagccctaagtctggcctatgagtgactacaaaaaggattagactgaaccgaattggtatatagtttaaacaaaacgaatgatttcgactcattaaattatgataatcatatttaccaaatgcccctcatttacataaatattatactagcatttaccatctcacttctaggaatactagtatatcgctcacacctcatatcctccctactatgcctagaaggaataatactatcgctgttcattatagctactctcataaccctcaacacccactccctcttagccaatattgtgcctattgccatactagtctttgccgcctgcgaagcagcggtgggcctagccctactagtctcaatctccaacacatatggcctagactacgtacataacctaaacctactccaatgctaaaactaatcgtcccaacaattatattactaccactgacatgactttccaaaaaacacataatttgaatcaacacaaccacccacagcctaattattagcatcatccctctactattttttaaccaaatcaacaacaacctatttagctgttccccaaccttttcctccgaccccctaacaacccccctcctaatactaactacctgactcctacccctcacaatcatggcaagccaacgccacttatccagtgaaccactatcacgaaaaaaactctacctctctatactaatctccctacaaatctccttaattataacattcacagccacagaactaatcatattttatatcttcttcgaaaccacacttatccccaccttggctatcatcacccgatgaggcaaccagccagaacgcctgaacgcaggcacatacttcctattctacaccctagtaggctcccttcccctactcatcgcactaatttacactcacaacaccctaggctcactaaacattctactactcactctcactgcccaagaactatcaaactcctgagccaacaacttaatatgactagcttacacaatagcttttatagtaaagatacctctttacggactccacttatgactccctaaagcccatgtcgaagcccccatcgctgggtcaatagtacttgccgcagtactcttaaaactaggcggctatggtataatacgcctcacactcattctcaaccccctgacaaaacacatagcctaccccttccttgtactatccctatgaggcataattataacaagctccatctgcctacgacaaacagacctaaaatcgctcattgcatactcttcaatcagccacatagccctcgtagtaacagccattctcatccaaaccccctgaagcttcaccggcgcagtcattctcataatcgcccacgggcttacatcctcattactattctgcctagcaaactcaaactacgaacgcactcacagtcgcatcataatcctctctcaaggacttcaaactctactcccactaatagctttttgatgacttctagcaagcctcgctaacctcgccttaccccccactattaacctactgggagaactctctgtgctagtaaccacgttctcctgatcaaatatcactctcctacttacaggactcaacatactagtcacagccctatactccctctacatatttaccacaacacaatggggctcactcacccaccacattaacaacataaaaccctcattcacacgagaaaacaccctcatgttcatacacctatcccccattctcctcctatccctcaaccccgacatcattaccgggttttcctcttgtaaatatagtttaaccaaaacatcagattgtgaatctgacaacagaggcttacgaccccttatttaccgagaaagctcacaagaactgctaactcatgcccccatgtctaacaacatggctttctcaacttttaaaggataacagctatccattggtcttaggccccaaaaattttggtgcaactccaaataaaagtaataaccatgcacactactataaccaccctaaccctgacttccctaattccccccatccttaccaccctcgttaaccctaacaaaaaaaactcatacccccattatgtaaaatccattgtcgcatccacctttattatcagtctcttccccacaacaatattcatgtgcctagaccaagaagttattatctcgaactgacactgagccacaacccaaacaacccagctctccctaagcttcaaactagactacttctccataatattcatccctgtagcattgttcgttacatggtccatcatagaattctcactgtgatatataaactcagacccaaacattaatcagttcttcaaatatctactcatcttcctaattaccatactaatcttagttaccgctaacaacctattccaactgttcatcggctgagagggcgtaggaattatatccttcttgctcatcagttgatgatacgcccgagcagatgccaacacagcagccattcaagcaatcctatacaaccgtatcggcgatatcggtttcatcctcgccttagcatgatttatcctacactccaactcatgagacccacaacaaatagcccttctaaacgctaatccaagcctcaccccactactaggcctcctcctagcagcagcaggcaaatcagcccaattaggtctccacccctgactcccctcagccatagaaggccccaccccagtctcagccctactccactcaagcactatagttgtagcaggaatcttcttactcatccgcttccaccccctagcagaaaatagcccactaatccaaactctaacactatgcttaggcgctatcaccactctgttcgcagcagtctgcgcccttacacaaaatgacatcaaaaaaatcgtagccttctccacttcaagtcaactaggactcataatagttacaatcggcatcaaccaaccacacctagcattcctgcacatctgtacccacgccttcttcaaagccatactatttatgtgctccgggtccatcatccacaaccttaacaatgaacaagatattcgaaaaataggaggactactcaaaaccatacctctcacttcaacctccctcaccattggcagcctagcattagcaggaatacctttcctcacaggtttctactccaaagaccacatcatcgaaaccgcaaacatatcatacacaaacgcctgagccctatctattactctcatcgctacctccctgacaagcgcctatagcactcgaataattcttctcaccctaacaggtcaacctcgcttccccacccttactaacattaacgaaaataaccccaccctactaaaccccattaaacgcctggcagccggaagcctattcgcaggatttctcattactaacaacatttcccccgcatcccccttccaaacaacaatccccctctacctaaaactcacagccctcgctgtcactttcctaggacttctaacagccctagacctcaactacctaaccaacaaacttaaaataaaatccccactatgcacattttatttctccaacatactcggattctaccctagcatcacacaccgcacaatcccctatctaggccttcttacgagccaaaacctgcccctactcctcctagacctaacctgactagaaaagctattacctaaaacaatttcacagcaccaaatctccacctccatcatcacctcaacccaaaaaggcataattaaactttacttcctctctttcttcttcccactcatcctaaccctactcctaatcacataacctattcccccgagcaatctcaattacaatatatacaccaacaaacaatgttcaaccagtaactactactaatcaacgcccataatcatacaaagcccccgcaccaataggatcctcccgaatcaaccctgacccctctccttcataaattattcagcttcctacactattaaagtttaccacaaccaccaccccatcatactctttcacccacagcaccaatcctacctccatcgctaaccccactaaaacactcaccaagacctcaacccctgacccccatgcctcaggatactcctcaatagccatcgctgtagtatatccaaagacaaccatcattccccctaaataaattaaaaaaactattaaacccatataacctcccccaaaattcagaataataacacacccgaccacaccgctaacaatcaatactaaacccccataaataggagaaggcttagaagaaaaccccacaaaccccattactaaacccacactcaacagaaacaaagcatacatcattattctcgcacggactacaaccacgaccaatgatatgaaaaaccatcgttgtatttcaactacaagaacaccaatgaccccaatacgcaaaactaaccccctaataaaattaattaaccactcattcatcgacctccccaccccatccaacatctccgcatgatgaaacttcggctcactccttggcgcctgcctgatcctccaaatcaccacaggactattcctagccatgcactactcaccagacgcctcaaccgccttttcatcaatcgcccacatcactcgagacgtaaattatggctgaatcatccgctaccttcacgccaatggcgcctcaatattctttatctgcctcttcctacacatcgggcgaggcctatattacggatcatttctctactcagaaacctgaaacatcggcattatcctcctgcttgcaactatagcaacagccttcataggctatgtcctcccgtgaggccaaatatcattctgaggggccacagtaattacaaacttactatccgccatcccatacattgggacagacctagttcaatgaatctgaggaggctactcagtagacagtcccaccctcacacgattctttacctttcacttcatcttgcccttcattattgcagccctagcagcactccacctcctattcttgcacgaaacgggatcaaacaaccccctaggaatcacctcccattccgataaaatcaccttccacccttactacacaatcaaagacgccctcggcttacttctcttccttctctccttaatgacattaacactattctcaccagacctcctaggcgacccagacaattataccctagccaaccccttaaacacccctccccacatcaagcccgaatgatatttcctattcgcctacacaattctccgatccgtccctaacaaactaggaggcgtccttgccctattactatccatcctcatcctagcaataatccccatcctccatatatccaaacaacaaagcataatatttcgcccactaagccaatcactttattgactcctagccgcagacctcctcattctaacctgaatcggaggacaaccagtaagctacccttttaccatcattggacaagtagcatccgtactatacttcacaacaatcctaatcctaataccaactatctccctaattgaaaacaaaatactcaaatgggcctgtccttgtagtataaactaatacaccagtcttgtaaaccggagatgaaaacctttttccaaggacaaatcagagaaaaagtctttaactccaccattagcacccaaagctaagattctaatttaaactattctctgttctttcatggggaagcagatttgggtaccacccaagtattgactcacccatcaacaaccgctatgtatttcgtacattactgccagccaccatgaatattgtacggtaccataaatacttgaccacctgtagtacataaaaacccaatccacatcaaacccccccccccatgcttacaagcaagtacagcaatcaaccctcaactatcacacatcaactgcaactccaaagccacccctcacccactaggataccaacaaacctacccacccttaacagtacatagtacataaagccatttaccgtacatagcacattacagtcaaatcccttcttgtccccatggatgacccccctcagataggggtcccttgaccaccatcctccgtgaaatcaatatcccgcacaagagtgctactctcctcgctccgggcccataacacttgggggtagctaaagtgaactgtatccgacatctggttcctacttcagggccataaagcctaaatagcccacacgttccccttaaataagacatcacgatg

SEQ ID NO: 357 - DNA, 16573 bp, Homo sapiens mitochondrial
  3111: "n" refers to a nucleotide at position 3107 of the Cambridge Reference Sequence (CRS, Anderson et al. 1981 Nature 290:457-465), later determined to be absent from the human mtDNA sequence according to the revised CRS (rCRS, Andrews et al. 1999 Nature Genetics 23:147); "n" therefore represents a single nucleotide deletion at a position corresponding to nucleotide 3107 of SEQ ID NO:1 as provided herein.
gatcacaggtctatcaccctattaaccactcacgggagctctccatgcatttggtattttcgtctggggggtatgcacgcgatagcattgcgagacgctggagccggagcaccctatgtcgcagtatctgtctttgattcctgcctcatcctattatttatcgcacctacgttcaatattacaggcgaacatacttactaaagtgtgttaattaattaatgcttgtaggacataataataacaattgaatgtctgcacagccgctttccacacagacatcataacaaaaaatttccaccaaaccccccctcccccccccgcttctggccacagcacttaaacacatctctgccaaaccccaaaaacaaagaaccctaacaccagcctaaccagatttcaaattttatcttttggcggtatgcacttttaacagtcaccccccaactaacacattattttcccctcccactcccatactactaatctcatcaatacaacccccgcccatcctacccagcacacacacaccgctgctaaccccataccccgaaccaaccaaaccccaaagacaccccccacagtttatgtagcttacctcctcaaagcaatacactgaaaatgtttagacgggctcacatcaccccataaacaaataggtttggtcctagcctttctattagctcttagtaagattacacatgcaagcatccccgttccagtgagttcaccctctaaatcaccacgatcaaaagggacaagcatcaagcacgcagcaatgcagctcaaaacgcttagcctagccacacccccacgggaaacagcagtgattaacctttagcaataaacgaaagtttaactaagctatactaaccccagggttggtcaatttcgtgccagccaccgcggtcacacgattaacccaagtcaatagaagccggcgtaaagagtgttttagatcaccccctccccaataaagctaaaactcacctgagttgtaaaaaactccagttgacacaaaatagactacgaaagtggctttaacatatctgaacacacaatagctaagacccaaactgggattagataccccactatgcttagccctaaacctcaacagttaaatcaacaaaactgctcgccagaacactacgagccacagcttaaaactcaaaggacctggcggtgcttcatatccctctagaggagcctgttctgtaatcgataaaccccgatcaacctcaccacctcttgctcagcctatataccgccatcttcagcaaaccctgatgaaggctacaaagtaagcgcaagtacccacgtaaagacgttaggtcaaggtgtagcccatgaggtggcaagaaatgggctacattttctaccccagaaaactacgatagcccttatgaaacttaagggtcgaaggtggatttagcagtaaactgagagtagagtgcttagttgaacagggccctgaagcgcgtacacaccgcccgtcaccctcctcaagtatacttcaaaggacatttaactaaaacccctacgcatttatatagaggagacaagtcgtaacatggtaagtgtactggaaagtgcacttggacgaaccagagtgtagcttaacacaaagcacccaacttacacttaggagatttcaacttaacttgaccgctctgagctaaacctagccccaaacccactccaccttactaccagacaaccttagccaaaccatttacccaaataaagtataggcgatagaaattgaaacctggcgcaatagatatagtaccgcaagggaaagatgaaaaattataaccaagcataatatagcaaggactaacccctataccttctgcataatgaattaactagaaataactttgcaaggagagccaaagctaagacccccgaaaccagacgagctacctaagaacagctaaaagagcacacccgtctatgtagcaaaatagtgggaagatttataggtagaggcgacaaacctaccgagcctggtgatagctggttgtccaagatagaatcttagttcaactttaaatttgcccacagaaccctctaaatccccttgtaaatttaactgttagtccaaagaggaacagctctttggacactaggaaaaaaccttgtagagagagtaaaaaatttaacacccatagtaggcctaaaagcagccaccaattaagaaagcgttcaagctcaacacccactacctaaaaaatcccaaacatataactgaactcctcacacccaattggaccaatctatcaccctatagaagaactaatgttagtataagtaacatgaaaacattctcctccgcataagcctgcgtcagattaaaacactgaactgacaattaacagcccaatatctacaatcaaccaacaagtcattattaccctcactgtcaacccaacacaggcatgctcataaggaaaggttaaaaaaagtaaaaggaactcggcaaatcttaccccgcctgtttaccaaaaacatcacctctagcatcaccagtattagaggcaccgcctgcccagtgacacatgtttaacggccgcggtaccctaaccgtgcaaaggtagcataatcacttgttccttaaatagggacctgtatgaatggctccacgagggttcagctgtctcttacttttaaccagtgaaattgacctgcccgtgaagaggcgggcataacacagcaagacgagaagaccctatggagctttaatttattaatgcaaacagtacctaacaaacccacaggtcctaaactaccaaacctgcattaaaaatttcggttggggcgacctcggagcagaacccaacctccgagcagtacatgctaagacttcaccagtcaaagcgaactactatactcaattgatccaataacttgaccaacggaacaagttaccctagggataacagcgcaatcctattctagagtccatatcaacaatagggtttacgacctcgatgttggatcaggacatcccgatggtgcagccgctattaaaggttcgtttgttcaacgattaaagtcctacgtgatctgagttcagaccggagtaatccaggtcggtttctatctacnttcaaattcctccctgtacgaaaggacaagagaaataaggcctacttcacaaagcgccttcccccgtaaatgatatcatctcaacttagtattatacccacacccacccaagaacagggtttgttaagatggcagagcccggtaatcgcataaaacttaaaactttacagtcagaggttcaattcctcttcttaacaacatacccatggccaacctcctactcctcattgtacccattctaatcgcaatggcattcctaatgcttaccgaacgaaaaattctaggctatatacaactacgcaaaggccccaacgttgtaggcccctacgggctactacaacccttcgctgacgccataaaactcttcaccaaagagcccctaaaacccgccacatctaccatcaccctctacatcaccgccccgaccttagctctcaccatcgctcttctactatgaacccccctccccatacccaaccccctggtcaacctcaacctaggcctcctatttattctagccacctctagcctagccgtttactcaatcctctgatcagggtgagcatcaaactcaaactacgccctgatcggcgcactgcgagcagtagcccaaacaatctcatatgaagtcaccctagccatcattctactatcaacattactaataagtggctcctttaacctctccacccttatcacaacacaagaacacctctgattactcctgccatcatgacccttggccataatatgatttatctccacactagcagagaccaaccgaacccccttcgaccttgccgaaggggagtccgaactagtctcaggcttcaacatcgaatacgccgcaggccccttcgccctattcttcatagccgaatacacaaacattattataataaacaccctcaccactacaatcttcctaggaacaacatatgacgcactctcccctgaactctacacaacatattttgtcaccaagaccctacttctaacctccctgttcttatgaattcgaacagcatacccccgattccgctacgaccaactcatacacctcctatgaaaaaacttcctaccactcaccctagcattacttatatgatatgtctccatacccattacaatctccagcattccccctcaaacctaagaaatatgtctgataaaagagttactttgatagagtaaataataggagcttaaacccccttatttctaggactatgagaatcgaacccatccctgagaatccaaaattctccgtgccacctatcacaccccatcctaaagtaaggtcagctaaataagctatcgggcccataccccgaaaatgttggttatacccttcccgtactaattaatcccctggcccaacccgtcatctactctaccatctttgcaggcacactcatcacagcgctaagctcgcactgattttttacctgagtaggcctagaaataaacatgctagcttttattccagttctaaccaaaaaaataaaccctcgttccacagaagctgccatcaagtatttcctcacgcaagcaaccgcatccataatccttctaatagctatcctcttcaacaatatactctccggacaatgaaccataaccaatactaccaatcaatactcatcattaataatcataatggctatagcaataaaactaggaatagccccctttcacttctgagtcccagaggttacccaaggcacccctctgacatccggcctgcttcttctcacatgacaaaaactagcccccatctcaatcatataccaaatctctccctcactaaacgtaagccttctcctcactctctcaatcttatccatcatagcaggcagttgaggtggattaaaccaaacccagctacgcaaaatcttagcatactcctcaattacccacataggatgaataatagcagttctaccgtacaaccctaacataaccattcttaatttaactatttatattatcctaactactaccgcattcctactactcaacttaaactccagcaccacgaccctactactatctcgcacctgaaacaagctaacatgactaacacccttaattccatccaccctcctctccctaggaggcctgcccccgctaaccggctttttgcccaaatgggccattatcgaagaattcacaaaaaacaatagcctcatcatccccaccatcatagccaccatcaccctccttaacctctacttctacctacgcctaatctactccacctcaatcacactactccccatatctaacaacgtaaaaataaaatgacagtttgaacatacaaaacccaccccattcctccccacactcatcgcccttaccacgctactcctacctatctccccttttatactaataatcttatagaaatttaggttaaatacagaccaagagccttcaaagccctcagtaagttgcaatacttaatttctgtaacagctaaggactgcaaaaccccactctgcatcaactgaacgcaaatcagccactttaattaagctaagcccttactagaccaatgggacttaaacccacaaacacttagttaacagctaagcaccctaatcaactggcttcaatctacttctcccgccgccgggaaaaaaggcgggagaagccccggcaggtttgaagctgcttcttcgaatttgcaattcaatatgaaaatcacctcggagctggtaaaaagaggcctaacccctgtctttagatttacagtccaatgcttcactcagccattttacctcacccccactgatgttcgccgaccgttgactattctctacaaaccacaaagacattggaacactatacctattattcggcgcatgagctggagtcctaggcacagctctaagcctccttattcgagccgagctgggccagccaggcaaccttctaggtaacgaccacatctacaacgttatcgtcacagcccatgcatttgtaataatcttcttcatagtaatacccatcataatcggaggctttggcaactgactagttcccctaataatcggtgcccccgatatggcgtttccccgcataaacaacataagcttctgactcttacctccctctctcctactcctgctcgcatctgctatagtggaggccggagcaggaacaggttgaacagtctaccctcccttagcagggaactactcccaccctggagcctccgtagacctaaccatcttctccttacacctagcaggtgtctcctctatcttaggggccatcaatttcatcacaacaattatcaatataaaaccccctgccataacccaataccaaacgcccctcttcgtctgatccgtcctaatcacagcagtcctacttctcctatctctcccagtcctagctgctggcatcactatactactaacagaccgcaacctcaacaccaccttcttcgaccccgccggaggaggagaccccattctataccaacacctattctgatttttcggtcaccctgaagtttatattcttatcctaccaggcttcggaataatctcccatattgtaacttactactccggaaaaaaagaaccatttggatacataggtatggtctgagctatgatatcaattggcttcctagggtttatcgtgtgagcacaccatatatttacagtaggaatagacgtagacacacgagcatatttcacctccgctaccataatcatcgctatccccaccggcgtcaaagtatttagctgactcgccacactccacggaagcaatatgaaatgatctgctgcagtgctctgagccctaggattcatctttcttttcaccgtaggtggcctgactggcattgtattagcaaactcatcactagacatcgtactacacgacacgtactacgttgtagcccacttccactatgtcctatcaataggagctgtatttgccatcataggaggcttcattcactgatttcccctattctcaggctacaccctagaccaaacctacgccaaaatccatttcactatcatattcatcggcgtaaatctaactttcttcccacaacactttctcggcctatccggaatgccccgacgttactcggactaccccgatgcatacaccacatgaaacatcctatcatctgtaggctcattcatttctctaacagcagtaatattaataattttcatgatttgagaagccttcgcttcgaagcgaaaagtcctaatagtagaagaaccctccataaacctggagtgactatatggatgccccccaccctaccacacattcgaagaacccgtatacataaaatctagacaaaaaaggaaggaatcgaaccccccaaagctggtttcaagccaaccccatggcctccatgactttttcaaaaaggtattagaaaaaccatttcataactttgtcaaagttaaattataggctaaatcctatatatcttaatggcacatgcagcgcaagtaggtctacaagacgctacttcccctatcatagaagagcttatcacctttcatgatcacgccctcataatcattttccttatctgcttcctagtcctgtatgcccttttcctaacactcacaacaaaactaactaatactaacatctcagacgctcaggaaatagaaaccgtctgaactatcctgcccgccatcatcctagtcctcatcgccctcccatccctacgcatcctttacataacagacgaggtcaacgatccctcccttaccatcaaatcaattggccaccaatggtactgaacctacgagtacaccgactacggcggactaatcttcaactcctacatacttcccccattattcctagaaccaggcgacctgcgactccttgacgttgacaatcgagtagtactcccgattgaagcccccattcgtataataattacatcacaagacgtcttgcactcatgagctgtccccacattaggcttaaaaacagatgcaattcccggacgtctaaaccaaaccactttcaccgctacacgaccgggggtatactacggtcaatgctctgaaatctgtggagcaaaccacagtttcatgcccatcgtcctagaattaattcccctaaaaatctttgaaatagggcccgtatttaccctatagcaccccctctaccccctctagagcccactgtaaagctaacttagcattaaccttttaagttaaagattaagagaaccaacacctctttacagtgaaatgccccaactaaatactaccgtatggcccaccataattacccccatactccttacactattcctcatcacccaactaaaaatattaaacacaaactaccacctacctccctcaccaaagcccataaaaataaaaaattataacaaaccctgagaaccaaaatgaacgaaaatctgttcgcttcattcattgcccccacaatcctaggcctacccgccgcagtactgatcattctatttccccctctattgatccccacctccaaatatctcatcaacaaccgactaatcaccacccaacaatgactaatcaaactaacctcaaaacaaatgataaccatacacaacactaaaggacgaacctgatctcttatactagtatccttaatcatttttattgccacaactaacctcctcggactcctgcctcactcatttacaccaaccacccaactatctataaacctagccatggccatccccttatgagcgggcgcagtgattataggctttcgctctaagattaaaaatgccctagcccacttcttaccacaaggcacacctacaccccttatccccatactagttattatcgaaaccatcagcctactcattcaaccaatagccctggccgtacgcctaaccgctaacattactgcaggccacctactcatgcacctaattggaagcgccaccctagcaatatcaaccattaaccttccctctacacttatcatcttcacaattctaattctactgactatcctagaaatcgctgtcgccttaatccaagcctacgttttcacacttctagtaagcctctacctgcacgacaacacataatgacccaccaatcacatgcctatcatatagtaaaacccagcccatgacccctaacaggggccctctcagccctcctaatgacctccggcctagccatgtgatttcacttccactccataacgctcctcatactaggcctactaaccaacacactaaccatataccaatgatggcgcgatgtaacacgagaaagcacataccaaggccaccacacaccacctgtccaaaaaggccttcgatacgggataatcctatttattacctcagaagtttttttcttcgcaggatttttctgagccttttaccactccagcctagcccctaccccccaattaggagggcactggcccccaacaggcatcaccccgctaaatcccctagaagtcccactcctaaacacatccgtattactcgcatcaggagtatcaatcacctgagctcaccatagtctaatagaaaacaaccgaaaccaaataattcaagcactgcttattacaattttactgggtctctattttaccctcctacaagcctcagagtacttcgagtctcccttcaccatttccgacggcatctacggctcaacattttttgtagccacaggcttccacggacttcacgtcattattggctcaactttcctcactatctgcttcatccgccaactaatatttcactttacatccaaacatcactttggcttcgaagccgccgcctgatactggcattttgtagatgtggtttgactatttctgtatgtctccatctattgatgagggtcttactcttttagtataaatagtaccgttaacttccaattaactagttttgacaacattcaaaaaagagtaataaacttcgccttaattttaataatcaacaccctcctagccttactactaataattattacattttgactaccacaactcaacggctacatagaaaaatccaccccttacgagtgcggcttcgaccctatatcccccgcccgcgtccctttctccataaaattcttcttagtagctattaccttcttattatttgatctagaaattgccctccttttacccctaccatgagccctacaaacaactaacctgccactaatagttatgtcatccctcttattaatcatcatcctagccctaagtctggcctatgagtgactacaaaaaggattagactgaaccgaattggtatatagtttaaacaaaacgaatgatttcgactcattaaattatgataatcatatttaccaaatgcccctcatttacataaatattatactagcatttaccatctcacttctaggaatactagtatatcgctcacacctcatatcctccctactatgcctagaaggaataatactatcgctgttcattatagctactctcataaccctcaacacccactccctcttagccaatattgtgcctattgccatactagtctttgccgcctgcgaagcagcggtgggcctagccctactagtctcaatctccaacacatatggcctagactacgtacataacctaaacctactccaatgctaaaactaatcgtcccaacaattatattactaccactgacatgactttccaaaaaacacataatttgaatcaacacaaccacccacagcctaattattagcatcatccctctactattttttaaccaaatcaacaacaacctatttagctgttccccaaccttttcctccgaccccctaacaacccccctcctaatactaactacctgactcctacccctcacaatcatggcaagccaacgccacttatccaatgaaccactatcacgaaaaaaactctacctctctatactaatctccctacaaatctccttaattataacattcacagccacagaactaatcatattttatatcttcttcgaaaccacacttatccccaccttggctatcatcacccgatgaggcaaccagccagaacgcctgaacgcaggcacatacttcctattctacaccctagtaggctcccttcccctactcatcgcactaatttacactcacaacaccctaggctcactaaacattctactactcactctcactgcccaagaactatcaaactcctgagccaacaacttaatatgactagcttacacaatagcttttatagtaaagatacctctttacggactccacttatgactccctaaagcccatgtcgaagcccccatcgctgggtcaatagtacttgccgcagtactcttaaaactaggcggctatggtataatacgcctcacactcattctcaaccccctgacaaaacacatagcctaccccttccttgtactatccctatgaggcataattataacaagctccatctgcctacgacaaacagacctaaaatcgctcattgcatactcttcaatcagccacatagccctcgtagtaacagccattctcatccaaaccccctgaagcttcaccggcgcagtcattctcataatcgcccacgggcttacatcctcattactattctgcctagcaaactcaaactacgaacgcactcacagtcgcatcataatcctctctcaaggacttcaaactctactcccactaatagctttttgatgacttctagcaagcctcgctaacctcgccttaccccccactattaacctactgggagaactctctgtgctagtaaccacgttctcctgatcaaatatcactctcctacttacaggactcaacatactagtcacagccctatactccctctacatatttaccacaacacaatggggctcactcacccaccacattaacaacataaaaccctcattcacacgagaaaacaccctcatgttcatacacctatcccccattctcctcctatccctcaaccccgacatcattaccgggttttcctcttgtaaatatagtttaaccaaaacatcagattgtgaatctgacaacagaggcttacgaccccttatttaccgagaaagctcacaagaactgctaactcatgcccccatgtctaacaacatggctttctcaacttttaaaggataacagctatccattggtcttaggccccaaaaattttggtgcaactccaaataaaagtaataaccatgcacactactataaccaccctaaccctgacttccctaattccccccatccttaccaccctcgttaaccctaacaaaaaaaactcatacccccattatgtaaaatccattgtcgcatccacctttattatcagtctcttccccacaacaatattcatgtgcctagaccaagaagttattatctcgaactgacactgagccacaacccaaacaacccagctctccctaagcttcaaactagactacttctccataatattcatccctgtagcattgttcgttacatggtccatcatagaattctcactgtgatatataaactcagacccaaacattaatcagttcttcaaatatctactcatcttcctaattaccatactaatcttagttaccgctaacaacctattccaactgttcatcggctgagagggcgtaggaattatatccttcttgctcatcagttgatgatacgcccgagcagatgccaacacagcagccattcaagcaatcctatacaaccgtatcggcgatatcggtttcatcctcgccttagcatgatttatcctacactccaactcatgagacccacaacaaatagcccttctaaacgctaatccaagcctcaccccactactaggcctcctcctagcagcagcaggcaaatcagcccaattaggtctccacccctgactcccctcagccatagaaggccccaccccagtctcagccctactccactcaagcactatagttgtagcaggaatcttcttactcatccgcttccaccccctagcagaaaatagcccactaatccaaactctaacactatgcttaggcgctatcaccactctgttcgcagcagtctgcgcccttacacaaaatgacatcaaaaaaatcgtagccttctccacttcaagtcaactaggactcataatagttacaatcggcatcaaccaaccacacctagcattcctgcacatctgtacccacgccttcttcaaagccatactatttatgtgctccgggtccatcatccacaaccttaacaatgaacaagatattcgaaaaataggaggactactcaaaaccatacctctcacttcaacctccctcaccattggcagcctagcattagcaggaatacctttcctcacaggtttctactccaaagaccacatcatcgaaaccgcaaacatatcatacacaaacgcctgagccctatctattactctcatcgctacctccctgacaagcgcctatagcactcgaataattcttctcaccctaacaggtcaacctcgcttccccacccttactaacattaacgaaaataaccccaccctactaaaccccattaaacgcctggcagccggaagcctattcgcaggatttctcattactaacaacatttcccccgcatcccccttccaaacaacaatccccctctacctaaaactcacagccctcgctgtcactttcctaggacttctaacagccctagacctcaactacctaaccaacaaacttaaaataaaatccccactatgcacattttatttctccaacatactcggattctaccctagcatcacacaccgcacaatcccctatctaggccttcttacgagccaaaacctgcccctactcctcctagacctaacctgactagaaaagctattacctaaaacaatttcacagcaccaaatctccacctccatcatcacctcaacccaaaaaggcataattaaactttacttcctctctttcttcttcccactcatcctaaccctactcctaatcacataacctattcccccgagcaatctcaattacaatatatacaccaacaaacaatgttcaaccagtaactactactaatcaacgcccataatcatacaaagcccccgcaccaataggatcctcccgaatcaaccctgacccctctccttcataaattattcagcttcctacactattaaagtttaccacaaccaccaccccatcatactctttcacccacagcaccaatcctacctccatcgctaaccccactaaaacactcaccaagacctcaacccctgacccccatgcctcaggatactcctcaatagccatcgctgtagtatatccaaagacaaccatcattccccctaaataaattaaaaaaactattaaacccatataacctcccccaaaattcagaataataacacacccgaccacaccgctaacaatcaatactaaacccccataaataggagaaggcttagaagaaaaccccacaaaccccattactaaacccacactcaacagaaacaaagcatacatcattattctcgcacggactacaaccacgaccaatgatatgaaaaaccatcgttgtatttcaactacaagaacaccaatgaccccaatacgcaaaactaaccccctaataaaattaattaaccactcattcatcgacctccccaccccatccaacatctccgcatgatgaaacttcggctcactccttggcgcctgcctgatcctccaaatcaccacaggactattcctagccatgcactactcaccagacgcctcaaccgccttttcatcaatcgcccacatcactcgagacgtaaattatggctgaatcatccgctaccttcacgccaatggcgcctcaatattctttatctgcctcttcctacacatcgggcgaggcctatattacggatcatttctctactcagaaacctgaaacatcggcattatcctcctgcttgcaactatagcaacagccttcataggctatgtcctcccgtgaggccaaatatcattctgaggggccacagtaattacaaacttactatccgccatcccatacattgggacagacctagttcaatgaatctgaggaggctactcagtagacagtcccaccctcacacgattctttacctttcacttcatcttgcccttcattattgcagccctagcagcactccacctcctattcttgcacgaaacgggatcaaacaaccccctaggaatcacctcccattccgataaaatcaccttccacccttactacacaatcaaagacgccctcggcttacttctcttccttctctccttaatgacattaacactattctcaccagacctcctaggcgacccagacaattataccctagccaaccccttaaacacccctccccacatcaagcccgaatgatatttcctattcgcctacacaattctccgatccgtccctaacaaactaggaggcgtccttgccctattactatccatcctcatcctagcaataatccccatcctccatatatccaaacaacaaagcataatatttcgcccactaagccaatcactttattgactcctagccgcagacctcctcattctaacctgaatcggaggacaaccagtaagctacccttttaccatcattggacaagtagcatccgtactatacttcacaacaatcctaatcctaataccaactatctccctaattgaaaacaaaatactcaaatgggcctgtccttgtagtataaactaatacaccagtcttgtaaaccggagatgaaaacctttttccaaggacaaatcagagaaaaagtctttaactccaccattagcacccaaagctaagattctaatttaaactattctctgttctttcatggggaagcagatttgggtaccacccaagtattgactcacccatcaacaaccgctatgtatttcgtacattactgccagccaccatgaatattgtacggtaccataaatacttgaccacctgtagtacataaaaacccaatccacatcaaaaccccctccccatgcttacaagcaagtacagcaatcaaccctcaactatcacacatcaactgcaactccaaagccacccctcacccactaggataccaacaaacctacccacccttaacagtacatagtacataaagccatttaccgtacatagcacattacagtcaaatcccttctcgtccccatggatgacccccctcagataggggtcccttgaccaccatcctccgtgaaatcaatatcccgcacaagagtgctactctcctcgctccgggcccataacacttgggggtagctaaagtgaactgtatccgacatctggttcctacttcagggccataaagcctaaatagcccacacgttccccttaaataagacatcacgatg

SEQ ID NO: 358 - DNA, 16571 bp, Homo sapiens mitochondrial
  3109: "n" refers to a nucleotide at position 3107 of the Cambridge Reference Sequence (CRS, Anderson et al. 1981 Nature 290:457-465), later determined to be absent from the human mtDNA sequence according to the revised CRS (rCRS, Andrews et al. 1999 Nature Genetics 23:147); "n" therefore represents a single nucleotide deletion at a position corresponding to nucleotide 3107 of SEQ ID NO:1 as provided herein.
gatcacaggtctatcaccctattaaccactcacgggagctctccatgcatttggtattttcgtctggggggtatgcacgcgatagcattgcgagacgctggagccggagcaccctatgtcgcagtatctgtctttgattcctgcctcatcccattatttatcgcacctacgttcaatattacaggcgaacatacttactaaagtgtgttaattaattaatgcttgtaggacataataataacaattgaatgtctgcacagccgctttccacacagacatcataacaaaaaatttccaccaaaccccccctcccccccgcttctggccacagcacttaaacacatctctgccaaaccccaaaaacaaagaaccctaacaccagcctaaccagatttcaaattttatcttttggcggtatgcacttttaacagtcaccccccaactaacacattattttcccctcccactcccatactactaatctcatcaatacaacccccgcccatcctacccagcacacacacaccgctgctaaccccataccccgaaccaaccaaaccccaaagacaccccccacagtttatgtagcttacctcctcaaagcaatacactgaaaatgtttagacgggctcacatcaccccataaacaaataggtttggtcctagcctttctattagctcttagtaagattacacatgcaagcatccccgttccagtgagttcaccctctaaatcaccacgatcaaaagggacaagcatcaagcacgcagcaatgcagctcaaaacgcttagcctagccacacccccacgggaaacagcagtgattaacctttagcaataaacgaaagtttaactaagctatactaaccccagggttggtcaatttcgtgccagccaccgcggtcacacgattaacccaagtcaatagaagccggcgtaaagagtgttttagatcaccccctccccaataaagctaaaactcacctgagttgtaaaaaactccagttgacacaaaatagactacgaaagtggctttaacatatctgaacacacaatagctaagacccaaactgggattagataccccactatgcttagccctaaacctcaacagttaaatcaacaaaactgctcgccagaacactacgagccacagcttaaaactcaaaggacctggcggtgcttcatatccctctagaggagcctgttctgtaatcgataaaccccgatcaacctcaccacctcttgctcagcctatataccgccatcttcagcaaaccctgatgaaggctacaaagtaagcgcaagtacccacgtaaagacgttaggtcaaggtgtagcccatgaggtggcaagaaatgggctacattttctaccccagaaaactacgatagcccttatgaaacttaagggtcgaaggtggatttagcagtaaactgagagtagagtgcttagttgaacagggccctgaagcgcgtacacaccgcccgtcaccctcctcaagtatacttcaaaggacatttaactaaaacccctacgcatttatatagaggagacaagtcgtaacatggtaagtgtactggaaagtgcacttggacgaaccagagtgtagcttaacacaaagcacccaacttacacttaggagatttcaacttaacttgaccgctctgagctaaacctagccccaaacccactccaccttactaccagacaaccttagccaaaccatttacccaaataaagtataggcgatagaaattgaaacctggcgcaatagatatagtaccgcaagggaaagatgaaaaattataaccaagcataatatagcaaggactaacccctataccttctgcataatgaattaactagaaataactttgcaaggagagccaaagctaagacccccgaaaccagacgagctacctaagaacagctaaaagagcacacccgtctatgtagcaaaatagtgggaagatttataggtagaggcgacaaacctaccgagcctggtgatagctggttgtccaagatagaatcttagttcaactttaaatttgcccacagaaccctctaaatccccttgtaaatttaactgttagtccaaagaggaacagctctttggacactaggaaaaaaccttgtagagagagtaaaaaatttaacacccatagtaggcctaaaagcagccaccaattaagaaagcgttcaagctcaacacccactacctaaaaaatcccaaacatataactgaactcctcacacccaattggaccaatctatcaccctatagaagaactaatgttagtataagtaacatgaaaacattctcctccgcataagcctgcgtcagattaaaacactgaactgacaattaacagcccaatatctacaatcaaccaacaagtcattattaccctcactgtcaacccaacacaggcatgctcataaggaaaggttaaaaaaagtaaaaggaactcggcaaatcttaccccgcctgtttaccaaaaacatcacctctagcatcaccagtattagaggcaccgcctgcccagtgacacatgtttaacggccgcggtaccctaaccgtgcaaaggtagcataatcacttgttccttaaatagggacctgtatgaatggctccacgagggttcagctgtctcttacttttaaccagtgaaattgacctgcccgtgaagaggcgggcataacacagcaagacgagaagaccctatggagctttaatttattaatgcaaacagtacctaacaaacccacaggtcctaaactaccaaacctgcattaaaaatttcggttggggcgacctcggagcagaacccaacctccgagcagtacatgctaagacttcaccagtcaaagcgaactactatactcaattgatccaataacttgaccaacggaacaagttaccctagggataacagcgcaatcctattctagagtccatatcaacaatagggtttacgacctcgatgttggatcaggacatcccgatggtgcagccgctattaaaggttcgtttgttcaacgattaaagtcctacgtgatctgagttcagaccggagtaatccaggtcggtttctatctacnttcaaattcctccctgtacgaaaggacaagagaaataaggcctacttcacaaagcgccttcccccgtaaatgatatcatctcaacttagtattatacccacacccacccaagaacagggtttgttaagatggcagagcccggtaatcgcataaaacttaaaactttacagtcagaggttcaattcctcttcttaacaacatacccatggccaacctcctactcctcattgtacccattctaatcgcaatggcattcctaatgcttaccgaacgaaaaattctaggctatatacaactacgcaaaggccccaacgttgtaggcccctacgggctactacaacccttcgctgacgccataaaactcttcaccaaagagcccctaaaacccgccacatctaccatcaccctctacatcaccgccccgaccttagctctcaccatcgctcttctactatgaacccccctccccatacccaaccccctagtcaacctcaacctaggcctcctatttattctagccacctctagcctagccgtttactcaatcctctgatcagggtgagcatcaaactcaaactacgccctgatcggcgcactgcgagcagtagcccaaacaatctcatatgaagtcaccctagccatcattctactatcaacattactaataagtggctcctttaacctctccacccttatcacaacacaagaacacctctgattactcctgccatcatgacccttggccataatatgatttatctccacactagcagagaccaaccgaacccccttcgaccttgccgaaggggagtccgaactagtctcaggcttcaacatcgaatacgccgcaggccccttcgccctattcttcatagccgaatacacaaacattattataataaacaccctcaccactacaatcttcctaggaacaacatatgacgcactctcccctgaactctacacaacatattttgtcaccaagaccctacttctaacctccctgttcttatgaattcgaacagcatacccccgattccgctacgaccaactcatacacctcctatgaaaaaacttcctaccactcaccctagcattacttatatgatatgtctccatacccattacaatctccagcattccccctcaaacctaagaaatatgtctgataaaagagttactttgatagagtaaataataggggcttaaacccccttatttctaggactatgagaatcgaacccatccctgagaatccaaaattctccgtgccacctatcacaccccatcctaaagtaaggtcagctaaataagctatcgggcccataccccgaaaatgttggttatacccttcccgtactaattaatcccctggcccaacccgtcatctactctaccatctttgcaggcacactcatcacagcgctaagctcgcactgattttttacctgagtaggcctagaaataaacatgctagcttttattccagttctaaccaaaaaaataaaccctcgttccacagaagctgccatcaagtatttcctcacgcaagcaaccgcatccataatccttctaatagctatcctcttcaacaatatactctccggacaatgaaccataaccaatactaccaatcaatactcatcattaataatcataatggctatagcaataaaactaggaatagccccctttcacttctgagtcccagaggttacccaaggcacccctctgacatccggcctgcttcttctcacatgacaaaaactagcccccatctcaatcatataccaaatctctccctcactaaacgtaagccttctcctcactctctcaatcttatccatcatagcaggcagttgaggtggattaaaccaaacccagctacgcaaaatcttagcatactcctcaattacccacataggatgaataatagcagttctaccgtacaaccctaacataaccattcttaatttaactatttatattatcctaactactaccgcattcctactactcaacttaaactccagcaccacgaccctactactatctcgcacctgaaacaagctaacatgactaacacccttaattccatccaccctcctctccctaggaggcctgcccccgctaaccggctttttgcccaaatgggccattatcgaagaattcacaaaaaacaatagcctcatcatccccaccatcatagccaccatcaccctccttaacctctacttctacctacgcctaatctactccacctcaatcacactactccccatatctaacaacgtaaaaataaaatgacagtttgaacatacaaaacccaccccattcctccccacactcatcgcccttaccacgctactcctacctatctccccttttatactaataatcttatagaaatttaggttaaatacagaccaagagccttcaaagccctcagtaagttgcaatacttaatttctgtaacagctaaggactgcaaaaccccactctgcatcaactgaacgcaaatcagccactttaattaagctaagcccttactagaccaatgggacttaaacccacaaacacttagttaacagctaagcaccctaatcaactggcttcaatctacttctcccgccgccgggaaaaaaggcgggagaagccccggcaggtttgaagctgcttcttcgaatttgcaattcaatatgaaaatcacctcggagctggtaaaaagaggcctaacccctgtctttagatttacagtccaatgcttcactcagccattttacctcacccccactgatgttcgccgaccgttgactattctctacaaaccacaaagacattggaacactatacctattattcggcgcatgagctggagtcctaggcacagctctaagcctccttattcgagccgagctgggccagccaggcaaccttctaggtaacgaccacatctacaacgttatcgtcacagcccatgcatttgtaataatcttcttcatagtaatacccatcataatcggaggctttggcaactgactagttcccctaataatcggtgcccccgatatggcgtttccccgcataaacaacataagcttctgactcttacctccctctctcctactcctgctcgcatctgctatagtggaggccggagcaggaacaggttgaacagtctaccctcccttagcagggaactactcccaccctggagcctccgtagacctaaccatcttctccttacacctagcaggtgtctcctctatcttaggggccatcaatttcatcacaacaattatcaatataaaaccccctgccataacccaataccaaacgcccctcttcgtctgatccgtcctaatcacagcagtcctacttctcctatctctcccagtcctagctgctggcatcactatactactaacagaccgcaacctcaacaccaccttcttcgaccccgccggaggaggagaccccattctataccaacacctattctgatttttcggtcaccctgaagtttatattcttatcctaccaggcttcggaataatctcccatattgtaacttactactccggaaaaaaagaaccatttggatacataggtatggtctgagctatgatatcaattggcttcctagggtttatcgtgtgagcacaccatatatttacagtaggaatagacgtagacacacgagcatatttcacctccgctaccataatcatcgctatccccaccggcgtcaaagtatttagctgactcgccacactccacggaagcaatatgaaatgatctgctgcagtgctctgagccctaggattcatctttcttttcaccgtaggtggcctgactggcattgtattagcaaactcatcactagacatcgtactacacgacacgtactacgttgtagcccacttccactatgtcctatcaataggagctgtatttgccatcataggaggcttcattcactgatttcccctattctcaggctacaccctagaccaaacctacgccaaaatccatttcactatcatattcatcggcgtaaatctaactttcttcccacaacactttctcggcctatccggaatgccccgacgttactcggactaccccgatgcatacaccacatgaaacatcctatcatctgtaggctcattcatttctctaacagcagtaatattaataattttcatgatttgagaagccttcgcttcgaagcgaaaagtcctaatagtagaagaaccctccataaacctggagtgactatatggatgccccccaccctaccacacattcgaagaacccgtatacataaaatctagacaaaaaaggaaggaatcgaaccccccaaagctggtttcaagccaaccccatggcctccatgactttttcaaaaaggtattagaaaaaccatttcataactttgtcaaagttaaattataggctaaatcctatatatcttaatggcacatgcagcgcaagtaggtctacaagacgctacttcccctatcatagaagagcttatcacctttcatgatcacgccctcataatcattttccttatctgcttcctagtcctgtatgcccttttcctaacactcacaacaaaactaactaatactaacatctcagacgctcaggaaatagaaaccgtctgaactatcctgcccgccatcatcctagtcctcatcgccctcccatccctacgcatcctttacataacagacgaggtcaacgatccctcccttaccatcaaatcaattggccaccaatggtactgaacctacgagtacaccgactacggcggactaatcttcaactcctacatacttcccccattattcctagaaccaggcgacctgcgactccttgacgttgacaatcgagtagtactcccgattgaagcccccattcgtataataattacatcacaagacgtcttgcactcatgagctgtccccacattaggcttaaaaacagatgcaattcccggacgtctaaaccaaaccactttcaccgctacacgaccgggggtatactacggtcaatgctctgaaatctgtggagcaaaccacagtttcatgcccatcgtcctagaattaattcccctaaaaatctttgaaatagggcccgtatttaccctatagcaccccctctaccccctctagagcccactgtaaagctaacttagcattaaccttttaagttaaagattaagagaaccaacacctctttacagtgaaatgccccaactaaatactaccgtatggcccaccataattacccccatactccttacactattcctcatcacccaactaaaaatattaaacacaaactaccacctacctccctcaccaaagcccataaaaataaaaaattataacaaaccctgagaaccaaaatgaacgaaaatctgttcgcttcattcattgcccccacaatcctaggcctacccgccgcagtactgatcattctatttccccctctattgatccccacctccaaatatctcatcaacaaccgactaatcaccacccaacaatgactaatcaaactaacctcaaaacaaatgataaccatacacaacactaaaggacgaacctgatctcttatactagtatccttaatcatttttattgccacaactaacctcctcggactcctgcctcactcatttacaccaaccacccaactatctataaacctagccatggccatccccttatgagcgggcgcagtgattataggctttcgctctaagattaaaaatgccctagcccacttcttaccacaaggcacacctacaccccttatccccatactagttattatcgaaaccatcagcctactcattcaaccaatagccctggccgtacgcctaaccgctaacattactgcaggccacctactcatgcacctaattggaagcgccaccctagcaatatcaaccattaaccttccctctacacttatcatcttcacaattctaattctactgactatcctagaaatcgctgtcgccttaatccaagcctacgttttcacacttctagtaagcctctacctgcacgacaacacataatgacccaccaatcacatgcctatcatatagtaaaacccagcccatgacccctaacaggggccctctcagccctcctaatgacctccggcctagccatgtgatttcacttccactccataacgctcctcatactaggcctactaaccaacacactaaccatataccaatgatggcgcgatgtaacacgagaaagcacataccaaggccaccacacaccacctgtccaaaaaggccttcgatacgggataatcctatttattacctcagaagtttttttcttcgcaggatttttctgagccttttaccactccagcctagcccctaccccccaattaggagggcactggcccccaacaggcatcaccccgctaaatcccctagaagtcccactcctaaacacatccgtattactcgcatcaggagtatcaatcacctgagctcaccatagtctaatagaaaacaaccgaaaccaaataattcaagcactgcttattacaattttactgggtctctattttaccctcctacaagcctcagagtacttcgagtctcccttcaccatttccgacggcatctacggctcaacattttttgtagccacaggcttccacggacttcacgtcattattggctcaactttcctcactatctgcttcatccgccaactaatatttcactttacatccaaacatcactttggcttcgaagccgccgcctgatactggcattttgtagatgtggtttgactatttctgtatgtctccatctattgatgagggtcttactcttttagtataaatagtaccgttaacttccaattaactagttttgacaacattcaaaaaagagtaataaacttcgccttaattttaataatcaacaccctcctagccttactactaataattattacattttgactaccacaactcaacggctacatagaaaaatccaccccttacgagtgcggcttcgaccctatatcccccgcccgcgtccctttctccataaaattcttcttagtagctattaccttcttattatttgatctagaaattgccctccttttacccctaccatgagccctacaaacaactaacctgccactaatagttatgtcatccctcttattaatcatcatcctagccctaagtctggcctatgagtgactacaaaaaggattagactgaaccgaattggtatatagtttaaacaaaacgaatgatttcgactcattaaattatgataatcatatttaccaaatgcccctcatttacataaatattatactagcatttaccatctcacttctaggaatactagtatatcgctcacacctcatatcctccctactatgcctagaaggaataatactatcgctgttcattatagctactctcataaccctcaacacccactccctcttagccaatattgtgcctattgccatactagtctttgccgcctgcgaagcagcggtgggcctagccctactagtctcaatctccaacacatatggcctagactacgtacataacctaaacctactccaatgctaaaactaatcgtcccaacaattatattactaccactgacatgactttccaaaaaacacataatttgaatcaacacaaccacccacagcctaattattagcatcatccctctactattttttaaccaaatcaacaacaacctatttagctgttccccaaccttttcctccgaccccctaacaacccccctcctaatactaactacctgactcctacccctcacaatcatggcaagccaacgccacttatccagtgaaccactatcacgaaaaaaactctacctctctatactaatctccctacaaatctccttaattataacattcacagccacagaactaatcatattttatatcttcttcgaaaccacacttatccccaccttggctatcatcacccgatgaggcaaccagccagaacgcctgaacgcaggcacatacttcctattctacaccctagtaggctcccttcccctactcatcgcactaatttacactcacaacaccctaggctcactaaacattctactactcactctcactgcccaagaactatcaaactcctgagccaacaacttaatatgactagcttacacaatagcttttatagtaaagatacctctttacggactccacttatgactccctaaagcccatgtcgaagcccccatcgctgggtcaatagtacttgccgcagtactcttaaaactaggcggctatggtataatacgcctcacactcattctcaaccccctgacaaaacacatagcctaccccttccttgtactatccctatgaggcataattataacaagctccatctgcctacgacaaacagacctaaaatcgctcattgcatactcttcaatcagccacatagccctcgtagtaacagccattctcatccaaaccccctgaagcttcaccggcgcagtcattctcataatcgcccacgggcttacatcctcattactattctgcctagcaaactcaaactacgaacgcactcacagtcgcatcataatcctctctcaaggacttcaaactctactcccactaatagctttttgatgacttctagcaagcctcgctaacctcgccttaccccccactattaacctactgggagaactctctgtgctagtaaccacgttctcctgatcaaatatcactctcctacttacaggactcaacatactagtcacagccctatactccctctacatatttaccacaacacaatggggctcactcacccaccacattaacaacataaaaccctcattcacacgagaaaacaccctcatgttcatacacctatcccccattctcctcctatccctcaaccccgacatcattaccgggttttcctcttgtaaatatagtttaaccaaaacatcagattgtgaatctgacaacagaggcttacgaccccttatttaccgagaaagctcacaagaactgctaactcatgcccccatgtctaacaacatggctttctcaacttttaaaggataacagctatccattggtcttaggccccaaaaattttggtgcaactccaaataaaagtaataaccatgcacactactataaccaccctaaccctgacttccctaattccccccatccttaccaccctcgttaaccctaacaaaaaaaactcatacccccattatgtaaaatccattgtcgcatccacctttattatcagtctcttccccacaacaatattcatgtgcctagaccaagaagttattatctcgaactgacactgagccacaacccaaacaacccagctctccctaagcttcaaactagactacttctccataatattcatccctgtagcattgttcgttacatggtccatcatagaattctcactgtgatatataaactcagacccaaacattaatcagttcttcaaatatctactcatcttcctaattaccatactaatcttagttaccgctaacaacctattccaactgttcatcggctgagagggcgtaggaattatatccttcttgctcatcagttgatgatacgcccgagcagatgccaacacagcagccattcaagcaatcctatacaaccgtatcggcgatatcggtttcatcctcgccttagcatgatttatcctacactccaactcatgagacccacaacaaatagcccttctaaacgctaatccaagcctcaccccactactaggcctcctcctagcagcagcaggcaaatcagcccaattaggcctccacccctgactcccctcagccatagaaggccccaccccagtctcagccctactccactcaagcactatagttgtagcaggaatcttcttactcatccgcttccaccccctagcagaaaatagcccactaatccaaactctaacactatgcttaggcgctatcaccactctgttcgcagcagtctgcgcccttacacaaaatgacatcaaaaaaatcgtagccttctccacttcaagtcaactaggactcataatagttacaatcggcatcaaccaaccacacctagcattcctgcacatctgtacccacgccttcttcaaagccatactatttatgtgctccgggtccatcatccacaaccttaacaatgaacaagatattcgaaaaataggaggactactcaaaaccatacctctcacttcaacctccctcaccattggcagcctagcattagcaggaatacctttcctcacaggtttctactccaaagaccacatcatcgaaaccgcaaacatatcatacacaaacgcctgagccctatctattactctcatcgctacctccctgacaagcgcctatagcactcgaataattcttctcaccctaacaggtcaacctcgcttccccacccttactaacattaacgaaaataaccccaccctactaaaccccattaaacgcctggcagccggaagcctattcgcaggatttctcattactaacaacatttcccccgcatcccccttccaaacaacaatccccctctacctaaaactcacagccctcgctgtcactttcctaggacttctaacagccctagacctcaactacctaaccaacaaacttaaaataaaatccccactatgcacattttatttctccaacatactcggattctaccctagcatcacacaccgcacaatcccctatctaggccttcttacgagccaaaacctgcccctactcctcctagacctaacctgactagaaaagctattacctaaaacaatttcacagcaccaaatctccacctccatcatcacctcaacccaaaaaggcataattaaactttacttcctctctttcttcttcccactcatcctaaccctactcctaatcacataacctattcccccgagcaatctcaattacaatatatacaccaacaaacaatgttcaaccagtaactactactaatcaacgcccataatcatacaaagcccccgcaccaataggatcctcccgaatcaaccctgacccctctccttcataaattattcagcttcctacactattaaagtttaccacaaccaccaccccatcatactctttcacccacagcaccaatcctacctccatcgctaaccccactaaaacactcaccaagacctcaacccctgacccccatgcctcaggatactcctcaatagccatcgctgtagtatatccaaagacaaccatcattccccctaaataaattaaaaaaactattaaacccatataacctcccccaaaattcagaataataacacacccgaccacaccgctaacaatcaatactaaacccccataaataggagaaggcttagaagaaaaccccacaaaccccattactaaacccacactcaacagaaacaaagcatacatcattattctcgcacggactacaaccacgaccaatgatatgaaaaaccatcgttgtatttcaactacaagaacaccaatgaccccaatacgcaaaactaaccccctaataaaattaattaaccactcattcatcgacctccccaccccatccaacatctccgcatgatgaaacttcggctcactccttggcgcctgcctgatcctccaaatcaccacaggactattcctagccatgcactactcaccagacgcctcaaccgccttttcatcaatcgcccacatcactcgagacgtaaattatggctgaatcatccgctaccttcacgccaatggcgcctcaatattctttatctgcctcttcctacacatcgggcgaggcctatattacggatcatttctctactcagaaacctgaaacatcggcattatcctcctgcttgcaactatagcaacagccttcataggctatgtcctcccgtgaggccaaatatcattctgaggggccacagtaattacaaacttactatccgccatcccatacattgggacagacctagttcaatgaatctgaggaggctactcagtagacagtcccaccctcacacgattctttacctttcacttcatcttgcccttcattattgcagccctagcagcactccacctcctattcttgcacgaaacgggatcaaacaaccccctaggaatcacctcccattccgataaaatcaccttccacccttactacacaatcaaagacgccctcggcttacttctcttccttctctccttaatgacattaacactattctcaccagacctcctaggcgacccagacaattataccctagccaaccccttaaacacccctccccacatcaagcccgaatgatatttcctattcgcctacacaattctccgatccgtccctaacaaactaggaggcgtccttgccctattactatccatcctcatcctagcaataatccccatcctccatatatccaaacaacaaagcataatatttcgcccactaagccaatcactttattgactcctagccgcagacctcctcattctaacctgaatcggaggacaaccagtaagctacccttttaccatcattggacaagtagcatccgtactatacttcacaacaatcctaatcctaataccaactatctccctaattgaaaacaaaatactcaaatgggcctgtccttgtagtataaactaatacaccagtcttgtaaaccggagatgaaaacctttttccaaggacaaatcagagaaaaagtctttaactccaccattagcacccaaagctaagattctaatttaaactattctctgttctttcatggggaagcagatttgggtaccacccaagtattgactcacccatcaacaaccgctatgtatttcgtacattactgccagccaccatgaatattgtacggtaccataaatacttgaccacctgtagtacataaaaactcaatccacatcaaaaccccctccccatgcttacaagcaagtacagcaatcaaccctcaactatcacacatcaactgcaactccaaagccacccctcacccactaggataccaacaaacctacccacccttaacagtacatagtacataaagccatttaccgtacatagcacattacagtcaaatcccttctcgtccccatggatgacccccctcagataggggtcccttgaccaccatcctccgtgaaatcaatatcccgcacaagagtgctactctcctcgctccgggcccataacacttgggggtagctaaagtgaactgtatccgacatctggttcctacttcagggccataaagcctaaatagcccacacgttccccttaaataagacatcacgatg

SEQ ID NO: 359 - DNA, 16570 bp, Homo sapiens mitochondrial
  3108: "n" refers to a nucleotide at position 3107 of the Cambridge Reference Sequence (CRS, Anderson et al. 1981 Nature 290:457-465), later determined to be absent from the human mtDNA sequence according to the revised CRS (rCRS, Andrews et al. 1999 Nature Genetics 23:147); "n" therefore represents a single nucleotide deletion at a position corresponding to nucleotide 3107 of SEQ ID NO:1 as provided herein.
gatcacaggtctatcaccctattaaccactcacgggagctctccatgcatttggtattttcgtctggggggtgtgcacgcgatagcattgcgagacgctggagccggagcaccctatgtcgcagtatctgtctttgattcctgcctcatcctattatttatcgcacctacgttcaatattacaggcgaacatacctactaaagtgtgttaattaattaatgcttgtaggacataataataacaattgaatgtctgcacagccgctttccacacagacatcataacaaaaaatttccaccaaaccccccctcccccgccttctggccacagcacttaaacacatctctgccaaaccccaaaaacaaagaaccctaacaccagcctaaccagatttcaaattttatcttttggcggtatgcacttttaacagtcaccccccaactaacacattattttcccctcccactcccatactactaatctcatcaatacaacccccgcccatcctacccagcacacacacaccgctgctaaccccataccccgaaccaaccaaaccccaaagacaccccccacagtttatgtagcttacctcctcaaagcaatacactgaaaatgtttagacgggctcacatcaccccataaacaaataggtttggtcctagcctttctattagctcttagtaagattacacatgcaagcatccccgttccagtgagttcaccctctaaatcaccacgatcaaaagggacaagcatcaagcacgcagcaatgcagctcaaaacgcttagcctagccacacccccacgggaaacagcagtgattaacctttagcaataaacgaaagtttaactaagctatactaaccccagggttggtcaatttcgtgccagccaccgcggtcacacgattaacccaagtcaatagaagccggcgtaaagagtgttttagatcaccccctccccaataaagctaaaactcacctgagttgtaaaaaactccagttgacacaaaatagactacgaaagtggctttaacatatctgaacacacaatagctaagacccaaactgggattagataccccactatgcttagccctaaacctcaacagttaaatcaacaaaactgctcgccagaacactacgagccacagcttaaaactcaaaggacctggcggtgcttcatatccctctagaggagcctgttctgtaatcgataaaccccgatcaacctcaccacctcttgctcagcctatataccgccatcttcagcaaaccctgatgaaggctacaaagtaagcgcaagtacccacgtaaagacgttaggtcaaggtgtagcccatgaggtggcaagaaatgggctacattttctaccccagaaaactacgatagcccttatgaaacttaagggtcgaaggtggatttagcagtaaactgagagtagagtgcttagttgaacagggccctgaagcgcgtacacaccgcccgtcaccctcctcaagtatacttcaaaggacatttaactaaaacccctacgcatttatatagaggagacaagtcgtaacatggtaagtgtactggaaagtgcacttggacgaaccagagtgtagcttaacacaaagcacccaacttacacttaggagatttcaacttaacttgaccgctctgagctaaacctagccccaaacccactccaccttactaccagacaaccttaaccaaaccatttacccaaataaagtataggcgatagaaattgaaacctggcgcaatagatatagtaccgcaagggaaagatgaaaaattataaccaagcataatatagcaaggactaacccctataccttctgcataatgaattaactagaaataactttgcaaggagagccaaagctaagacccccgaaaccagacgagctacctaagaacagctaaaagagcacacccgtctatgtagcaaaatagtgggaagatttataggtagaggcgacaaacctaccgagcctggtgatagctggttgtccaagatagaatcttagttcaactttaaatttgcccacagaaccctctaaatccccttgtaaatttaactgttagtccaaagaggaacagctctttggacactaggaaaaaaccttgtagagagagtaaaaaatttaacacccatagtaggcctaaaagcagccaccaattaagaaagcgttcaagctcaacacccactacctaaaaaatcccaaacatataactgaactcctcacacccaattggaccaatctatcaccctatagaagaactaatgttagtataagtaacatgaaaacattctcctccgcataagcctgcgtcagattaaaacactgaactgacaattaacagcccaatatctacaatcaaccaacaagtcattattaccctcactgtcaacccaacacaggcatgctcataaggaaaggttaaaaaaagtaaaaggaactcggcaaatcttaccccgcctgtttaccaaaaacatcacctctagcatcaccagtattagaggcaccgcctgcccagtgacacatgtttaacggccgcggtaccctaaccgtgcaaaggtagcataatcacttgttccttaaatagggacctgtatgaatggctccacgagggttcagctgtctcttacttttaaccagtgaaattgacctgcccgtgaagaggcgggcatgacacagcaagacgagaagaccctatggagctttaatttattaatgcaaacagtacctaacaaacccacaggtcctaaactaccaaacctgcattaaaaatttcggttggggcgacctcggagcagaacccaacctccgagcagtacatgctaagacttcaccagtcaaagcgaactactatactcaattgatccaataacttgaccaacggaacaagttaccctagggataacagcgcaatcctattctagagtccatatcaacaatagggtttacgacctcgatgttggatcaggacatcccgatggtgcagccgctattaaaggttcgtttgttcaacgattaaagtcctacgtgatctgagttcagaccggagtaatccaggtcggtttctatctacnttcaaattcctccctgtacgaaaggacaagagaaataaggcctacttcacaaagcgccttcccccgtaaatgatatcatctcaacttagtattatacccacacccacccaagaacagggtttgttaagatggcagagcccggtaatcgcataaaacttaaaactttacagtcagaggttcaattcctcttcttaacaacatacccatggccaacctcctactcctcattgtacccattctaatcgcaatggcattcctaatgcttaccgaacgaaaaattctaggctatatacaactacgcaaaggccccaacgttgtaggcccctacgggctactacaacccttcgctgacgccataaaactcttcaccaaagagcccctaaaacccgccacatctaccatcaccctctacatcaccgccccgaccttagctctcaccatcgctcttctactatgaacccccctccccatacccaaccccctggtcaacctcaacctaggcctcctatttattctagccacctctagcctagccgtttactcaatcctctgatcagggtgagcatcaaactcaaactacgccctgatcggcgcactgcgagcagtagcccaaacaatctcatatgaagtcaccctagccatcattctactatcaacattactaataagtggctcctttaacctctccacccttatcacaacacaagaacacctctgattactcctgccatcatgacccttggccataatatgatttatctccacactagcagagaccaaccgaacccccttcgaccttgccgaaggggagtccgaactagtctcaggcttcaacatcgaatacgccgcaggccccttcgccctattcttcatagccgaatacacaaacattattataataaacaccctcaccactacaatcttcctaggaacaacatatgacgcactctcccctgaactctacacaacatattttgtcaccaagaccctacttctaacctccctgttcttatgaattcgaacagcatacccccgattccgctacgaccaactcatacacctcctatgaaaaaacttcctaccactcaccctagcattacttatatgatatgtctccatacccattacaatctccagcattccccctcaaacctaagaaatatgtctgataaaagagttactttgatagagtaaataataggagcttaaacccccttatttctaggactatgagaatcgaacccatccctgagaatccaaaattctccgtgccacctatcacaccccatcctaaagtaaggtcagctaaataagctatcgggcccataccccgaaaatgttggttatacccttcccgtactaattaatcccctggcccaacccgtcatctactctaccatctttgcaggcacactcatcacagcgctaagctcgcactgattttttacctgagtaggcctagaaataaacatgctagcttttattccagttctaaccaaaaaaataaaccctcgttccacagaagctgccatcaagtatttcctcacgcaagcaaccgcatccataatccttctaatagctatcctcttcaacaatatactctccggacaatgaaccataaccaatactaccaatcaatactcatcattaataatcataatggctatagcaataaaactaggaatagccccctttcacttctgagtcccagaggttacccaaggcacccctctgacatccggcctgcttcttctcacatgacaaaaactagcccccatctcaatcatataccaaatctctccctcactaaacgtaagccttctcctcactctctcaatcttatccatcatagcaggcagttgaggtggattaaaccaaacccagctacgcaaaatcttagcatactcctcaattacccacataggatgaataatagcagttctaccgtacaaccctaacataaccattcttaatttaactatttatattatcctaactactaccgcattcctactactcaacttaaactccagcaccacgaccctactactatctcgcacctgaaacaagctaacatgactaacacccttaattccatccaccctcctctccctaggaggcctgcccccgctaaccggctttttgcccaaatgggccattatcgaagaattcacaaaaaacaatagcctcatcatccccaccatcatagccaccatcaccctccttaacctctacttctacctacgcctaatctactccacctcaatcacactactccccatatctaacaacgtaaaaataaaatgacagtttgaacatacaaaacccaccccattcctccccacactcatcgcccttaccacgctactcctacctatctccccttttatactaataatcttatagaaatttaggttaaatacagaccaagagccttcaaagccctcagtaagttgcaatacttaatttctgtaacagctaaggactgcaaaaccccactctgcatcaactgaacgcaaatcagccactttaattaagctaagcccttactagaccaatgggacttaaacccacaaacacttagttaacagctaagcaccctaatcaactggcttcaatctacttctcccgccgccgggaaaaaaggcgggagaagccccggcaggtttgaagctgcttcttcgaatttgcaattcaatatgaaaatcacctcggagctggtaaaaagaggcctaacccctgtctttagatttacagtccaatgcttcactcagccattttacctcacccccactgatgttcgccgaccgttgactattctctacaaaccacaaagacattggaacactatacctattattcggcgcatgagctggagtcctaggcacagctctaagcctccttattcgagccgagctgggccagccaggcaaccttctaggtaacgaccacatctacaacgttatcgtcacagcccatgcatttgtaataatcttcttcatagtaatacccatcataatcggaggctttggcaactgactagttcccctaataatcggtgcccccgatatggcgtttccccgcataaacaacataagcttctgactcttacccccctctctcctactcctgctcgcatctgctatagtggaggccggagcaggaacaggttgaacagtctaccctcccttagcagggaactactcccaccctggagcctccgtagacctaaccatcttctccttacacctagcaggtgtctcttctatcttaggggccatcaatttcatcacaacaattatcaatataaaaccccctgccataacccaataccaaacgcccctcttcgtctgatccgtcctaatcacagcagtcctacttctcctatctctcccagtcctagctgctggcatcactatactactaacagaccgcaacctcaacaccaccttcttcgaccccgccggaggaggagaccccattctataccaacacctattctgatttttcggtcaccctgaagtttatattcttatcctaccaggcttcggaataatctcccatattgtaacttactactccggaaaaaaagaaccatttggatacataggtatggtctgagctatgatatcaattggcttcctagggtttatcgtgtgagcacaccatatatttacagtaggaatagacgtagacacacgagcatatttcacctccgctaccataatcatcgctatccccaccggcgtcaaagtatttagctgactcgccacactccacggaagcaatatgaaatgatctgctgcagtgctctgagccctaggattcatctttcttttcaccgtaggtggcctgactggcattgtattagcaaactcatcactagacatcgtactacacgacacgtactacgttgtagctcacttccactatgtcctatcaataggagctgtatttgccatcataggaggcttcattcactgatttcccctattctcaggctacaccctagaccaaacctacgccaaaatccatttcactatcatattcatcggcgtaaatctaactttcttcccacaacactttctcggcctatccggaatgccccgacgttactcggactaccccgatgcatacaccacatgaaacatcctatcatctgtaggctcattcatttctctaacagcagtaatattaataattttcatgatttgagaagccttcgcttcgaagcgaaaagtcctaatagtagaagaaccctccataaacctggagtgactatatggatgccccccaccctaccacacattcgaagaacccgtatacataaaatctagacaaaaaaggaaggaatcgaaccccccaaagctggtttcaagccaaccccatggcctccatgactttttcaaaaaggtattagaaaaaccatttcataactttgtcaaagttaaattataggctaaatcctatatatcttaatggcacatgcagcgcaagtaggtctacaagacgctacttcccctatcatagaagagcttatcacctttcatgatcacgccctcataatcattttccttatctgcttcctagtcctgtatgcccttttcctaacactcacaacaaaactaactaatactaacatctcagacgctcaggaaatagaaaccgtctgaactatcctgcccgccatcatcctagtcctcatcgccctcccatccctacgcatcctttacataacagacgaggtcaacgatccctcccttaccatcaaatcaattggccaccaatggtactgaacctacgagtacaccgactacggcggactaatcttcaactcctacatacttcccccattattcctagaaccaggcgacctgcgactccttgacgttgacaatcgagtagtactcccgattgaagcccccattcgtataataattacatcacaagacgtcttgcactcatgagctgtccccacattaggcttaaaaacagatgcaattcccggacgtctaaaccaaaccactttcaccgctacacgaccgggggtatactacggtcaatgctctgaaatctgtggagcaaaccacagtttcatgcccatcgtcctagaattaattcccctaaaaatctttgaaatagggcccgtatttaccctatagcaccccctctaccccctctagagcccactgtaaagctaacttagcattaaccttttaagttaaagattaagagaaccaacacctctttacagtgaaatgccccaactaaatactaccgtatggcccaccataattacccccatactccttacactattcctcatcacccaactaaaaatattaaacacaaactaccacctacctccctcaccaaagcccataaaaataaaaaattataacaaaccctgagaaccaaaatgaacgaaaatctgttcgcttcattcattgcccccacaatcctaggcctacccgccgcagtactgatcattctatttccccctctattaatccccacctccaaatatctcatcaacaaccgactaatcaccacccaacaatgactaatcaaactaacctcaaaacaaatgataaccatacacaacactaaaggacgaacctgatctcttatactagtatccttaatcatttttattgccacaactaacctcctcggactcctgcctcactcatttacaccaaccacccaactatctataaacctagccatggccatccccttatgagcgggcgcagtgattataggctttcgctctaagattaaaaatgccctagcccacttcttaccacaaggcacacctacaccccttatccccatactagttattatcgaaaccatcagcctactcattcaaccaatagccctggccgtacgcctaaccgctaacattactgcaggccacctactcatgcacctaattggaagcgccaccctagcaatatcaaccattaaccttccctctacacttatcatcttcacaattctaattctactgactatcctagaaatcgctgtcgccttaatccaagcctacgttttcacacttctagtaagcctctacctgcacgacaacacataatgacccaccaatcacatgcctatcatatagtaaaacccagcccatgacccctaacaggggccctctcagccctcctaatgacctccggcctagccatgtgatttcacttccactccataacgctcctcatactaggcctactaaccaacacactaaccatataccaatgatggcgcgatgtaacacgagaaagcacataccaaggccaccacacaccacctgtccaaaaaggccttcgatacgggataatcctatttattacctcagaagtttttttcttcgcaggatttttctgagccttttaccactccagcctagcccctaccccccaattaggagggcactggcccccaacaggcatcaccccgctaaatcccctagaagtcccactcctaaacacatccgtattactcgcatcaggagtatcaatcacctgagctcaccatagtctaatagaaaacaaccgaaaccaaataattcaagcactgcttattacaattttactgggtctctattttaccctcctacaagcctcagagtacttcgagtctcccttcaccatttccgacggcatctacggctcaacattttttgtagccacaggcttccacggacttcacgtcattattggctcaactttcctcactatctgcttcatccgccaactaatatttcactttacatccaaacatcactttggcttcgaagccgccgcctgatactggcattttgtagatgtggtttgactatttctgtatgtctccatctattgatgagggtcttactcttttagtataaatagtaccgttaacttccaattaactagttttgacaacattcaaaaaagagtaataaacttcgccttaattttaataatcaacaccctcctagccttactactaataattattacattttgactaccacaactcaacggctacatagaaaaatccaccccttacgagtgcggcttcgaccctatatcccccgcccgcgtccctttctccataaaattcttcttagtagctattaccttcttattatttgatctagaaattgccctccttttacccctaccatgagccctacaaacaactaacctgccactaatagttatgtcatccctcttattaatcatcatcctagccctaagtctggcctatgagtgactacaaaaaggattagactgaaccgaattggtatatagtttaaacaaaacgaatgatttcgactcattaaattatgataatcatatttaccaaatgcccctcatttacataaatattatactagcatttaccatctcacttctaggaatactagtatatcgctcacacctcatatcctccctactatgcctagaaggaataatactatcgctgttcattatagctactctcataaccctcaacacccactccctcttagccaatattgtgcctattgccatactagtctttgccgcctgcgaagcagcggtgggcctagccctactagtctcaatctccaacacatatggcctagactacgtacataacctaaacctactccaatgctaaaactaatcgtcccaacaattatattactaccactgacatgactttccaaaaaacacataatttgaatcaacacaaccacccacagcctaattattagcatcatccctctactattttttaaccaaatcaacaacaacctatttagctgttccccaaccttttcctccgaccccctaacaacccccctcctaatactaactacctgactcctacccctcacaatcatggcaagccaacgccacttatccagtgaaccactatcacgaaaaaaactctacctctctatactaatctccctacaaatctccttaattataacattcacagccacagaactaatcatattttatatcttcttcgaaaccacacttatccccaccttggctatcatcacccgatgaggcaaccagccagaacgcctgaacgcaggcacatacttcctattctacaccctagtaggctcccttcccctactcatcgcactaatttacactcacaacaccctaggctcactaaacattctactactcactctcactgcccaagaactatcaaactcctgagccaacaacttaatatgactagcttacacaatagcttttatagtaaagatacctctttacggactccacttatgactccctaaagcccatgtcgaagcccccatcgctgggtcaatagtacttgccgcagtactcttaaaactaggcggctatggtataatacgcctcacactcattctcaaccccctgacaaaacacatagcctaccccttccttgtactatccctatgaggcataattataacaagctccatctgcctacgacaaacagacctaaaatcgctcattgcatactcttcaatcagccacatagccctcgtagtaacagccattctcatccaaaccccctgaagcttcaccggcgcagtcattctcataatcgcccacggacttacatcctcattactattctgcctagcaaactcaaactacgaacgcactcacagtcgcatcataatcctctctcaaggacttcaaactctactcccactaatagctttttgatgacttctagcaagcctcgctaacctcgccttaccccccactattaacctactgggagaactctctgtgctagtaaccacgttctcctgatcaaatatcactctcctacttacaggactcaacatactagtcacagccctatactccctctacatatttaccacaacacaatggggctcactcacccaccacattaacaacataaaaccctcattcacacgagaaaacaccctcatgttcatacacctatcccccattctcctcctatccctcaaccccgacatcattaccgggttttcctcttgtaaatatagtttaaccaaaacatcagattgtgaatctgacaacagaggcttacgaccccttatttaccgagaaagctcacaagaactgctaactcatgcccccatgtctaacaacatggctttctcaacttttaaaggataacagctatccattggtcttaggccccaaaaattttggtgcaactccaaataaaagtaataaccatgcacactactataaccaccctaaccctgacttccctaattccccccatccttaccaccctcgttaaccctaacaaaaaaaactcatacccccattatgtaaaatccattgtcgcatccacctttattatcagtctcttccccacaacaatattcatgtgcctagaccaagaagttattatctcgaactgacactgagccacaacccaaacaacccagctctccctaagcttcaaactagactacttctccataatattcatccctgtagcattgttcgttacatggtccatcatagaattctcactgtgatatataaactcagacccaaacattaatcagttcttcaaatatctactcattttcctaattaccatactaatcttagttaccgctaacaacctattccaactgttcatcggctgagagggcgtaggaattatatccttcttgctcatcagttgatgatacgcccgagcagatgccaacacagcagccattcaagcaatcctatacaaccgtatcggcgatatcggtttcatcctcgccttagcatgatttatcctacactccaactcatgagacccacaacaaatagcccttctaaacgctaatccaagcctcaccccactactaggcctcctcctagcagcagcaggcaaatcagcccaattaggtctccacccctgactcccctcagccatagaaggccccaccccagtctcagccctactccactcaagcactatagttgtagcaggaatcttcttactcatccgcttccaccccctagcagaaaatagcccactaatccaaactctaacactatgcttaggcgctatcaccactctgttcgcagcagtctgcgcccttacacaaaatgacatcaaaaaaatcgtagccttctccacttcaagtcaactaggactcataatagttacaatcggcatcaaccaaccacacctagcattcctgcacatctgtacccacgccttcttcaaagccatactatttatgtgctccgggtccatcatccacaaccttaacaatgaacaagatattcgaaaaataggaggactactcaaaaccatacctctcacttcaacctccctcaccattggcagcctagcattagcaggaatacctttcctcacaggtttctactccaaagaccacatcatcgaaaccgcaaacatatcatacacaaacgcctgagccctatctattactctcatcgctacctccctgacaagcgcctatagcactcgaataattcttctcaccctaacaggtcaacctcgcttccccacccttactaacattaacgaaaataaccccaccctactaaaccccattaaacgcctggcagccggaagcctattcgcaggatttctcattactaacaacatttcccccgcatcccccttccaaacaacaatccccctctacctaaaactcacagccctcgctgtcactttcctaggacttctaacagccctagacctcaactacctaaccaacaaacttaaaataaaatccccactatgcacattttatttctccaacatactcggattctaccctagcatcacacaccgcacaatcccctatctaggccttcttgcgagccaaaacctgcccctactcctcctagacctaacctgactagaaaagctattacctaaaacaatttcacagcaccaaatctccacctccatcatcacctcaacccaaaaaggcataattaaactttacttcctctctttcttcttcccactcatcctaaccctactcctaatcacataacctattcccccgagcaatctcaattacaatatatacaccaacaaacaatgttcaaccagtaactactactaatcaacgcccataatcatacaaagcccccgcaccaataggatcctcccgaatcaaccctgacccctctccttcataaattattcagcttcctacactattaaagtttaccacaaccaccaccccatcatactctttcacccacagcaccaatcctacctccatcgctaaccccactaaaacactcaccaagacctcaacccctgacccccatgcctcaggatactcctcaatagccatcgctgtagtatacccaaagacaaccatcattccccctaaataaattaaaaaaactattaaacccatataacctcccccaaaattcagaataataacacacccgaccacaccgctaacaatcaatactaaacccccataaataggagaaggcttagaagaaaaccccacaaaccccattactaaacccacactcaacagaaacaaagcatacatcattattctcgcacggactacaaccacgaccaatgatatgaaaaaccatcgttgtatttcaactacaagaacaccaatgaccccaatacgcaaaattaaccccctaataaaattaattaaccactcattcatcgacctccccaccccatccaacatctccgcatgatgaaacttcggctcactccttggcgcctgcctgatcctccaaatcaccacaggactattcctagccatgcactactcaccagacgcctcaaccgccttttcatcaatcgcccacatcactcgagacgtaaattatggctgaatcatccgctaccttcacgccaatggcgcctcaatattctttatctgcctcttcctacacatcgggcgaggcctatattacggatcatttctctactcagaaacctgaaacatcggcattatcctcctgcttgcaactatagcaacagccttcataggctatgtcctcccgtgaggccaaatatcattctgaggggccacagtaattacaaacttactatccgccatcccatacattgggacagacctagttcaatgaatctgaggaggctactcagtagacagtcccaccctcacacgattctttacctttcacttcatcttgcccttcattattgcagccctagcagcactccacctcctattcttgcacgaaacgggatcaaacaaccccctaggaatcacctcccattccgataaaatcaccttccacccttactacacaatcaaagacgccctcggcttacttctcttccttctctccttaatgacattaacactattctcaccagacctcctaggcgacccagacaattataccctagccaaccccttaaacacccctccccacatcaagcccgaatgatatttcctattcgcctacacaattctccgatccgtccctaacaaactaggaggcgtccttgccctattactatccatcctcatcctagcaataatccccatcctccatatatccaaacaacaaagcataatatttcgcccactaagccaatcactttattgactcctagccgcagacctcctcattctaacctgaatcggaggacaaccagtaagctacccttttaccatcattggacaagtagcatccgtactatacttcacaacaatcctaatcctaataccaactatctccctaattgaaaacaaaatactcaaatgggcctgtccttgtagtataaactaatacaccagtcttgtaaaccggagatgaaaacctttttccaaggacaaatcagagaaaaagtctttaactccaccattagcacccaaagctaagattctaatttaaactattctctgttctttcatggggaagcagatttgggtaccacccaagtattgactcacccatcaacaaccgctatgtatttcgtacattactgccagccaccatgaatattgtacggtaccataaatacttgaccacctgtagtacataaaaacccaatccacatcaaaaccccccccccatgcttacaagcaagtacagcaatcaaccttcaactatcacacatcaactgcaactccaaagccacccctcacccactaggatatcaacaaacctacccacccttaacagtacatagtacataaagccatttaccgtacatagcacattacagtcaaatcccttctcgtccccatggatgacccccctcagataggggtcccttgaccaccatcctccgtgaaatcaatatcccgcacaagagtgctactctcctcgctccgggcccataacacttgggggtagctaaagtgaactgtatccgacatctggttcctacttcagggccataaagcctaaatagcccacacgttccccttaaataagacatcacgatg

SEQ ID NO: 360 - DNA, 16572 bp, Homo sapiens mitochondrial
  3110: "n" refers to a nucleotide at position 3107 of the Cambridge Reference Sequence (CRS, Anderson et al. 1981 Nature 290:457-465), later determined to be absent from the human mtDNA sequence according to the revised CRS (rCRS, Andrews et al. 1999 Nature Genetics 23:147); "n" therefore represents a single nucleotide deletion at a position corresponding to nucleotide 3107 of SEQ ID NO:1 as provided herein.
gatcacaggtctatcaccctattaaccactcacgggagctctccatgcatttggtattttcgtctggggggtgtgcacgcgatagcattgcgagacgctggagccggagcaccctatgtcgcagtatctgtctttgattcctgcctcatcctattatttatcgcacctacgttcaatattacaggcgaacatacctactaaagtgtgttaattaattaatgcttgtaggacataataataacaattgaatgtctgcacagccgctttccacacagacatcataacaaaaaatttccaccaaaccccccctcccccgccttctggccacagcacttaaacacatctctgccaaaccccaaaaacaaagaaccctaacaccagcctaaccagatttcaaattttatcttttggcggtatgcacttttaacagtcaccccccaactaacacattattttcccctcccactcccatactactaatctcatcaatacaacccccacccatcctacccagcacacacacaccacgctgctaaccccataccccgaaccaaccaaaccccaaagacaccccccacagtttatgtagcttacctcctcaaagcaatacactgaaaatgtttagacgggctcacatcaccccataaacaaataggtttggtcctagcctttctattagctcttagtaagattacacatgcaagcatccccgttccagtgagttcaccctctaaatcaccacgatcaaaagggacaagcatcaagcacgcagcaatgcagctcaaaacgcttagcctagccacacccccacgggaaacagcagtgattaacctttagcaataaacgaaagtttaactaagctatactaaccccagggttggtcaatttcgtgccagccaccgcggtcacacgattaacccaagtcaatagaagccggcgtaaagagtgttttagatcaccccctccccaataaagctaaaactcacctgagttgtaaaaaactccagttgacacaaaatagactacgaaagtggctttaacatatctgaacacacaatagctaagacccaaactgggattagataccccactatgcttagccctaaacctcaacagttaaatcaacaaaactgctcgccagaacactacgagccacagcttaaaactcaaaggacctggcggtgcttcatatccctctagaggagcctgttctgtaatcgataaaccccgatcaacctcaccacctcttgctcagcctatataccgccatcttcagcaaaccctgatgaaggctacaaagtaagcgcaagtacccacgtaaagacgttaggtcaaggtgtagcccatgaggtggcaagaaatgggctacattttctaccccagaaaactacgatagcccttatgaaacttaagggtcgaaggtggatttagcagtaaactgagagtagagtgcttagttgaacagggccctgaagcgcgtacacaccgcccgtcaccctcctcaagtatacttcaaaggacatttaactaaaacccctacgcatttatatagaggagacaagtcgtaacatggtaagtgtactggaaagtgcacttggacgaaccagagtgtagcttaacacaaagcacccaacttacacttaggagatttcaacttaacttgaccgctctgagctaaacctagccccaaacccactccaccttactaccagacaaccttagccaaaccatttacccaaataaagtataggcgatagaaattgaaacctggcgcaatagatatagtaccgcaagggaaagatgaaaaattatagccaagcataatatagcaaggactaacccctataccttctgcataatgaattaactagaaataactttgcaaggagagccaaagctaagacccccgaaaccagacgagctacctaagaacagctaaaagagcacacccgtctatgtagcaaaatagtgggaagatttataggtagaggcgacaaacctaccgagcctggtgatagctggttgtccaagatagaatcttagttcaactttaaatttgcccacagaaccctctaaatccccttgtaaatttaactgttagtccaaagaggaacagctctttggacactaggaaaaaaccttgtagagagagtaaaaaatttaacacccatagtaggcctaaaagcagccaccaattaagaaagcgttcaagctcaacacccactacctaaaaaatcccaaacatataactgaactcctcacacccaattggaccaatctatcaccctatagaagaactaatgttagtataagtaacatgaaaacattctcctccgcataagcctgcgtcagattaaaacactgaactgacaattaacagcccaatatctacaatcaaccaacaagtcattattaccctcactgtcaacccaacacaggcatgctcataaggaaaggttaaaaaaagtaaaaggaactcggcaaatcttaccccgcctgtttaccaaaaacatcacctctagcatcaccagtattagaggcaccgcctgcccagtgacacatgtttaacggccgcggtaccctaaccgtgcaaaggtagcataatcacttgttccttaaatagggacctgtatgaatggctccacgagggttcagctgtctcttacttttaaccagtgaaattgacctgcccgtgaagaggcgggcatgacacagcaagacgagaagaccctatggagctttaatttattaatgcaaacagtacctaacaaacccacaggtcctaaactaccaaacctgcattaaaaatttcggttggggcgacctcggagcagaacccaacctccgagcagtacatgctaagacttcaccagtcaaagcgaactactatactcaattgatccaatagcttgaccaacggaacaagttaccctagggataacagcgcaatcctattctagagtccatatcaacaatagggtttacgacctcgatgttggatcaggacatcccgatggtgcagccgctattaaaggttcgtttgttcaacgattaaagtcctacgtgatctgagttcagaccggagtaatccaggtcggtttctatctacnttcaaattcctccctgtacgaaaggacaagagaaataaggcctacttcacaaagcgccttcccccgtaaatgatatcatctcaacttagtattatacccacacccacccaagaacagggtttgttaagatggcagagcccggtaatcgcataaaacttaaaactttacagtcagaggttcaattcctcttcttaacaacatacccatggccaacctcctactcctcattgtacccattctaatcgcaatggcattcctaatgcttaccgaacgaaaaattctaggctatatacaactacgcaaaggccccaacgttgtaggcccctacgggctactacaacccttcgctgacgccataaaactcttcaccaaagagcccctaaaacccgccacatctaccatcaccctctacatcaccgccccgaccttagctctcaccatcgctcttctactatgaacccccctccccatacccaaccccctggtcaacctcaacctaggcctcctatttattctagccacctctagcctagccgtttactcaattctctgatcagggtgagcatcaaactcaaactacgccctgatcggcgcactgcgagcagtagcccaaacaatctcatatgaagtcaccctagccatcattctactatcaacattactaataagtggctcctttaacctctccacccttatcacaacacaagaacacctctgattactcctgccatcatgacccttggccataatatgatttatctccacactagcagagaccaaccgaacccccttcgaccttgccgaaggggagtccgaactagtctcaggcttcaacatcgaatacgccgcaggccccttcgccctattcttcatagccgaatacacaaacattattataataaacaccctcaccactacaatcttcctaggaacaacatatgacgcactctcccctgaactctacacaacatattttgtcaccaagaccctacttctaacctccctgttcttatgaattcgaacagcatacccccgattccgctacgaccaactcatacacctcctatgaaaaaacttcctaccactcaccctagcattacttatatgatatgtctccatacccattacaatctccagcattccccctcaaacctaagaaatatgtctgataaaagagttactttgatagagtaaataataggagcttaaacccccttatttctaggactatgagaatcgaacccatccctgagaatccaaaattctccgtgccacctatcacaccccatcctaaagtaaggtcagctaaataagctatcgggcccataccccgaaaatgttggttatacccttcccgtactaattaatcccctggcccaacccgtcatctactctaccatctttgcaggcacactcatcacagcgctaagctcgcactgattttttacctgagtaggcctagaaataaacatgctagcttttattccagttctaaccaaaaaaataaaccctcgttccacagaagctgccatcaagtacttcctcacgcaagcaaccgcatccataatccttctaatagctatcctcttcaacaatatactctccggacaatgaaccataaccaatactaccaatcaatactcatcattaataatcataatggctatagcaataaaactaggaatagccccctttcacttctgggtcccagaggttacccaaggcacccctctgacatccggcctgcttcttctcacatgacaaaaactagcccccatctcaatcatataccaaatctctccctcactaaacgtaagccttctcctcactctctcaatcttatccatcatagcaggcagttgaggtggattaaaccaaacccagctacgcaaaatcttagcatactcctcaattacccacataggatgaataatagcagttctaccgtacaaccctaacataaccattcttaatttaactatttatattatcctaactactaccgcattcctactactcaacttaaactccagcaccacgaccctactactatctcgcacctgaaacaagctaacatgactaacacccttaattccatccaccctcctctccctaggaggcctgcccccgctaaccggctttttgcccaaatgggccattatcgaagaattcacaaaaaacaatagcctcatcatccccaccatcatagccaccatcaccctccttaacctctacttctacctacgcctaatctactccacctcaatcacactactccccatatctaacaacgtaaaaataaaatgacagtttgaacatacaaaacccaccccattcctccccacactcatcgcccttaccacgctactcctacctatctccccttttatactaataatcttatagaaatttaggttaaatacagaccaagagccttcaaagccctcagtaagttgcaatacttaatttctgtaacagctaaggactgcaaaaccccactctgcatcaactgaacgcaaatcagccactttaattaagctaagcccttactagaccaatgggacttaaacccacaaacacttagttaacagctaagcaccctaatcaactggcttcaatctacttctcccgccgccgggaaaaaaggcgggagaagccccggcaggtttgaagctgcttcttcgaatttgcaattcaatatgaaaatcacctcggagctggtaaaaagaggcctaacccctgtctttagatttacagtccaatgcttcactcagccattttacctcacccccactgatgttcgccgaccgttgactattctctacaaaccacaaagacattggaacactatacctattattcggcgcatgagctggagtcctaggcacagccctaagcctccttattcgagccgagctgggccagccaggcaaccttctgggtaacgaccacatctacaacgttatcgtcacagcccatgcatttgtaataatcttcttcatagtaatacccatcataatcggaggctttggcaactggctagttcccctaataatcggtgcccccgatatggcgtttccccgcataaacaacataagcttctgactcttacctccctctctcctactcctgctcgcatctgctatagtggaggccggagcaggaacaggttgaacagtctaccctcccttagcagggaactactcccaccctggagcctccgtagacctaaccatcttctccttacacctagcaggtgtctcctctatcttaggggccatcaatttcatcacaacaattatcaatataaaaccccctgccataacccaataccaaacgcccctcttcgtctgatccgtcctaatcacagcagtcctacttctcctatctctcccagtcctagctgctggcatcactatactactaacagaccgcaacctcaacaccaccttcttcgaccccgccggaggaggagaccccattctataccaacacctattctgatttttcggtcaccctgaagtttatattcttatcctaccaggcttcggaataatctcccatattgtaacttactactccggaaaaaaagaaccatttggatacataggtatggtctgagctatgatatcaattggcttcctagggtttatcgtgtgagcacaccatatatttacagtaggaatagacgtagacacacgagcatatttcacctccgctaccataatcatcgctatccccaccggcgtcaaagtatttagctgactcgccacactccacggaagcaatatgaaatgatctgctgcagtgctctgagccctaggattcatctttcttttcaccgtaggtggcctgactggcattgtattagcaaactcatcactagacatcgtactacacgacacgtactacgttgtagctcacttccactatgtcctatcaataggagctgtatttgccatcataggaggcttcattcactgatttcccctattctcaggctacaccctagaccaaacctacgccaaaatccatttcactatcatattcatcggcgtaaatctaactttcttcccacaacactttctcggcctatccggaatgccccgacgttactcggactaccccgatgcatacaccacatgaaacatcctatcatctgtaggctcattcatttctctaacagcagtaatattaataattttcatgatttgagaagccttcgcttcgaagcgaaaagtcctaatagtagaagaaccctccataaacctggagtgactatatggatgccccccaccctaccacacattcgaagaacccgtatacataaaatctagacaaaaaaggaaggaatcgaaccccccaaagctggtttcaagccaaccccatggcctccatgactttttcaaaaaggtattagaaaaaccatttcataactttgtcaaagttaaattataggctaaatcctatatatcttaatggcacatgcagcgcaagtaggtctacaagacgctacttcccctatcatagaagagcttatcacctttcatgatcacgccctcataatcattttccttatctgcttcctagtcctgtatgcccttttcctaacactcacaacaaaactaactaatactaacatctcagacgctcaggaaatagaaaccgtctgaactatcctgcccgccatcatcctagtcctcatcgccctcccatccctacgcatcctttacataacagacgaggtcaacgatccctcccttaccatcaaatcaattggccaccaatggtactgaacctacgagtacaccgactacggcggactaatcttcaactcctacatacttcccccattattcctagaaccaggcgacctgcgactccttgacgttgacaatcgagtagtactcccgattgaagcccccattcgtataataattacatcacaagacgtcttgcactcatgagctgtccccacattaggcttaaaaacagatgcaattcccggacgtctaaaccaaaccactttcaccgctacacgaccgggggtatactacggtcaatgctctgaaatctgtggagcaaaccacagtttcatgcccatcgtcctagaattaattcccctaaaaatctttgaaatagggcccgtatttaccctatagcaccccctctaccccctctagagcccactgtaaagctaacttagcattaaccttttaagttaaagattaagagaaccaacacctctttacagtgaaatgccccaactaaatactaccgtatggcccaccataattacccccatactccttacactattcctcatcacccaactaaaaatattaaacacaaactaccacctacctccctcaccaaagcccataaaaataaaaaattataacaaaccctgagaaccaaaatgaacgaaaatctgttcgcttcattcattgcccccacaatcctaggcctacccgccgcagtactgatcattctatttccccctctattgatccccacctccaaatatctcatcaacaaccgactaatcaccacccaacaatgactaatcaaactaacctcaaaacaaatgataaccatacacaacactaaaggacgaacctgatctcttatactagtatccttaatcatttttattgccacaactaacctcctcggactcctgcctcactcatttacaccaaccacccaactatctataaacctagccatggccatccccttatgagcgggcgcagtgattataggctttcgctctaagattaaaaatgccctagcccacttcttaccacaaggcacacctacaccccttatccccatactagttattatcgaaaccatcagcctactcattcaaccaatagccctggccgtacgcctaaccgctaacattactgcaggccacctactcatgcacctaattggaagcgccaccctagcaatagcaaccattaaccttccctctacacttatcatcttcacaattctaattctactgactatcctagaaatcgctgtcgccttaatccaagcctacgttttcacacttctagtaagcctctacctgcacgacaacacataatgacccaccaatcacatgcctatcatatagtaaaacccagcccatgacccctaacaggggccctctcagccctcctaatgacctccggcctagccatgtgatttcacttccactccataacgctcctcatactaggcctactaaccaacacactaaccatataccaatgatggcgcgatgtaacacgagaaagcacataccaaggccaccacacaccacctgtccaaaaaggccttcgatacgggataatcctatttattacctcagaagtttttttcttcgcaggatttttctgagccttttaccactccagcctagcccctaccccccaattaggagggcactggcccccaacaggcatcaccccgctaaatcccctagaagtcccactcctaaacacatccgtattactcgcatcaggagtatcaatcacctgagctcaccatagtctaatagaaaacaaccgaaaccaaataattcaagcactgcttattacaattttactgggtctctattttaccctcctacaagcctcagagtacttcgagtctcccttcaccatttccgacggcatctacggctcaacattttttgtagccacaggcttccacggacttcacgtcattattggctcaactttcctcactatctgcttcatccgccaactaatatttcactttacatccaaacatcactttggcttcgaagccgccgcctgatactggcattttgtagatgtggtttgactatttctgtatgtctccatctattgatgagggtcttactcttttagtataaatagtaccgttaacttccaattaactagttttgacaacattcaaaaaagagtaataaacttcgccttaattttaataatcaacaccctcctagccttactactaataattattacattttgactaccacaactcaacggctacatagaaaaatccaccccttacgagtgcggcttcgaccctatatcccccgcccgcgtccctttctccataaaattcttcttagtagctattaccttcttattatttgatctagaaattgccctccttttacccctaccatgagccctacaaacaactaacctgccactaatagttatgtcatccctcttattaatcatcatcctagccctaagtctggcctatgagtgactacaaaaaggattagactgaaccgaattggtatatagtttaaacaaaacgaatgatttcgactcattaaattatgataatcatatttaccaaatgcccctcatttacataaatattatactagcatttaccatctcacttctaggaatactagtatatcgctcacacctcatatcctccctactatgcctagaaggaataatactatcgctgttcattatagctactctcataaccctcaacacccactccctcttagccaatattgtgcctattgccatactagtctttgccgcctgcgaagcagcggtgggcctagccctactagtctcaatctccaacacatatggcctagactacgtacataacctaaacctactccaatgctaaaactaatcgtcccaacaattatattactaccactgacatgactttccaaaaaacacataatttgaatcaacacaaccacccacagcctaattattagcatcatccctctactattttttaaccaaatcaacaacaacctacttagctgttccccaaccttttcctccgaccccctaacaacccccctcctaatactaactacctgactcctacccctcacaatcatggcaagccaacgccacttatccagtgaaccactatcacgaaaaaaactctacctctctatactaatctccctacaaatctccttaattataacattcacagccacagaactaatcatattttatatcttcttcgaaaccacacttatccccaccttggctatcatcacccgatgaggcaaccagccagaacgcctgaacgcaggcacatacttcctattctacaccctagtaggctcccttcccctactcatcgcactaatttacactcacaacaccctaggctcactaaacattctactactcactctcactgcccaagaactatcaaactcctgagctaacaacttaatatgactagcttacacaatagcttttatagtaaagatacctctttacggactccacttatgactccctaaagcccatgtcgaagcccccatcgctgggtcaatagtacttgccgcagtactcttgaaactaggcggctatggtataatacgcctcacactcattctcaaccccctgacaaaacacatagcctaccccttccttgtactatccctatgaggcataattataacaagctccatctgcctacgacaaacagacctaaaatcgctcattgcatactcttcaatcagccacatagccctcgtagtaacagccattctcatccaaaccccctgaagcttcaccggcgcagtcattctcataatcgcccacggacttacatcctcattactattctgcctagcaaactcaaactacgaacgcactcacagtcgcatcataatcctctctcaaggacttcaaactctactcccactaatagctttttgatgacttctagcaagcctcgctaacctcgccttaccccccactattaacctactgggagaactctctgtgctagtaaccacgttctcctgatcaaatatcactctcctacttacaggactcaacatactagtcacagccctatactccctctacatatttaccacaacacaatggggctcactcacccaccacattaacaacataaaaccctcattcacacgagaaaacaccctcatgttcatacacctatcccccattctcctcctatccctcaaccccgacatcattaccgggttttcctcttgtaaatatagtttaaccaaaacatcagattgtgaatctgacaacagaggcttacgaccccttatttaccgagaaagctcacaagaactgctaactcatgcccccatgtctaacaacatggctttctcaacttttaaaggataacagctatccattggtcttaggccccaagaattttggtgcaactccaaataaaagtaataaccatgcacactactataaccaccctaaccctaacttccctaattccccccatccttaccaccctcgttaaccctaacaaaaaaaactcatacccccattatgtaaaatccattgtcgcatccacctttattatcagtctcttccccacaacaatattcatgtgcctagaccaagaagttattatctcgaactgacactgagccacaacccaaacaacccagctctccctaagcttcaaactagactacttctccataatattcatccctgtagcattgttcgttacatggtccatcatagaattctcactgtgatatataaactcagacccaaacattaatcagttcttcaaatatctactcatcttcctaattaccatactaatcttagttaccgctaacaacctattccaactgttcatcggctgagagggcgtaggaattatatccttcttgctcatcagttgatgatacgcccgagcagatgccaacacagcagccattcaagcaatcctatacaaccgtatcggcgatatcggtttcatcctcgccttagcatgatttatcctacactccaactcatgagacccacaacaaatagcccttctaaacgctaatccaagcctcaccccactactaggcctcctcctagcagcagcaggcaaatcagcccaattaggtctccacccctgactcccctcagccatagaaggccccaccccagtctcagccctactccactcaagcactatagttgtagcaggaatcttcttactcatccgcttccaccccctagcagaaaatagcccactaatccaaactctaacactatgcttaggcgctatcaccactctgttcgcagcagtctgcgcccttacacaaaatgacatcaaaaaaatcgtagccttctccacttcaagtcaactaggactcataatagttacaatcggcatcaaccaaccacacctagcattcctgcacatctgtacccacgccttcttcaaagccatactatttatgtgctccgggtccatcatccacaaccttaacaatgaacaagatattcgaaaaataggaggactactcaaaaccatacctctcacttcaacctccctcaccattggcagcctagcattagcaggaatacctttcctcacaggtttctactccaaagaccacatcatcgaaaccgcaaacatatcatacacaaacgcctgagccctatctattactctcatcgctacctccctgacaagcgcctatagcactcgaataattcttctcaccctaacaggtcaacctcgcttccccacccttactaacattaacgaaaataaccccaccctactaaaccccattaaacgcctggcagccggaagcctattcgcaggatttctcattactaacaacatttcccccgcatcccccttccaaacaacaatccccctctacctaaaactcacagccctcgctgtcactttcctaggacttctaacagccctagacctcaactacctaaccaacaaacttaaaataaaatccccactatgcacattttatttctccaacatactcggattctaccctagcatcacacaccgcacaatcccctatctaggccttcttacgagccaaaacctgcccctactcctcctagacctaacctgactagaaaagctattacctaaaacaatttcacagcaccaaatctccacctccatcatcacctcaacccaaaaaggcataattaaactttacttcctctctttcttcttcccactcatcctaaccctactcctaatcacataacctattcccccgagcaatctcaattacaatatatacaccaacaaacaatgttcaaccagtaactactactaatcaacgcccataatcatacaaagcccccgcaccaataggatcctcccgaatcaaccctgacccctctccttcataaattattcagcttcctacactattaaagtttaccacaaccaccaccccatcatactctttcacccacagcaccaatcctacctccatcgctaaccccactaaaacactcaccaagacctcaacccctgacccccatgcctcaggatactcctcaatagccatcgctgtagtatatccaaagacaaccatcattccccctaaataaattaaaaaaactattaaacccatataacctcccccaaaattcagaataataacacacccgaccacaccgctaacaatcaatactaaacccccataaataggagaaggcttagaagaaaatcccacaaaccccattactaaacccacactcaacagaaacaaagcatacatcattattctcgcacggactacaaccacgaccaatgatatgaaaaaccatcgttgtatttcaactacaagaacaccaatgaccccaatacgcaaaattaaccccctaataaaattaattaaccactcattcatcgacctccccaccccatccaacatctccgcatgatgaaacttcggctcactccttggcgcctgtctgatcctccaaatcaccacaggactattcctagccatgcactactcaccagacgcctcaaccgccttttcatcaatcgcccacatcactcgagacgtaaattatggctgaatcatccgctaccttcacgccaatggcgcctcaatattctttatctgcctcttcctacacatcgggcgaggcctatattacggatcatttctctactcagaaacctgaaacatcggcattatcctcctgcttgcaactatagcaacagccttcataggctatgtcctcccgtgaggccaaatatcattctgaggggccacagtaattacaaacttactatccgccatcccatacattgggacagacctagttcaatgaatctgaggaggctactcagtagacagtcccaccctcacacgattctttacctttcacttcatcttgcccttcattattgcagccctagcagcactccacctcctattcttgcacgaaacgggatcaaacaaccccctaggaatcacctcccattccgataaaatcaccttccacccttactacacaatcaaagacgccctcggcttacttctcttccttctctccttaatgacattaacactattctcaccagacctcctaggcgacccagacaattataccctagccaaccccttaaacacccctccccacatcaagcccgaatgatatttcctattcgcctacacaattctccgatccgtccctaacaaactaggaggcgtccttgccctattactatccatcctcatcctagcaataatccccatcctccatatatccaaacaacaaagcataacatttcgcccactaagccaatcactttattgactcctagccgcagacctcctcattctaacctgaatcggaggacaaccagtaagctacccttttaccatcattggacaagtagcatccgtactatacttcacaacaatcctaatcctaataccaactatctccctaattgaaaacaaaatactcaaatgggcctgtccttgtagtataaactaatacaccagtcttgtaaaccggagatgaaaacctttttccaaggacaaatcagagaaaaagtctttaactccaccattagcacccaaagctaagattctaatttaaactattctctgttctttcatggggaagcagatttgggtaccacccaagtattgactcacccatcaacaaccgctatgtatttcgtacattactgccagccaccatgaatattgtacggtaccataaatacttgaccacctgtagtacataaaaacccaatccacattaaaaccccctccccatgcttacaagcaagtacagcaatcaaccctcaactatcacacatcaactgcaactccaaagccacccctcacccactaggataccaacaaacctacccacccttaacagtacatagtacataaagccatttaccgtacatagcacattacagtcaaatcccctctcgtccccatggatgacccccctcagataggggtcccttgaccaccatcctccgtgaaatcaatatcccgcacaagagtgctactctcctcgctccgggcccataacacttgggggtagctaaagtgaactgtatccgacatctggttcctacttcagggccataaagcctaaatagcccacacgttccccttaaataagacatcacgatg

SEQ ID NO: 361 - DNA, 16573 bp, Homo sapiens mitochondrial
  3111: "n" refers to a nucleotide at position 3107 of the Cambridge Reference Sequence (CRS, Anderson et al. 1981 Nature 290:457-465), later determined to be absent from the human mtDNA sequence according to the revised CRS (rCRS, Andrews et al. 1999 Nature Genetics 23:147); "n" therefore represents a single nucleotide deletion at a position corresponding to nucleotide 3107 of SEQ ID NO:1 as provided herein.
gatcacaggtctatcaccctattaaccactcacgggagctctccatgcatttggtattttcgtctggggggtgtgcacgcgatagcattgcgagacgctggagccggagcaccctatgtcgcagtatctgtctttgattcctgcctcatcccattatttatcgcacctacgttcaatattacaggcgaacatacttactaaagtgtgttaattaattaatgcttgtaggacataataataacaattgaatgtctgcacagccgctttccacacagacatcataacaaaaaatttccaccaaaccccccctcccccccgcttctggccacagcacttaaacacatctctgccaaaccccaaaaacaaagaaccctaacaccagcctaaccagatttcaaattttatcttttggcggtatgcacttttaacagtcaccccccaactaacacattattttcccctcccactcccatactactaatctcatcaatacaacccccgcccatcctacccagcacacacacaccacgctgctaaccccataccccgaaccaaccaaaccccaaagacaccccccacagtttatgtagcttacctcctcaaagcaatacactgaaaatgtttagacgggctcacatcaccccataaacaaataggtttggtcctagcctttctattagctcttagtaagattacacatgcaagcatccccgttccagtgagttcaccctctaaatcaccacgatcaaaagggacaagcatcaagcacgcagcaatgcagctcaaaacgcttagcctagccacacccccacgggaaacagcagtgattaacctttagcaataaacgaaagtttaactaagctatactaaccccagggttggtcaatttcgtgccagccaccgcggtcacacgattaacccaagtcaatagaagccggcgtaaagagtgttttagatcaccccctccccaataaagctaaaactcacctgagttgtaaaaaactccagttgacacaaaatagactacgaaagtggctttaacatatctgaacacacaatagctaagacccaaactgggattagataccccactatgcttagccctaaacctcaacagttaaatcaacaaaactgctcgccagaacactacgagccacagcttaaaactcaaaggacctggcggtgcttcatacccctctagaggagcctgttctgtaatcgataaaccccgatcaacctcaccacctcttgctcagcctatataccgccatcttcagcaaaccctgatgaaggctacaaagtaagcgcaagtacccacgtaaagacgttaggtcaaggtgtagcccatgaggtggcaagaaatgggctacattttctaccccagaaaactacgatagcccttatgaaacttaagggtcgaaggtggatttagcagtaaactgagagtagagtgcttagttgaacagggccctgaagcgcgtacacaccgcccgtcaccctcctcaagtatacttcaaaggacatttaactaaaacccctacgcatttatatagaggagacaagtcgtaacatggtaagtgtactggaaagtgcacttggacgaaccagagtgtagcttaacacaaagcacccaacttacacttaggagatttcaacttaacttgaccgctctgagctaaacctagccccaaacccactccaccttactaccagacaaccttagccaaaccatttacccaaataaagtataggcgatagaaattgaaacctggcgcaatagatatagtaccgcaagggaaagatgaaaaattatagccaagcataatatagcaaggactaacccctataccttctgcataatgaattaactagaaataactttgcaaggagagccaaagctaagacccccgaaaccagacgagctacctaagaacagctaaaagagcacacccgtctatgtagcaaaatagtgggaagatttataggtagaggcgacaaacctaccgagcctggtgatagctggttgtccaagatagaatcttagttcaactttaaatttgcccacagaaccctctaaatccccttgtaaatttaactgttagtccaaagaggaacagctctttggacactaggaaaaaaccttgtagagagagtaaaaaatttaacacccatagtaggcctaaaagcagccaccaattaagaaagcgttcaagctcaacacccactacctaaaaaatcccaaacatataactgaactcctcacacccaattggaccaatctatcaccctatagaagaactaatgttagtataagtaacatgaaaacattctcctccgcataagcctgcgtcagattaaaacactgaactgacaattaacagcccaatatctacaatcaaccaacaagtcattattaccctcactgtcaacccaacacaggcatgctcataaggaaaggttaaaaaaagtaaaaggaactcggcaaatcttaccccgcctgtttaccaaaaacatcacctctagcatcaccagtattagaggcaccgcctgcccagtgacacatgtttaacggccgcggtaccctaaccgtgcaaaggtagcataatcacttgttccttaaatagggacctgtatgaatggctccacgagggttcagctgtctcttacttttaaccagtgaaattgacctgcccgtgaagaggcgggcatgacacagcaagacgagaagaccctatggagctttaatttattaatgcaaacagtacctaacaaacccacaggtcctaaactaccaaacctgcattaaaaatttcggttggggcgacctcggagcagaacccaacctccgagcagtacatgctaagacttcaccagtcaaagcgaactactatactcaattgatccaataacttgaccaacggaacaagttaccctagggataacagcgcaatcctattctagagtccatatcaacaatagggtttacgacctcgatgttggatcaggacatcccgatggtgcagccgctattaaaggttcgtttgttcaacgattaaagtcctacgtgatctgagttcagaccggagtaatccaggtcggtttctatctacnttcaaattcctccctgtacgaaaggacaagagaaataaggcctacttcacaaagcgccttcccccgtaaatgatatcatctcaacttagtattatacccacacccacccaagaacagggtttgttaagatggcagagcccggtaatcgcataaaacttaaaactttacagtcagaggttcaattcctcttcttaacaacatacccatggccaacctcctactcctcattgtacccattctaatcgcaatggcattcctaatgcttaccgaacgaaaaattctaggctatatacaactacgcaaaggccccaacgttgtaggcccctacgggctactacaacccttcgctgacgccataaaactcttcaccaaggagcccctaaaacccgccacatctaccatcaccctctacatcaccgccccgaccttagctctcaccatcgctcttctactatgaacccccctccccatacccaaccccctggtcaacctcaacctaggcctcctatttattctagccacctctagcctagccgtttactcaatcctctgatcagggtgagcatcaaactcaaactacgccctgatcggcgcactgcgagcagtagcccaaacaatctcatatgaagtcaccctagccatcattctactatcaacattactaataagtggctcctttaacctctccacccttatcacaacacaagaacacctctgattactcctgccatcatgacccttggccataatatgatttatctccacactagcagagaccaaccgaacccccttcgaccttgccgaaggggagtccgaactagtctcaggcttcaacatcgaatacgccgcaggccccttcgccctattcttcatagccgaatacacaaacattattataataaacaccctcaccactacaatcttcctaggaacaacatatgacgcactctcccctgaactctacacaacatattttgtcaccaagaccctacttctaacctccctgttcttatgaattcgaacagcatacccccgattccgctacgaccaactcatacacctcctatgaaaaaacttcctaccactcaccctagcattacttatatgatatgtctccatacccattacaatctccagcattccccctcaaacctaagaaatatgtctgataaaagagttactttgatagagtaaataataggagcttaaacccccttatttctaggactatgagaatcgaacccatccctgagaatccaaaattctccgtgccacctatcacaccccatcctaaagtaaggtcagctaaataagctatcgggcccataccccgaaaatgttggttatacccttcccgtactaattaatcccctggcccaacccgtcatctactctaccatctttgcaggcacactcatcacagcgctaagctcgcactgattttttacctgagtaggcctagaaataaacatgctagcttttattccagttctaaccaaaaaaataaaccctcgttccacagaagctgccatcaagtatttcctcacgcaagcaaccgcatccataatccttctaatagctatcctcttcaacaatatactctccggacaatgaaccataaccaatactaccaatcaatactcatcattaataatcataatggctatagcaataaaactaggaatagccccctttcacttctgagtcccagaggttacccaaggcacccctctgacatccggcctgcttcttctcacatgacaaaaactagcccccatctcaatcatataccaaatctctccctcactaaacgtaagccttctcctcactctctcaatcttatccatcatagcaggcagttgaggtggattaaaccaaacccagctacgcaaaatcttagcatactcctcaattacccacataggatgaataatagcagttctaccgtacaaccctaacataaccattcttaatttaactatttatattatcctaactactaccgcattcctactactcaacttaaactccagcaccacgaccctactactatctcgcacctgaaacaagctaacatgactaacacccttaattccatccaccctcctctccctaggaggcctgcccccgctaaccggctttttgcccaaatgggccattatcgaagaattcacaaaaaacaatagcctcatcatccccaccatcatagccaccatcaccctccttaacctctacttctacctacgcctaatctactccacctcaatcacactactccccatatctaacaacgtaaaaataaaatgacagtttgaacatacaaaacccaccccattcctccccacactcatcgcccttaccacgctactcctacctatctccccttttatactaataatcttatagaaatttaggttaaatacagaccaagagccttcaaagccctcagtaagttgcaatacttaatttctgtaacagctaaggactgcaaaaccccactctgcatcaactgaacgcaaatcagccactttaattaagctaagcccttactagaccaatgggacttaaacccacaaacacttagttaacagctaagcaccctaatcaactggcttcaatctacttctcccgccgccgggaaaaaaggcgggagaagccccggcaggtttgaagctgcttcttcgaatttgcaattcaatatgaaaatcacctcggagctggtaaaaagaggcctaacccctgtctttagatttacagtccaatgcttcactcagccattttacctcacccccactgatgttcgccaaccgttgactattctctacaaaccacaaagacattggaacactatacctattattcggcgcatgagctggagtcctaggcacagctctaagcctccttattcgagccgagctgggccagccaggcaaccttctaggtaacgaccacatctacaacgttatcgtcacagcccatgcatttgtaataatcttcttcatagtaatacccatcataatcggaggctttggcaactgactagttcccctaataatcggtgcccccgatatggcgtttccccgcataaacaacataagcttctgactcttacctccctctctcctactcctgctcgcatctgctatagtggaggccggagcaggaacaggttgaacagtctaccctcccttagcagggaactactcccaccctggagcctccgtagacctaaccatcttctccttacacctagcaggtgtctcctctatcttaggggccatcaatttcatcacaacaattatcaatataaaaccccctgccataacccaataccaaacgcccctcttcgtctgatccgtcctaatcacagcagtcctacttctcctatctctcccagtcctagctgctggcatcactatactactaacagaccgcaacctcaacaccaccttcttcgaccccgccggaggaggagaccccattctataccaacacctattctgatttttcggtcaccctgaagtttatattcttatcctaccaggcttcggaataatctcccatattgtaacttactactccggaaaaaaagaaccatttgggtacataggtatggtctgagctatgatatcaattggcttcctagggtttatcgtgtgagcacaccatatatttacagtaggaatagacgtagacacacgagcatatttcacctccgctaccataatcatcgctatccccaccggcgtcaaagtatttagctgactcgccacactccacggaagcaatatgaaatgatctgctgcagtgctctgagccctaggattcatctttcttttcaccgtaggtggcctgactggcattgtattagcaaactcatcactagacatcgtactacacgacacgtactacgttgtagctcacttccactatgtcctatcaataggagctgtatttgccatcataggaggcttcattcactgatttcccctattctcaggctacaccctagaccaaacctacgccaaaatccatttcactatcatattcatcggcgtaaatctaactttcttcccacaacactttctcggcctatccggaatgccccgacgttactcggactaccccgatgcatacaccacatgaaacatcctatcatctgtaggctcattcatttctctaacagcagtaatattaataattttcatgatttgagaagccttcgcttcgaagcgaaaagtcctaatagtagaagaaccctccataaacctggagtgactatatggatgccccccaccctaccacacattcgaagaacccgtatacataaaatctagacaaaaaaggaaggaatcgaaccccccaaagctggtttcaagccaaccccatggcctccatgactttttcaaaaaggtattagaaaaaccatttcataactttgtcaaagttaaattataggctaaatcctatatatcttaatggcacatgcagcgcaagtaggtctacaagacgctacttcccctatcatagaagagcttatcacctttcatgatcacgccctcataatcattttccttatctgcttcctagtcctgtatgcccttttcctaacactcacaacaaaactaactaatactaacatctcagacgctcaggaaatagaaaccgtctgaactatcctgcccgccatcatcctagtcctcatcgccctcccatccctacgcatcctttacataacagacgaggtcaacgatccctcccttaccatcaaatcaattggccaccaatggtactgaacctacgagtacaccgactacggcggactaatcttcaactcctacatacttcccccattattcctagaaccaggcgacctgcgactccttgacgttgacaatcgagtagtactcccgattgaagcccccattcgtataataattacatcacaagacgtcttgcactcatgagctgtccccacattaggcttaaaaacagatgcaattcccggacgtctaaaccaaaccactttcaccgctacacgaccgggggtatactacggtcaatgctctgaaatctgtggagcaaaccacagtttcatgcccatcgtcctagaattaattcccctaaaaatctttgaaatagggcccgtatttaccctatagcaccccctctaccccctctagagcccactgtaaagctaacttagcattaaccttttaagttaaagattaagagaaccaacacctctttacagtgaaatgccccaactaaatactaccgtatggcccaccataattacccccatactccttacactattcctcatcacccaactaaaaatattaaacacaaactaccacctacctccctcaccaaagcccataaaaataaaaaattataacaaaccctgagaaccaaaatgaacgaaaatctgttcgcttcattcattgcccccacaatcctaggcctacccgccgcagtactgatcattctatttccccctctattgatccccacctccaaatatctcatcaacaaccgactaatcaccacccaacaatgactaatcaaactaacctcaaaacaaatgataaccatacacaacactaaaggacgaacctgatctcttatactagtatccttaatcatttttattgccacaactaacctcctcggactcctgcctcactcatttacaccaaccacccaactatctataaacctagccatggccatccccttatgagcgggcgcagtgattataggctttcgctctaagattaaaaatgccctagcccacttcttaccacaaggcacacctacaccccttatccccatactagttattatcgaaaccatcagcctactcattcaaccaatagccctggccgtacgcctaaccgctaacattactgcaggccacctactcatgcacctaattggaagcaccaccctagcaatatcaaccattaaccttccctctacacttatcatcttcacaattctaattctactgactatcctagaaatcgctgtcgccttaatccaagcctacgttttcacacttctagtaagcctctacctgcacgacaacacataatgacccaccaatcacatgcctatcatatagtaaaacccagcccatgacccctaacaggggccctctcagccctcctaatgacctccggcctagccatgtgatttcacttccactccataacgctcctcatactaggcctactaaccaacacactaaccatataccaatgatggcgcgatgtaacacgagaaagcacataccaaggccaccacacaccacctgtccaaaaaggccttcgatacgggataatcctatttattacctcagaagtttttttcttcgcaggatttttctgagccttttaccactccagcctagcccctaccccccaattaggagggcactggcccccaacaggcatcaccccgctaaatcccctagaagtcccactcctaaacacatccgtattactcgcatcaggagtatcaatcacctgagctcaccatagtctaatagaaaacaaccgaaaccaaataattcaagcactgctcattacaattttactgggtctctattttaccctcctacaagcctcagagtacttcgagtctcccttcaccatttccgacggcatctacggctcaacattttttgtagccacaggcatccacggacttcacgtcattattggctcaactttcctcactatctgcttcatccgccaactaatatttcactttacatccaaacatcactttggcttcgaagccgccgcctgatactggcattttgtagatgtggtttgactatttctatatgtctccatctattgatgagggtcttactcttttagtataaatagtaccgttaacttccaattaactagttttgacaacattcaaaaaagagtaataaacttcgccttaattttaataaccaacaccctcctagccttactactaataattattacattttgactaccacaactcaacggctacatagaaaaatccaccccttacgagtgcggcttcgaccctatatcccccgcccgcgtccctttctccataaaattcttcttagtagctattaccttcttattatttgatctagaaattgccctccttttacccctaccatgggccctacaaacaactaacctgccactaatagttatgtcatccctcttattaatcatcatcctagccctaagtctggcctatgagtgactacaaaaaggattagactgagccgaattggtatatagtttaaacaaaacgaatgatttcgactcattaaattatgataatcatatttaccaaatgcccctcatttacataaatattatactagcatttaccatctcacttctaggaatactagtatatcgctcacacctcatgtcctccctactatgcctagaaggaataatactatcgctgttcattatagctactctcataaccctcaacacccactccctcttagccaatattgtgcctattgccatactagtctttgccgcctgcgaagcagcggtgggcctagccctactagtctcaatctccaacacatatggcctagactacgtacataacctaaacctactccaatgctaaaactaatcgtcccaacaattatattactaccactgacatgactttccaaaaaacacataatttgaatcaacacaaccacccacagcctaattattagcatcatccctctactattttttaaccaaatcaacaacaacctatttagctgttccccaaccttttcctccgaccccctaacaacccccctcctaatactaactacctgactcctacccctcacaatcatggcaagccaacgccacttatccagtgaaccactatcacgaaaaaaactctacctctctatactaatctccctacaaatctccttaattataacattcacagccacagaactaatcatattttatatcttcttcgaaaccacacttatccccaccttggctatcatcacccgatgaggcaaccagccagaacgcctgaacgcaggcacatacttcctattctacaccctagtaggctcccttcccctactcatcgcactaatttacactcacaacaccctaggctcactaaacattctactactcaccctcactgcccaagaactatcaaactcctgagccaacaacttaatatgactagcttacacaatagcttttatagtaaagatacctctttacggactccacttatgactccctaaagcccatgtcgaagcccccatcgctgggtcaatagtacttgccgcagtactcttgaaactaggcggctatggtataatacgcctcacactcattctcaaccccctgacaaaacacatagcctaccccttccttgtactatccctatgaggcataattataacaagctccatctgcctacgacaaacagacctaaaatcgctcattgcatactcttcaatcagccacatagccctcgtagtaacagccattctcatccaaaccccctgaagcttcaccggcgcagtcattctcataatcgcccacggacttacatcctcattactattctgcctagcaaactcaaactacgaacgcactcacagtcgcatcataatcctctctcaaggacttcaaactctactcccactaatagctttttgatgacttctagcaagcctcgctaacctcgccttaccccccactattaacctactgggagaactctctgtgctagtaaccacgttctcctggtcaaatatcactctcctacttacaggactcaacatactagtcacagccctatactccctctacatatttaccacaacacaatggggctcactcacccaccacattaacaacataaaaccctcattcacacgagaaaacaccctcatgttcatacacctatcccccattctcctcctatccctcaaccccgacatcattaccgggttttcctcttgtaaatatagtttaaccaaaacatcagattgtgaatctgacaacagaggcttacgaccccttatttaccgagaaagctcacaagaactgctaactcatgcccccatgtctaacaacatggctttctcaacttttaaaggataacagctatccattggtcttaggccccaagaattttggtgcaactccaaataaaagtaataaccatgcacactactataaccaccctaaccctaacttccctaattccccccatccttaccaccctcgttaaccctaacaaaaaaaactcatacccccattatgtaaaatccattgtcgcatccacctttattatcagtctcttccccacaacaatattcatgtgcctagaccaagaagttattatctcgaactgacactgagccacaacccaaacaacccagctctccctaagcttcaaactagactacttctccataatattcatccctgtagcattgttcgttacatggtccatcatagaattctcactgtgatatataaactcagacccaaacattaatcagttcttcaaatatctactcatcttcctaattaccatactgatcttagttaccgctaacaacctattccaactgttcatcggctgagagggcgtaggaattatatccttcttgctcatcagttgatgatacgcccgagcagatgccaacacagcagccattcaagcaatcctatacaaccgtatcggcgatatcggtttcatcctcgccttagcatgatttatcctacactccaactcatgagacccacaacaaatagcccttctaaacgctaatccaagcctcaccccactactaggcctcctcctagcagcagcaggcaaatcagcccaattaggtctccacccctgactcccctcagccatagaaggccccaccccagtctcagccctactccactcaagcactatagttgtagcaggaatcttcttactcatccgcttccaccccctagcagaaaatagcccactaatccaaactctaacactatgcttaggcgctatcaccactctgttcgcagcagtctgcgcccttacacaaaatgacatcaaaaaaatcgtagccttctccacttcaagtcaactaggactcataatagttacaatcggcatcaaccaaccacacctagcattcctgcacatctgtacccacgccttcttcaaagccatactatttatgtgctccgggtccatcatccacaaccttaacaatgaacaagatattcgaaaaataggaggactactcaaaaccatacctctcacttcaacctccctcaccattggcagcctagcattagcaggaatacctttcctcacaggtttctactccaaagaccacatcatcgaaaccgcaaacatatcatacacaaacgcctgagccctatctattactctcatcgctacctccctgacaagcgcctatagcactcgaataattcttctcaccctaacaggtcaacctcgcttccccacccttactaacattaacgaaaataaccccaccctactaaaccccattaaacgcctggcagccggaagcctattcgcaggatttctcattactaacaacatttcccccgcatcccccttccaaacaacaatccccctctacctaaaactcacagccctcgctgtcactttcctaggacttctaacagccctagacctcaactacctaaccaacaaacttaaaataaaatccccactatgcacattttatttctccaacatactcggattctaccctagcatcacacaccgcacaatcccctatctaggccttcttatgagccaaaacctgcccctactcctcctagacctaacctgactagaaaagctattacctaaaacaatttcacagcaccaaatctccacctccatcatcacctcaacccaaaaaggcataattaaactttacttcctctctttcttcttcccactcatcctaaccctactcctaatcacataacctattcccccgagcaatttcaattacaatatatacaccaacaaacaatgttcaaccagtaactactactaatcaacgcccataatcatacaaagcccccgcaccaataggatcctcccgaatcaaccctgacccctctccttcataaattattcagcttcctacactattaaagtttaccacaaccaccaccccatcatactctttcacccacagcaccaatcctacctccatcgctaaccccactaaaacactcaccaagacctcaacccctgacccccatgcctcaggatactcctcaatagccatcgctgtagtatatccaaagacaaccatcattccccctaaataaattaaaaaaactattaaacccatataacctcccccaaaattcagaataataacacacccgaccacaccgctaacaatcaatactaaacccccataaataggagaaggcttagaagaaaaccccacaaaccccattactaaacccacactcaacagaaacaaagcatacatcattattctcgcacggactacaaccacgaccaatgatatgaaaaaccatcgttgtatttcaactacaagaacaccaatgaccccaatacgcaaaattaaccccctaataaaattaattaaccactcactcatcgacctccccaccccatccaacatctccgcatgatgaaacttcggctcactccttggcgcctgcctgatcctccaaatcaccacaggactattcctagccatgcactactcaccagacgcctcaaccgccttttcatcaatcgcccacatcactcgagacgtaaattatggctgaatcatccgctaccttcacgccaatggcgcctcaatattctttatctgcctcttcctacacatcgggcgaggcctatattacggatcatttctctactcagaaacctgaaacatcggcattatcctcctgcttgcaactatagcaacagccttcataggctatgtcctcccgtgaggccaaatatcattctgaggggccacagtaattacaaacttactatccgccatcccatacattgggacagacctagttcaatgaatctgaggaggctactcagtaaacagtcccaccctcacacgattctttacctttcacttcatcttgcccttcattattgcagccctagcagcactccacctcctattcttgcacgaaacgggatcaaacaaccccctaggaatcacctcccattccgataaaatcaccttccacccttactacacaatcaaagacgccctcggcttacttctcttccttctctccttaatgacattaacactattctcaccagacctcctaggcgacccagacaattataccctagccaaccccttaaacacccctccccacatcaagcccgaatgatatttcctattcgcctacacaattctccgatccgtccctaacaaactaggaggcgtccttgccctattactatccatcctcatcctagcaataatccccatcctccatatatccaaacaacaaagcataatatttcgcccactaagccaatcactttattgactcctagccgcagacctcctcattctaacctgaatcggaggacaaccagtaagctacccttttaccatcattggacaagtagcatccgtactatacttcacaacaatcctaatcctaataccaactatctccctaattgaaaacaaaatactcaaatgggcctgtccttgtagtataaactaatacaccagtcttgtaaaccggagatgaaaacctttttctaaggacaaatcagagaaaaagtctttaactccaccattagcacccaaagctaagattctaatttaaactattctctgttctttcatggggaagcagatttgggtaccacccaagtattgactcacccatcaacaaccgctatgtatctcgtacattactgccagccaccatgaatattgtacggtaccataaatacttgaccacctgtagtacataaaaacccaatccacatcaaaaccccctccccatgcttacaagcaagtacagcaatcaacccccaactatcacacatcaactgcaactccaaagccacccctcacccactaggataccaacaaacctacccacccttaacagtacatagcacataaaaccatttaccgtacatagcacattacagtcaaatcccttctcgtccccatggatgacccccctcagataggggtcccttgaccaccatcctccgtgaaatcaatatcccgcacaagagtgctactctcctcgctccgggcccatgacacttgggggtagctaaagtgaactgtatccgacatctggttcctacttcagggccataaagcctaaatagcccacacgttccccttaaataagacatcacgatg

SEQ ID NO: 362 - DNA, 16571 bp, Homo sapiens mitochondrial
  3109: "n" refers to a nucleotide at position 3107 of the Cambridge Reference Sequence (CRS, Anderson et al. 1981 Nature 290:457-465), later determined to be absent from the human mtDNA sequence according to the revised CRS (rCRS, Andrews et al. 1999 Nature Genetics 23:147); "n" therefore represents a single nucleotide deletion at a position corresponding to nucleotide 3107 of SEQ ID NO:1 as provided herein.
gatcacaggtctatcaccctattaaccactcacgggagctctccatgcatttggtattttcgtctggggggtatgcacgcgatagcattgcgagacgctggagccggagcaccctatgtcgcagtatctgtctttgattcctgcctcatcctattatttatcgcacctacgttcaatattacaggcgaacatacttactaaagtgtgttaattaattaatgcttgtaggacataataataacaattgaatgtctgcacagccgctttccacacagacatcataacaaaaaatttccaccaaaccccccctcccccccgcttctggccacagcacttaaacacatctctgccaaaccccaaaaacaaagaaccctaacaccagcctaaccagatttcaaattttatcttttggcggtatgcacttttaacagtcaccccccaactaacacattattttcccctcccactcccatactactaatctcatcaatacaacccccgcccatcctacccagcacacacacaccgctgctaaccccataccccgaaccaaccaaaccccaaagacaccccccacagtttatgtagcttacctcctcaaagcaatacactgaaaatgtttagacgggctcacatcaccccataaacaaataggtttggtcctagcctttctattagctcttagtaagattacacatgcaagcatccccgttccagtgagttcaccctctaaatcaccacgatcaaaagggacaagcatcaagcacgcagcaatgcagctcaaaacgcttagcctagccacacccccacgggaaacagcagtgattaacctttagcaataaacgaaagtttaactaagctatactaaccccagggttggtcaatttcgtgccagccaccgcggtcacacgattaacccaagtcaatagaagccggcgtaaagagtgttttagatcaccccctccccaataaagctaaaactcacctgagttgtaaaaaactccagttgacacaaaatagactacgaaagtggctttaacatatctgaacacacaatagctaagacccaaactgggattagataccccactatgcttagccctaaacctcaacagttaaatcaacaaaactgctcgccagaacactacgagccacagcttaaaactcaaaggacctggcggtgcttcatatccctctagaggagcctgttctgtaatcgataaaccccgatcaacctcaccacctcttgctcagcctatataccgccatcttcagcaaaccctgatgaaggctacaaagtaagcgcaagtacccacgtaaagacgttaggtcaaggtgtagcccatgaggtggcaagaaatgggctacattttctaccccagaaaactacgatagcccttatgaaacttaagggtcgaaggtggatttagcagtaaactgagagtagagtgcttagttgaacagggccctgaagcgcgtacacaccgcccgtcaccctcctcaagtatacttcaaaggacatttaactaaaacccctacgcatttatatagaggagacaagtcgtaacatggtaagtgtactggaaagtgcacttggacgaaccagagtgtagcttaacacaaagcacccaacttacacttaggagatttcaacttaacttgaccgctctgagctaaacctagccccaaacccactccaccttactaccagacaaccttagccaaaccatttacccaaataaagtataggcgatagaaattgaaacctggcgcaatagatatagtaccgcaagggaaagatgaaaaattataaccaagcataatatagcaaggactaacccctataccttctgcataatgaattaactagaaataactttgcaaggagagccaaagctaagacccccgaaaccagacgagctacctaagaacagctaaaagagcacacccgtctatgtagcaaaatagtgggaagatttataggtagaggcgacaaacctaccgagcctggtgatagctggttgtccaagatagaatcttagttcaactttaaatttgcccacagaaccctctaaatccccttgtaaatttaactgttagtccaaagaggaacagctctttggacactaggaaaaaaccttgtagagagagtaaaaaatttaacacccatagtaggcctaaaagcagccaccaattaagaaagcgttcaagctcaacacccactacctaaaaaatcccaaacatataactgaactcctcacacccaattggaccaatctatcaccctatagaagaactaatgttagtataagtaacatgaaaacattctcctccgcataagcctgcgtcagattaaaacactgaactgacaattaacagcccaatatctacaatcaaccaacaagtcattattaccctcactgtcaacccaacacaggcatgctcataaggaaaggttaaaaaaagtaaaaggaactcggcaaatcttaccccgcctgtttaccaaaaacatcacctctagcatcaccagtattagaggcaccgcctgcccagtgacacatgtttaacggccgcggtaccctaaccgtgcaaaggtagcataatcacttgttccttaaatagggacctgtatgaatggctccacgagggttcagctgtctcttacttttaaccagtgaaattgacctgcccgtgaagaggcgggcataacacagcaagacgagaagaccctatggagctttaatttattaatgcaaacagtacctaacaaacccacaggtcctaaactaccaaacctgcattaaaaatttcggttggggcgacctcggagcagaacccaacctccgagcagtacatgctaagacttcaccagtcaaagcgaactactatactcaattgatccaataacttgaccaacggaacaagttaccctagggataacagcgcaatcctattctagagtccatatcaacaatagggtttacgacctcgatgttggatcaggacatcccgatggtgcagccgctattaaaggttcgtttgttcaacgattaaagtcctacgtgatctgagttcagaccggagtaatccaggtcggtttctatctacnttcaaattcctccctgtacgaaaggacaagagaaataaggcctacttcacaaagcgccttcccccgtaaatgatatcatctcaacttagtattatacccacacccacccaagaacagggtttgttaagatggcagagcccggtaatcgcataaaacttaaaactttacagtcagaggttcaattcctcttcttaacaacatacccatggccaacctcctactcctcattgtacccattctaatcgcaatggcattcctaatgcttaccgaacgaaaaattctaggctatatacaactacgcaaaggccccaacgttgtaggcccctacgggctactacaacccttcgctgacgccataaaactcttcaccaaagagcccctaaaacccgccacatctaccatcaccctctacatcaccgccccgaccttagctctcaccatcgctcttctactatgaacccccctccccatacccaaccccctggtcaacctcaacctaggcctcctatttattctagccacctctagcctagccgtttactcaatcctctgatcagggtgagcatcaaactcaaactacgccctgatcggcgcactgcgagcagtagcccaaacaatctcatatgaagtcaccctagccatcattctactatcaacattactaataagtggctcctttaacctctccacccttatcacaacacaagaacacctctgattactcctgccatcatgacccttggccataatatgatttatctccacactagcagagaccaaccgaacccccttcgaccttgccgaaggggagtccgaactagtctcaggcttcaacatcgaatacgccgcaggccccttcgccctattcttcatagccgaatacacaaacattattataataaacaccctcaccactacaatcttcctaggaacaacatatgacgcactctcccctgaactctacacaacatattttgtcaccaagaccctacttctaacctccctgttcttatgaattcgaacagcatacccccgattccgctacgaccaactcatacacctcctatgaaaaaacttcctaccactcaccctagcattacttatatgacatgtctccatacccattacaatctccagcattccccctcaaacctaagaaatatgtctgataaaagagttactttgatagagtaaataataggagcttaaacccccttatttctaggactatgagaatcgaacccatccctgagaatccaaaattctccgtgccacctatcacaccccatcctaaagtaaggtcagctaaataagctatcgggcccataccccgaaaatgttggttatacccttcccgtactaattaatcccctggcccaacccgtcatctactctaccatctttgcaggcacactcatcacagcgctaagctcgcactgattttttacctgagtaggcctagaaataaacatgctagcttttattccagttctaaccaaaaaaataaaccctcgttccacagaagctgccatcaagtatttcctcacgcaagcaaccgcatccataatccttctaatagctatcctcttcaacaatatactctccggacaatgaaccataaccaatactaccaatcaatactcatcattaataatcataatggctatagcaataaaactaggaatagccccctttcacttctgagtcccagaggttacccaaggcacccctctgacatccggcctgcttcttctcacatgacaaaaactagcccccatctcaatcatataccaaatctctccctcactaaacgtaagccttctcctcactctctcaatcttatccatcatagcaggcagttgaggtggattaaaccaaacccagctacgcaaaatcttagcatactcctcaattacccacataggatgaataatagcagttctaccgtacaaccctaacataaccattcttaatttaactatttatattatcctaactactaccgcattcctactactcaacttaaactccagcaccacgaccctactactatctcgcacctgaaacaagctaacatgactaacacccttaattccatccaccctcctctccctaggaggcctgcccccgctaaccggctttttgcccaaatgggccattatcgaagaattcacaaaaaacaatagcctcatcatccccaccatcatagccaccatcaccctccttaacctctacttctacctacgcctaatctactccacctcaatcacactactccccatatctaacaacgtaaaaataaaatgacagtttgaacatacaaaacccaccccattcctccccacactcatcgcccttaccacgctactcctacctatctccccttttatactaataatcttatagaaatttaggttaaatacagaccaagagccttcaaagccctcagtaagttgcaatacttaatttctgtaacagctaaggactgcaaaaccccactctgcatcaactgaacgcaaatcagccactttaattaagctaagcccttactagaccaatgggacttaaacccacaaacacttagttaacagctaagcaccctaatcaactggcttcaatctacttctcccgccgccgggaaaaaaggcgggagaagccccggcaggtttgaagctgcttcttcgaatttgcaattcaatatgaaaatcacctcggagctggtaaaaagaggcctaacccctgtctttagatttacagtccaatgcttcactcagccattttacctcacccccactgatgttcgccgaccgttgactattctctacaaaccacaaagacattggaacactatacctattattcggcgcatgagctggagtcctaggcacagctctaagcctccttattcgagccgagctgggccagccaggcaaccttctaggtaacgaccacatctacaacgttatcgtcacagcccatgcatttgtaataatcttcttcatagtaatacccatcataatcggaggctttggcaactgactagttcccctaataatcggtgcccccgatatggcgtttccccgcataaacaacataagcttctgactcttacctccctctctcctactcctgctcgcatctgctatagtggaggccggagcaggaacaggttgaacagtctaccctcccttagcagggaactactcccaccctggagcctccgtagacctaatcatcttctccttacacctagcaggtgtctcctctatcttaggggccatcaatttcatcacaacaattatcaatataaaaccccctgccataacccaataccaaacgcccctcttcgtctgatccgtcctaatcacagcagtcctacttctcctatctctcccagtcctagctgctggcatcactatactactaacagaccgcaacctcaacaccaccttcttcgaccccgccggaggaggagaccccattctataccaacacctattctgatttttcggtcaccctgaagtttatattcttatcctaccaggcttcggaataatctcccatattgtaacttactactccggaaaaaaagaaccatttggatacataggtatggtctgagctatgatatcaattggcttcctagggtttatcgtgtgagcacaccatatatttacagtaggaatagacgtagacacacgagcatatttcacctccgctaccataatcatcgctatccccaccggcgtcaaagtatttagctgactcgccacactccacggaagcaatatgaaatgatctgctgcagtgctctgagccctaggattcatctttcttttcaccgtaggtggcctgactggcattgtattagcaaactcatcactagacatcgtactacacgacacgtactacgttgtagcccacttccactatgtcctatcaataggagctgtatttgccatcataggaggcttcattcactgatttcccctattctcaggctacaccctagaccaaacctacgccaaaatccatttcactatcatattcatcggcgtaaatctaactttcttcccacaacactttctcggcctatccggaatgccccgacgttactcggactaccccgatgcatacaccacatgaaacatcctatcatctgtaggctcattcatttctctaacagcagtaatattaataattttcatgatttgagaagccttcgcttcgaagcgaaaagtcctaatagtagaagaaccctccataaacctggagtgactatatggatgccccccaccctaccacacattcgaagaacccgtatacataaaatctagacaaaaaaggaaggaatcgaaccccccaaagctggtttcaagccaaccccatggcctccatgactttttcaaaaaggtattagaaaaaccatttcataactttgtcaaagttaaattataggctaaatcctatatatcttaatggcacatgcagcgcaagtaggtctacaagacgctacttcccctatcatagaagagcttatcacctttcatgatcacgccctcataatcattttccttatctgcttcctagtcctgtatgcccttttcctaacactcacaacaaaactaactaatactaacatctcagacgctcaggaaatagaaaccgtctgaactatcctgcccgccatcatcctagtcctcatcgccctcccatccctacgcatcctttacataacagacgaggtcaacgatccctcccttaccatcaaatcaattggccaccaatggtactgaacctacgagtacaccgactacggcggactaatcttcaactcctacatacttcccccattattcctagaaccaggcgacctgcgactccttgacgttgacaatcgagtagtactcccgattgaagcccccattcgtataataattacatcacaagacgtcttgcactcatgagctgtccccacattaggcttaaaaacagatgcaattcccggacgtctaaaccaaaccactttcaccgctacacgaccgggggtatactacggtcaatgctctgaaatctgtggagcaaaccacagtttcatgcccatcgtcctagaattaattcccctaaaaatctttgaaatagggcccgtatttaccctatagcaccccctctaccccctctagagcccactgtaaagctaacttagcattaaccttttaagttaaagattaagagaaccaacacctctttacagtgaaatgccccaactaaatactaccgtatggcccaccataattacccccatactccttacactattcctcatcacccaactaaaaatattaaacacaaactaccacctacctccctcaccaaagcccataaaaataaaaaattataacaaaccctgagaaccaaaatgaacgaaaatctgttcgcttcattcattgcccccacaatcctaggcctacccgccgcagtactgatcattctatttccccctctattgatccccacctccaaatatctcatcaacaaccgactaatcaccacccaacaatgactaatcaaactaacctcaaaacaaatgataaccatacacaacactaaaggacgaacctgatctcttatactagtatccttaatcatttttattgccacaactaacctcctcggactcctgcctcactcatttacaccaaccacccaactatctataaacctagccatggccatccccttatgagcgggcgcagtgattataggctttcgctctaagattaaaaatgccctagcccacttcttaccacaaggcacacctacaccccttatccccatactagttattatcgaaaccatcagcctactcattcaaccaatagccctggccgtacgcctaaccgctaacattactgcaggccacctactcatgcacctaattggaagcgccaccctagcaatatcaaccattaaccttccctctacacttatcatcttcacaattctaattctactgactatcctagaaatcgctgtcgccttaatccaagcctacgttttcacacttctagtaagcctctacctgcacgacaacacataatgacccaccaatcacatgcctatcatatagtaaaacccagcccatgacccctaacaggggccctctcagccctcctaatgacctccggcctagccatgtgatttcacttccactccataacgctcctcatactaggcctactaaccaacacactaaccatataccaatgatggcgcgatgtaacacgagaaagcacataccaaggccaccacacaccacctgtccaaaaaggccttcgatacgggataatcctatttattacctcagaagtttttttcttcgcaggatttttctgagccttttaccactccagcctagcccctaccccccaattaggagggcactggcccccaacaggcatcaccccgctaaatcccctagaagtcccactcctaaacacatccgtattactcgcatcaggagtatcaatcacctgagctcaccatagtctaatagaaaacaaccgaaaccaaataattcaagcactgcttattacaattttactgggtctctattttaccctcctacaagcctcagagtacttcgagtctcccttcaccatttccgacggcatctacggctcaacattttttgtagccacaggcttccacggacttcacgtcattattggctcaactttcctcactatctgcttcatccgccaactaatatttcactttacatccaaacatcactttggcttcgaagccgccgcctgatactggcattttgtagatgtggtttgactatttctgtatgtctccatctattgatgagggtcttactcttttagtataaatagtaccgttaacttccaattaactagttttgacaacattcaaaaaagagtaataaacttcgccttaattttaataatcaacaccctcctagccttactactaataattattacattttgactaccacaactcaacggctacatagaaaaatccaccccttacgagtgcggcttcgaccctatatcccccgcccgcgtccctttctccataaaattcttcttagtagctattaccttcttattatttgatctagaaattgccctccttttacccctaccatgagccctacaaacaactaacctgccactaatagttatgtcatccctcttattaatcatcatcctagccctaagtctggcctatgagtgactacaaaaaggattagactgaaccgaattggtatatagtttaaacaaaacgaatgatttcgactcattaaattatgataatcatatttaccaaatgcccctcatttacataaatattatactagcatttaccatctcacttctaggaatactagtatatcgctcacacctcatatcctccctactatgcctagaaggaataatactatcgctgttcattatagctactctcataaccctcaacacccactccctcttagccaatattgtgcctattgccatactagtctttgccgcctgcgaagcagcggtgggcctagccctactagtctcaatctccaacacatatggcctagactacgtacataacctaaacctactccaatgctaaaactaatcgtcccaacaattatattactaccactgacatgactttccaaaaaacacataatttgaatcaacacaaccacccacagcctaattattagcatcatccctctactattttttaaccaaatcaacaacaacctatttagctgctccccaaccttttcctccgaccccctaacaacccccctcctaatactaactacctgactcctacccctcacaatcatggcaagccaacgccacttatccagtgaaccactatcacgaaaaaaactctacctctctatactaatctccctacaaatctccttaattataacattcacagccacagaactaatcatattttatatcttcttcgaaaccacacttatccccaccttggctatcatcacccgatgaggcaaccagccagaacgcctgaacgcaggcacatacttcctattctacaccctagtaggctcccttcccctactcatcgcactaatttacactcacaacaccctaggctcactaaacattctactactcactctcactgcccaagaactatcaaactcctgagccaacaacttaatatgactagcttacacaatagcttttatagtaaagatacctctttacggactccacttatgactccctaaagcccatgtcgaagcccccatcgctgggtcaatagtacttgccgcagtactcttaaaactaggcggctatggtataatacgcctcacactcattctcaaccccctgacaaaacacatagcctaccccttccttgtactatccctatgaggcataattataacaagctccatctgcctacgacaaacagacctaaaatcgctcattgcatactcttcaatcagccacatagccctcgtagtaacagccattctcatccaaaccccctgaagcttcaccggcgcagtcattctcataatcgcccacgggcttacatcctcattactattctgcctagcaaactcaaactacgaacgcactcacagtcgcatcataatcctctctcaaggacttcaaactctactcccactaatagctttttgatgacttctagcaagcctcgctaacctcgccttaccccccactattaacctactgggagaactctctgtgctagtaaccacgttctcctgatcaaatatcactctcctacttacaggactcaacatactagtcacagccctatactccctctacatatttaccacaacacaatggggctcactcacccaccacattaacaacataaaaccctcattcacacgagaaaacaccctcatgttcatacacctatcccccattctcctcctatccctcaaccccgacatcattaccgggttttcctcttgtaaatatagtttaaccaaaacatcagattgtgaatctgacaacagaggcttacgaccccttatttaccgagaaagctcacaagaactgctaactcatgcccccatgtctaacaacatggctttctcaacttttaaaggataacagctatccattggtcttaggccccaaaaattttggtgcaactccaaataaaagtaataaccatgcacactactataaccaccctaaccctgacttccctaattccccccatccttaccaccctcgttaaccctaacaaaaaaaactcatacccccattatgtaaaatccattgtcgcatccacctttattatcagtctcttccccacaacaatattcatgtgcctagaccaagaagttattatctcgaactgacactgagccacaacccaaacaacccagctctccctaagcttcaaactagactacttctccataatattcatccctgtagcattgttcgttacatggtccatcatagaattctcactgtgatatataaactcagacccaaacattaatcagttcttcaaatatctactcatcttcctaattaccatactaatcttagttaccgctaacaacctattccaactgttcatcggctgagagggcgtaggaattatatccttcttgctcatcagttgatgatacgcccgagcagatgccaacacagcagccattcaagcaatcctatacaaccgtatcggcgatatcggtttcatcctcgccttagcatgatttatcctacactccaactcatgagacccacaacaaatagcccttctaaacgctaatccaagcctcaccccactactaggcctcctcctagcagcagcaggcaaatcagcccaattaggtctccacccctgactcccctcagccatagaaggccccaccccagtctcagccctactccactcaagcactatagttgtagcaggaatcttcttactcatccgcttccaccccctagcagaaaatagcccactaatccaaactctaacactatgcttaggcgctatcaccactctgttcgcagcagtctgcgcccttacacaaaatgacatcaaaaaaatcgtagccttctccacttcaagtcaactaggactcataatagttacaatcggcatcaaccaaccacacctagcattcctgcacatctgtacccacgccttcttcaaagccatactatttatgtgctccgggtccatcatccacaaccttaacaatgaacaagatattcgaaaaataggaggactactcaaaaccatacctctcacttcaacctccctcaccattggcagcctagcattagcaggaatacctttcctcacaggtttctactccaaagaccacatcatcgaaaccgcaaacatatcatacacaaacgcctgagccctatctattactctcatcgctacctccctgacaagcgcctatagcactcgaataattcttctcaccctaacaggtcaacctcgcttccccacccttactaacattaacgaaaataaccccaccctactaaaccccattaaacgcctggcaaccggaagcctattcgcaggatttctcattactaacaacatttcccccgcatcccccttccaaacaacaatccccctctacctaaaactcacagccctcgctgtcactttcctaggacttctaacagccctagacctcaactacctaaccaacaaacttaaaataaaatccccactatgcacattttatttctccaacatactcggattctaccctagcatcacacaccgcacaatcccctatctaggccttcttacgagccaaaacctgcccctactcctcctagacctaacctgactagaaaagctattacctaaaacaatttcacagcaccaaatctccacctccatcatcacctcaacccaaaaaggcataattaaactttacttcctctctttcttcttcccactcatcctaaccctactcctaatcacataacctattcccccgagcaatctcaattacaatatatacaccaacaaacaatgttcaaccagtaactactactaatcaacgcccataatcatacaaagcccccgcaccaataggatcctcccgaatcaaccctgacccctctccttcataaattattcagcttcctacactattaaagtttaccacaaccaccaccccatcatactctttcacccacagcaccaatcctacctccatcgctaaccccactaaaacactcaccaagacctcaacccctgacccccatgcctcaggatactcctcaatagccatcgctgtagtataaccaaagacaaccatcattccccctaaataaattaaaaaaactattaaacccatataacctcccccaaaattcagaatgataacacacccgaccacaccgctaacaatcaatactaaacccccataaataggagaaggcttagaagaaaaccccacaaaccccattactaaacccacactcaacagaaacaaagcatacatcattattctcgcacggactacaaccacgaccaatgatatgaaaaaccatcgttgtatttcaactacaagaacaccaatgaccccaatacgcaaaactaaccccctaataaaattaattaaccactcattcatcgacctccccaccccatccaacatctccgcatgatgaaacttcggctcactccttggcgcctgcctgatcctccaaatcaccacaggactattcctagccatgcactactcaccagacgcctcaaccgccttttcatcaatcgcccacatcactcgagacgtaaattatggctgaatcatccgctaccttcacgccaatggcgcctcaatattctttatctgcctcttcctacacatcgggcgaggcctatattacggatcatttctctactcagaaacctgaaacatcggcattatcctcctgcttgcaactatagcaacagccttcataggctatgtcctcccgtgaggccaaatatcattctgaggggccacagtaattacaaacttactatccgccatcccatacattgggacagacctagttcaatgaatctgaggaggctactcagtagacagtcccaccctcacacgattctttacctttcacttcatcttgcccttcattattgcagccctagcagcactccacctcctattcttgcacgaaacgggatcaaacaaccccctaggaatcacctcccattccgataaaatcaccttccacccttactacacaatcaaagacgccctcggcttacttctcttccttctctccttaatgacattaacactattctcaccagacctcctaggcgacccagacaattataccctagccaaccccttaaacacccctccccacatcaagcccgaatgatatttcctattcgcctacacaattctccgatccgtccctaacaaactaggaggcgtccttgccctattactatccatcctcatcctagcaataatccccatcctccatatatccaaacaacaaagcataatatttcgcccactaagccaatcactttattgactcctagccgcagacctcctcattctaacctgaatcggaggacaaccagtaagctacccttttaccatcattggacaagtagcatccgtactatacttcacaacaatcctaatcctaataccaactatctccctaattgaaaacaaaatactcaaatgggcctgtccttgtagtataaactaatacaccagtcttgtaaaccggagatgaaaacctttttccaaggacaaatcagagaaaaagtctttaactccaccattagcacccaaagctaagattctaatttaaactattctctgttctttcatggggaagcagatttgggtaccacccaagtattgactcacccatcaacaaccgctatgtatttcgtacattactgccagccaccatgaatattgtacggtaccataaatacttgaccacctgtagtacataaaaacccaatccacatcaaaaccccctccccatgcttacaagcaagtacagcaatcaaccctcaactatcacacatcaactgcaactccaaagccacccctcacccactaggataccaacaaacctacccacccttaacagtacatagtacataaagccatttaccgtacatagcacattacagtcaaatcccttctcgtccccatggatgacccccctcagataggggtcccttgaccaccatcctccgtgaaatcaatatcccgcacaagagtgctactctcctcgctccgggcccataacacttgggggtagctaaagtgaactgtatccgacatctggttcctacttcagggccataaagcctaaatagcccacacgttccccttaaataagacatcacgatg

SEQ ID NO: 363 - DNA, 16571 bp, Homo sapiens mitochondrial
  3109: "n" refers to a nucleotide at position 3107 of the Cambridge Reference Sequence (CRS, Anderson et al. 1981 Nature 290:457-465), later determined to be absent from the human mtDNA sequence according to the revised CRS (rCRS, Andrews et al. 1999 Nature Genetics 23:147); "n" therefore represents a single nucleotide deletion at a position corresponding to nucleotide 3107 of SEQ ID NO:1 as provided herein.
gatcacaggtctatcaccctattaaccactcacgggagctctccatgcatttggtattttcgtctggggggtgtgcacgcgatagcattgcgagacgctggagccggagcaccctatgtcgcagtatctgtctttgattcctgcctcatcctattatttatcgcacctacgttcaatattacagacggacatacttactaaagtgtgttaattaattaatgcttgtaggacataataataacaattgaatgtctgcacagccgctttccacacagacatcataacaaaaaattttcaccaaaccccccctcccccccgcttctggccacagcacttaaacacatctctgccaaaccccaaaaacaaagaaccctaacaccagcctaaccagatttcaaattttatcttttggcggtatgcacttttaacagtcaccccccaactaacacattattttcccctctcactcccatactactaatctcatcaacacaacccccgcccatcctacccagcacacacacaccgctgctaaccccataccccgaaccaaccaaaccccaaagacaccccccacagtttatgtagcttacctcctcaaagcaatacactgaaaatgtttagacgggctcacatcaccccataaacaaataggtttggtcctagcctttctattagctcttagtaagattacacatgcaagcatccccgttccagtgagttcaccctctaaatcaccacgatcaaaagggacaagcatcaagcacgcagcaatgcagctcaaaacgcttagcctagccacacccccacgggaaacagcagtgattaacctttagcaataaacgaaagtttaactaagctatactaaccccagggttggtcaatttcgtgccagccaccgcggtcacacgattaacccaagtcaatagaagccggcgtaaagagtgttttagatcaccccctccccaataaagctaaaactcacctgagttgtaaaaaactccagttgacacaaaatagactacgaaagtggctttaacatatctgaacacacaatagctaagacccaaactgggattagataccccactatgcttagccctaaacctcaacagttaaatcaacaaaactgctcgccagaacactacgagccacagcttaaaactcaaaggacctggcggtgcttcatatccctctagaggagcctgttctgtaatcgataaaccccgatcaacctcaccacctcttgctcagcctatataccgccatcttcagcaaaccctgatgaaggctacaaagtaagcgcaagtacccacgtaaagacgttaggtcaaggtgtagcccatgaggtggcaagaaatgggctacattttctaccccagaaaactacgatagcccttatgaaacttaagggtcgaaggtggatttagcagtaaactgagagtagagtgcttagttgaacagggccctgaagcgcgtacacaccgcccgtcaccctcctcaagtatacttcaaaggacatttaactaaaacccctacgcatttatatagaggagacaagtcgtaacatggtaagtgtactggaaagtgcacttggacgaaccagagtgtagcttaacacaaagcacccaacttacacttaggagatttcaacttaacttgaccgctctgagctaaacctagccccaaacccactccaccttactaccagacaaccttagccaaaccatttacccaaataaagtataggcgatagaaattgaaacctggcgcaatagatatagtaccgcaagggaaagatgaaaaattataaccaagcataatatagcaaggactaacccctataccttctgcataatgaattaactagaaataactttgcaaggagagccaaagctaagacccccgaaaccagacgagctacctaagaacagctaaaagagcacacccgtctatgtagcaaaatagtgggaagatttataggtagaggcgacaaacctaccgagcctggtgatagctggttgtccaagatagaatcttagttcaactttaaatttgcccacagaaccctctaaatccccttgtaaatttaactgttagtccaaagaggaacagctctttggacactaggaaaaaaccttgtagagagagtaaaaaatttaacacccatagtaggcctaaaagcagccaccaattaagaaagcgttcaagctcaacacccactacctaaaaaatcccaaacatataactgaactcctcacacccaattggaccaatctatcaccctatagaagaactaatgttagtataagtaacatgaaaacattctcctccgcataagcctgcgtcagattaaaacactgaactgacaattaacagcccaatatctacaatcaaccaacaagtcattattaccctcactgtcaacccaacacaggcatgctcataaggaaaggttaaaaaaagtaaaaggaactcggcaaatcttaccccgcctgtttaccaaaaacatcacctctagcatcaccagtattagaggcaccgcctgcccagtgacacatgtttaacggccgcggtaccctaaccgtgcaaaggtagcataatcacttgttccttaaatagggacctgtatgaatggctccacgagggttcagctgtctcttacttttaaccagtgaaattgacctgcccgtgaagaggcgggcatgacacagcaagacgagaagaccctatggagctttaatttattaatgcaaacagtacctaacaaacccacaggtcctaaactaccaaacctgcattaaaaatttcggttggggcgacctcggagcagaacccaacctccgagcagtacatgctaagacttcaccagtcaaagcgaactactatactcaattgatccaataacttgaccaacggaacaagttaccctagggataacagcgcaatcctattctagagtccatatcaacaatagggtttacgacctcgatgttggatcaggacatcccaatggtgcagccgctattaaaggttcgtttgttcaacgattaaagtcctacgtgatctgagttcagaccggagtaatccaggtcggtttctatctacnttcaaattcctccctgtacgaaaggacaagagaaataaggcctacttcacaaagcgccttcccccgtaaatgatatcatctcaacttagtattatacccacacccacccaagaacagggtttgttaagatggcagagcccggtaatcgcataaaacttaaaactttacagtcagaggttcaattcctcttcttaacaacatacccatggccaacctcctactcctcattgtacccattctaatcgcaatggcattcctaatgcttaccgaacgaaaaattctaggctatatacaactacgcaaaggccccaacgttgtaggcccctacgggctactacaacccttcgctgacgccataaaactcttcaccaaagagcccctaaaacccgccacatctaccatcaccctctacatcaccgccccgaccttagctctcaccatcgctcttctactatgaacccccctccccatacccaaccccctggtcaacctcaacctaggcctcctatttattctagccacctctagcctagccgtttactcaatcctctgatcagggtgagcatcaaactcaaactacgccctgatcggcgcactgcgagcagtagcccaaacaatctcatatgaagtcaccctagccatcattctactatcaacattactaataagtggctcctttaacctctccacccttatcacaacacaagaacacctctgattactcctgccatcatgacccttggccataatatgatttatctccacactagcagagaccaaccgaacccccttcgaccttgccgaaggggagtccgaactagtctcaggcttcaacatcgaatacgccgcaggccccttcgccctattcttcatagccgaatacacaaacattattataataaacaccctcaccactacaatcttcctaggaacaacatatgacgcactctcccctgaactctacacaacatattttgtcaccaagaccctacttctaacctccctgttcttatgaattcgaacagcatacccccgattccgctacgaccaactcatacacctcctatgaaaaaacttcctaccactcaccctagcattacttatatgacatgtctccatacccattacaatctccagcattccccctcaaacctaagaaatatgtctgataaaagagttactttgatagagtaaataataggagcttaaacccccttatttctaggactatgagaatcgaacccatccctgagaatccaaaattctccgtgccacctatcacaccccatcctaaagtaaggtcagctaaataagctatcgggcccataccccgaaaatgttggttatacccttcccgtactaattaatcccctggcccaacccgtcatctactctaccatctttgcaggcacactcatcacagcgctaagctcgcactgattttttacctgagtaggcctagaaataaacatgctagcttttattccagttctaaccaaaaaaataaaccctcgttccacagaagctgccatcaagtatttcctcacgcaagcaaccgcatccataatccttctaatagctatcctcttcaacaatatactctccggacaatgaaccataaccaatactaccaatcaatactcatcattaataatcataatggctatagcaataaaactaggaatagccccctttcacttctgagtcccagaggttacccaaggcacccctctgacatccggcctgcttcttctcacatgacaaaaactagcccccatctcaatcatataccaaatctctccctcactaaacgtaagccttctcctcactctctcaatcttatccatcatagcaggcagttgaggtggattaaaccaaacccagctacgcaaaatcttagcatactcctcaattacccacataggatgaataatagcagttctaccgtacaaccctaacataaccattcttaatttaactatttatattatcctaactactaccgcattcctactactcaacttaaactccagcaccacgaccctactactatctcgcacctgaaacaagctaacatgactaacacccttaattccatccaccctcctctccctaggaggcctgcccccgctaaccggctttttgcccaaatgggccattatcgaagaattcacaaaaaacaatagcctcatcatccccaccatcatagccaccatcaccctccttaacctctacttctacctacgcctaatctactccacctcaatcacactactccccatatctaacaacgtaaaaataaaatgacagtttgaacatacaaaacccaccccattcctccccacactcatcgcccttaccacgctactcctacctatctccccttttatactaataatcttatagaaatttaggttaaatacagaccaagagccttcaaagccctcagtaagttgcaatacttaatttctgtaacagctaaggactgcaaaaccccactctgcatcaactgaacgcaaatcagccactttaattaagctaagcccttactagaccaatgggacttaaacccacaaacacttagttaacagctaagcaccctaatcaactggcttcaatctacttctcccgccgccgggaaaaaaggcgggagaagccccggcaggtttgaagctgcttcttcgaatttgcaattcaatatgaaaatcacctcggagctggtaaaaagaggcctaacccctgtctttagatttacagtccaatgcttcactcagccattttacctcacccccactgatgttcgccgaccgttgactattctctacaaaccacaaagacattggaacactatacctattattcggcgcatgagctggagtcctaggcacagctctaagcctccttattcgagccgagctgggccagccaggcaaccttctaggtaacgaccacatctacaacgttatcgtcacagcccatgcatttgtaataatcttcttcatagtaatacccatcataatcggaggctttggcaactgactagttcccctaataatcggtgcccccgatatggcgtttccccgcataaacaacataagcttctgactcttacctccctctctcctactcctgctcgcatctgctatagtggaggccggagcaggaacaggttgaacagtctaccctcccttagcagggaactactcccaccctggagcctccgtagacctaaccatcttctccttacacctagcaggtgtctcctctatcttaggggccatcaatttcatcacaacaattatcaatataaaaccccctgccataacccaataccaaacgcccctcttcgtctgatccgtcctaatcacagcagtcctacttctcctatctctcccagtcctagctgctggcatcactatactactaacagaccgcaacctcaacaccaccttcttcgaccccgccggaggaggagaccccattctataccaacacctattctgatttttcggtcaccctgaagtttatattcttatcctaccaggcttcggaataatctcccatattgtaacttactactccggaaaaaaagaaccatttggatacataggtatggtctgagctatgatatcaattggcttcctagggtttatcgtgtgagcacaccatatatttacagtaggaatagacgtagacacacgagcatatttcacctccgctaccataatcatcgctatccccaccggcgtcaaagtatttagctgactcgccacactccacggaagcaatatgaaatgatctgctgcagtgctctgagccctaggattcatctttcttttcaccgtaggtggcctgactggcattgtattagcaaactcatcactagacatcgtactacacgacacgtactacgttgtagctcacttccactatgtcctatcaataggagctgtatttgccatcataggaggcttcattcactgatttcccctattctcaggctacaccctagaccaaacctacgccaaaatccatttcactatcatattcatcggcgtaaatctaactttcttcccacaacactttctcggcctatccggaatgccccgacgttactcggactaccccgatgcatacaccacatgaaacatcctatcatctgtaggctcattcatttctctaacagcagtaatattaataattttcatgatttgagaagccttcgcttcgaagcgaaaagtcctaatagtagaagaaccctccataaacctggagtgactatatggatgccccccaccctaccacacattcgaagaacccgtatacataaaatctagacaaaaaaggaaggaatcgaaccccccaaagctggtttcaagccaaccccatggcctccatgactttttcaaaaaggtattagaaaaaccatttcataactttgtcaaagttaaattataggctaaatcctatatatcttaatggcacatgcagcgcaagtaggtctacaagacgctacttcccctatcatagaagagcttatcacctttcatgatcacgccctcataatcattttccttatctgcttcctagtcctgtatgcccttttcctaacactcacaacaaaactaactaatactaacatctcagacgctcaggaaatagaaaccgtctgaactatcctgcccgccatcatcctagtcctcatcgccctcccatccctacgcatcctttacataacagacgaggtcaacgatccctcccttaccatcaaatcaattggccaccaatggtactgaacctacgagtacaccgactacggcggactaatcttcaactcctacatacttcccccattattcctagaaccaggcgacctgcgactccttgacgttgacaatcgagtagtactcccgattgaagcccccattcgtataataattacatcacaagacgtcttgcactcatgagctgtccccacattaggcttaaaaacagatgcaattcccggacgtctaaaccaaaccactttcaccgctacacgaccgggggtatactacggtcaatgctctgaaatctgtggagcaaaccacagtttcatgcccatcgtcctagaattaattcccctaaaaatctttgaaatagggcccgtatttaccctatagcaccccctctaccccctctagagcccactgtaaagctaacttagcattaaccttttaagttaaagattaagagaaccaacacctctttacagtgaaatgccccaactaaatactaccgtatggcccaccataattacccccatactccttacactattcctcatcacccaactaaaaatattaaacacaaactaccacctacctccctcaccaaagcccataaaaataaaaaattataacaaaccctgagaaccaaaatgaacgaaaatctgttcgcttcattcattgcccccacaatcctaggcctacccgccgcagtactgatcattctatttccccctctattgatccccacctccaaatatctcatcaacaaccgactaatcaccacccaacaatgactaatcaaactaacctcaaaacaaatgataaccatacacaacactaaaggacgaacctgatctcttatactagtatccttaatcatttttattgccacaactaacctcctcggactcctgcctcactcatttacaccaaccacccaactatctataaacctagccatggccatccccttatgagcgggcgcagtgattataggctttcgctctaagattaaaaatgccctagcccacttcttaccacaaggcacacctacaccccttatccccatactagttattatcgaaaccatcagcctactcattcaaccaatagccctggccgtacgcctaaccgctaacattactgcaggccacctactcatgcacctaattggaagcgccaccctagcaatatcaaccattaaccttccctctacacttatcatcttcacaattctaattctactgactatcctagaaatcgctgtcgccttaatccaagcctacgttttcacacttctagtaagcctctacctgcacgacaacacataatgacccaccaatcacatgcctatcatatagtaaaacccagcccatgacccctaacaggggccctctcagccctcctaatgacctccggcctagccatgtgatttcacttccactccataacgctcctcatactaggcctactaaccaacacactaaccatataccaatgatggcgcgatgtaacacgagaaagcacataccaaggccaccacacaccacctgtccaaaaaggccttcgatacgggataatcctatttattacctcagaagtttttttcttcgcaggatttttctgagccttttaccactccagcctagcccctaccccccaattaggagggcactggcccccaacaggcatcaccccgctaaatcccctagaagtcccactcctaaacacatccgtattactcgcatcaggagtatcaatcacctgagctcaccatagtctaatagaaaacaaccgaaaccaaataattcaagcactgcttattacaattttactgggtctctattttaccctcctacaagcctcagagtacttcgagtctcccttcaccatttccgacggcatctacggctcaacattttttgtagccacaggcttccacggacttcacgtcattattggctcaactttcctcactatctgcttcatccgccaactaatatttcactttacatccaaacatcactttggcttcgaagccgccgcctgatactggcattttgtagatgtggtttgactatttctgtatgtctccatctattgatgagggtcttactcttttagtataaatagtaccgttaacttccaattaactagttttgacaacattcaaaaaagagtaataaacttcgccttaattttaataatcaacaccctcctagccttactactaataattattacattttgactaccacaactcaacggctacatagaaaaatccaccccttacgagtgcggcttcgaccctatatcccccgcccgcgtccctttctccataaaattcttcttagtagctattaccttcttattatttgatctagaaattgccctccttttacccctaccatgagccctacaaacaactaacctgccactaatagttatgtcatccctcttattaatcatcatcctagccctaagtctggcctatgagtgactacaaaaaggattagactgagccgaattggtatatagtttaaacaaaacgaatgatttcgactcattaaattatgataatcatatttaccaaatgcccctcatttacataaatattatactagcatttaccatctcacttctaggaatactagtatatcgctcacacctcatatcctccctactatgcctagaaggaataatactatcgctgttcattatagctactctcataaccctcaacacccactccctcttagccaatattgtgcctattgccatactagtctttgccgcctgcgaagcagcggtgggcctagccctactagtctcaatctccaacacatatggcctagactacgtacataacctaaacctactccaatgctaaaactaatcgtcccaacaattatattactaccactgacatgactttccaaaaaacacataatttgaatcaacacaaccacccacagcctaattattagcatcatccctctactattttttaaccaaatcaacaacaacctatttagctgttccccaaccttttcctccgaccccctaacaacccccctcctaatactaactacctgactcctacccctcacaatcatggcaagccaacgccacttatccagtgaaccactatcacgaaaaaaactctacctctctatactaatctccctacaaatctccttaattataacattcacagccacagaactaatcatattttatatcttcttcgaaaccacacttatccccaccttggctatcatcacccgatgaggcaaccagccagaacgcctgaacgcaggcacatacttcctattctacaccctagtaggctcccttcccctactcatcgcactgatttacactcacaacaccctaggctcactaaacattctactactcactctcactgcccaagaactatcaaactcctgagccaacaacttaatatgactagcttacacaatagcttttatagtaaagatacctctttacggactccacttatgactccctaaagcccatgtcgaagcccccatcgctgggtcaatagtacttgccgcagtactcttaaaactaggcggctatggtataatacgcctcacactcattctcaaccccctgacaaaacacatagcctaccccttccttgtactatccctatgaggcataattataacaagctccatctgcctacgacaaacagacctaaaatcgctcattgcatactcttcaatcagccacatagccctcgtagtaacagccattctcatccaaaccccctgaagcttcaccggcgcagtcattctcataatcgcccacggacttacatcctcattactattctgcctagcaaactcaaactacgaacgcactcacagtcgcatcataatcctctctcaaggacttcaaactctactcccactaatagctttttgatgacttctagcaagcctcgctaacctcgccttaccccccactattaacctactgggagaactctctgtgctagtaaccacgttctcctgatcaaatatcactctcctacttacaggactcaacatactagtcacagccctatactccctctacatatttaccacaacacaatggggctcactcacccaccacattaacaacataaaaccctcattcacacgagaaaacaccctcatgttcatacacctatcccccattctcctcctatccctcaaccccgacatcattaccgggttttcctcttgtaaatatagtttaaccaaaacatcagattgtgaatctgacaacagaggcttacgaccccttatttaccgagaaagctcacaagaactgctaactcatgcccccatgtctaacaacatggctttctcaacttttaaaggataacagctatccattggtcttaggccccaaaaattttggtgcaactccaaataaaagtaataaccatgcacactactataaccaccctaaccctgacttccctaattccccccatccttaccaccctcgttaaccctaacaaaaaaaactcatacccccattatgtaaaatccattgtcgcatccacctttattatcagtctcttccccacaacaatattcatgtgcctagaccaagaagttattatctcgaactgacactgagccacaacccaaacaacccagctctccctaagcttcaaactagactacttctccataatattcatccctgtggcattgttcgttacatggtccatcatagaattctcactgtgatatataaactcagacccaaacattaatcagttcttcaaatatctactcatcttcctaattaccatactaatcttagttaccgctaacaacctattccaactgttcatcggctgagagggcgtaggaattatatccttcttgctcatcagttgatgatacgcccgagcagatgccaacacagcagccattcaagcaatcctatacaaccgtatcggcgatatcggtttcatcctcgccttagcatgatttatcctacactccaactcatgagacccacaacaaatagcccttctaaacgctaatccaagcctcaccccactactaggcctcctcctagcagcagcaggcaaatcagcccaattaggtctccacccctgactcccctcagccatagaaggccccaccccagtctcagccctactccactcaagcactatagttgtagcaggaatcttcttactcatccgcttccaccccctagcagaaaatagcccactaatccaaactctaacactatgcttaggcgctatcaccactctgttcgcagcagtctgcgcccttacacaaaatgacatcaaaaaaatcgtagccttctccacttcaagtcaactaggactcataatagttacaatcggcatcaaccaaccacacctagcattcctgcacatctgtacccacgccttcttcaaagccatactatttatgtgctccgggtccatcatccacaaccttaacaatgaacaagatattcgaaaaataggaggactactcaaaaccatacctctcacttcaacctccctcaccattggcagcctagcattagcaggaatacctttcctcacaggtttctactccaaagaccacatcatcgaaaccgcaaacatatcatacacaaacgcctgagccctatctattactctcatcgctacctccctgacaagcgcctatagcactcgaataattcttctcaccctaacaggtcaacctcgcttccccacccttactaacattaacgaaaataaccccaccctactaaaccccattaaacgcctgacagccggaagcctattcgcaggatttctcattactaacaacatttcccccgcatcccccttccaaacaacaatccccctctacctaaaactcacagccctcgctgtcactttcctaggacttctaacagccctagacctcaactacctaaccaacaaacttaaaataaaatccccactatgcacattttatttctccaacatactcggattctaccctagcatcacacaccgcacaatcccctatctaggccttcttacgagccaaaacctgcccctactcctcctagacctaacctgactagaaaagctattacctaaaacaatttcacagcaccaaatctccacctccatcatcacctcaacccaaaaaggcataattaaactttacttcctctctttcttcttcccactcatcctaaccctactcctaatcacataacctattcccccgagcaatctcaattacaatatatacaccaacaaacaatgttcaaccagtaactactactaatcaacgcccataatcatacaaagcccccgcaccaataggatcctcccgaatcaaccctgacccctctccttcataaattattcagcttcctacactattaaagtttaccacaaccaccaccccatcatactctttcacccacagcaccaatcctacctccatcgctaaccccactaaaacactcaccaagacctcaacccctgacccccatgcctcaggatactcctcaatagccatcgctgtagtatatccaaagacaaccatcattccccctaaataaattaaaaaaactattaaacccatataacctcccccaaaattcagaataataacacacccgaccacaccgctaacaatcaatactaaacccccataaataggagaaggcttagaagaaaaccccacaaaccccattactaaacccacactcaacagaaacaaagcatacatcattattctcgcacggactacaaccacgaccaatgatatgaaaaaccatcgttgtatttcaactacaagaacaccaatgaccccaatacgcaaaattaaccccctaataaaattaattaaccactcactcatcgacctccccaccccatccaacatctccgcatgatgaaacttcggctcactccttggcgcctgcctgatcctccaaatcaccacaggactattcctagccatgcactactcaccagacgcctcaaccgccttttcatcaatcgcccacatcactcgagacgtaaattatggctgaatcatccgctaccttcacgccaatggcgcctcaatattctttatctgcctcttcctacacatcgggcgaggcctatattacggatcatttctctactcagaaacctgaaacatcggcattatcctcctgcttgcaactatagcaacagccttcataggctatgtcctcccgtgaggccaaatatcattctgaggggccacagtaattacaaacttactatccgccatcccatacattgggacagacctagttcaatgaatctgaggaggctactcagtagacagtcccaccctcacacgattctttacctttcacttcatcttgcccttcattattgcagccctagcagcactccacctcctattcttgcacgaaacgggatcaaacaaccccctaggaatcacctcccattccgataaaatcaccttccacccttactacacaatcaaagacgccctcggcttacttctcttcattctctccttaatgacattaacactattctcaccagacctcctaggcgacccagacaattataccctagccaaccccttaaacacccctccccacatcaagcccgaatgatatttcctattcgcctacacaattctccgatccgtccctaacaaactaggaggcgtccttgccctattactatccatcctcatcctagcaataatccccatcctccatatatccaaacaacaaagcataatatttcgcccactaagccaatcactttattgactcctagccgcagacctcctcattctaacctgaatcggaggacaaccagtaagctacccttttaccatcattggacaagtagcatccgtactatacttcacaacaatcctaatcctaataccaactatctccctaattgaaaacaaaatactcaaatgggcctgtccttgtagtataaactaatacaccagtcttgtaaaccggagatgaaaacctttttccaaggacaaatcagagaaaaagtctttaactccaccattagcacccaaagctaagattctaatttaaactattctctgttctttcatggggaagcagatttgggtaccacccaagtattgacttacccatcaacaaccgctatgtatttcgtacattactgccagccaccatgaatattgcacggtaccataaatacttgaccacctgtagtacataaaaacccaatccacatcaaaaccccctccccatgcttacaagcaagtacagcaatcaaccctcaactatcacacatcaactgcaactccaaagccacccctcacccactaggataccaacaaacctacccacccttaacagtacatagtacataaagccatttaccgtacatagcacattacagtcaaatcccttctcgtccccatggatgacccccctcagataggggtcccttgaccaccatcctccgtgaaatcaatatcccgcacaagagtgctactctcctcgctccgggcccataacacttgggggtagctaaagtgaactgtatccgacatctggttcctacttcagggccataaagcctaaatagcccacacgttccccttaaataagacatcacgatg

SEQ ID NO: 364 - DNA, 16570 bp, Homo sapiens mitochondrial
  3108: "n" refers to a nucleotide at position 3107 of the Cambridge Reference Sequence (CRS, Anderson et al. 1981 Nature 290:457-465), later determined to be absent from the human mtDNA sequence according to the revised CRS (rCRS, Andrews et al. 1999 Nature Genetics 23:147); "n" therefore represents a single nucleotide deletion at a position corresponding to nucleotide 3107 of SEQ ID NO:1 as provided herein.
gatcacaggtctatcaccctattaaccactcacgggagctctccatgcatttggtattttcgtctggggggtatgcacgcgatagcattgcgagacgctggagccggagcaccctatgtcgcagtatctgtctttgattcctgccccatcctattatttatcgcacctacgttcaatattacaggcgaacatacttactaaagtgtgttaattaattaatgcttgtaggacataataataacaattgaatgtctgcacagccgctttccacacagacatcataacaaaaaatttccaccaaaccccccctcccccgccttctggccacagcacttaaacacatctctgccaaaccccaaaaacaaagaaccctaacaccagcctaaccagatttcaaattttatcttttggcggtatgcacttttaacagtcaccccccaactaacacattattttcccctcccactcccatactactaatctcatcaatacaacccccgcccatcctacccagcacacacacaccgctgctaaccccataccccgaaccaaccaaaccccaaagacaccccccacagtttatgtagcttacctcctcaaagcaatacactgaaaatgtttagacgggctcacatcaccccataaacaaataggtttggtcctagcctttctattagctcttagtaagattacacatgcaagcatccccgttccagtgagttcaccctctaaatcaccacgatcaaaagggacaagcatcaagcacgcagcaatgcagctcaaaacgcttagcctagccacacccccacgggaaacagcagtgattaacctttagcaataaacgaaagtttaactaagctatactaaccccagggttggtcaatttcgtgccagccaccgcggtcacacgattaacccaagtcaatagaagccggcgtaaagagtgttttagatcaccccctccccaataaagctaaaactcacctgagttgtaaaaaactccagttgacacaaaatagactacgaaagtggctttaacatatctgaacacacaatagctaagacccaaactgggattagataccccactatgcttagccctaaacctcaacagttaaatcaacaaaactgctcgccagaacactacgagccacagcttaaaactcaaaggacctggcggtgcttcatatccctctagaggagcctgttctgtaatcgataaaccccgatcaacctcaccacctcttgctcagcctatataccgccatcttcagcaaaccctgatgaaggctacaaagtaagcgcaagtacccacgtaaagacgttaggtcaaggtgtagcccatgaggtggcaagaaatgggctacattttctaccccagaaaactacgatagcccttatgaaacttaagggtcgaaggtggatttagcagtaaactaagagtagagtgcttagttgaacaaggccctgaagcgcgtacacaccgcccgtcaccctcctcaagtatacttcaaaggacatttaactaaaacccctacgcatttatatagaggagacaagtcgtaacatggtaagtgtactggaaagtgcacttggacgaaccagagtgtagcttaacacaaagcacccaacttacacttaggagatttcaacttaacttgaccgctctgagctaaacctagccccaaacccactccaccttactaccagacaaccttagccaaaccatttacccaaataaagtataggcgatagaaattgaaacctggcgcaatagatatagtaccgcaagggaaagatgaaaaattataaccaagcataatatagcaaggactaacccctataccttctgcataatgaattaactagaaataactttgcaaggagagccaaagctaagacccccgaaaccagacgagctacctaagaacagctaaaagagcacacccgtctatgtagcaaaatagtgggaagatttataggtagaggcgacaaacctaccgagcctggtgatagctggttgtccaagatagaatcttagttcaactttaaatttgcccacagaaccctctaaatccccttgtaaatttaactgttagtccaaagaggaacagctctttggacactaggaaaaaaccttgtagagagagtaaaaaatttaacacccatagtaggcctaaaagcagccaccaattaagaaagcgttcaagctcaacacccactacctaaaaaatcccaaacatataactgaactcctcacacccaattggaccaatctatcaccctatagaagaactaatgttagtataagtaacatgaaaacattctcctccgcataagcctgcgtcagattaaaacactgaactgacaattaacagcccaatatctacaatcaaccaacaagtcattattaccctcactgtcaacccaacacaggcatgctcataaggaaaggttaaaaaaagtaaaaggaactcggcaaatcttaccccgcctgtttaccaaaaacatcacctctagcatcaccagtattagaggcaccgcctgcccagtgacacatgtttaacggccgcggtaccctaaccgtgcaaaggtagcataatcacttgttccttaaatagggacctgtatgaatggctccacgagggttcagctgtctcttacttttaaccagtgaaattgacctgcccgtgaagaggcgggcataacacagcaagacgagaagaccctatggagctttaatttattaatgcaaacagtacctaacaaacccacaggtcctaaactaccaaacctgcattaaaaatttcggttggggcgacctcggagcagaacccaacctccgagcagtacatgctaagacttcaccagtcaaagcgaactactatactcaattgatccaataacttgaccaacggaacaagttaccctagggataacagcgcaatcctattctagagtccatatcaacaatagggtttacgacctcgatgttggatcaggacatcccgatggtgcagccgctattaaaggttcgtttgttcaacgattaaagtcctacgtgatctgagttcagaccggagtaatccaggtcggtttctatctacnttcaaattcctccctgtacgaaaggacaagagaaataaggcctacttcacaaagcgccttcccccgtaaatgatatcatctcaacttagtattatacccacacccacccaagaacagggtttgttaagatggcagagcccggtaatcgcataaaacttaaaactttacagtcagaggttcaattcctcttcttaacaacatacccatggccaacctcctactcctcattgtacccattctaatcgcaatggcattcctaatgcttaccgaacgaaaaattctaggctatatacaactacgcaaaggccccaacgttgtaggcccctacgggctactacaacccttcgctgacgccataaaactcttcaccaaagagcccctaaaacccgccacatctaccatcaccctctacatcaccgccccgaccttagctctcaccatcgctcttctactatgaacccccctccccatacccaaccccctggtcaacctcaacctaggcctcctatttattctagccacctctagcctagccgtttactcaatcctctgatcagggtgagcatcaaactcaaactacgccctgatcggcgcactgcgagcagtagcccaaacaatctcatatgaagtcaccctagccatcattctactatcaacattactaataagtggctcctttaacctctccacccttatcacaacacaagaacacctctgattactcctgccatcatgacccttggccataatatgatttatctccacactagcagagaccaaccgaacccccttcgaccttgccgaaggggagtccgaactagtctcaggcttcaacatcgaatacgccgcaggccccttcgccctattcttcatagccgaatacacaaacattattataataaacaccctcaccactacaatcttcctaggaacaacatatgacgcactctcccctgaactctacacaacatattttgtcaccaagaccctacttctaacctccctgttcttatgaattcgaacagcatacccccgattccgctacgaccaactcatacacctcctatgaaaaaacttcctaccactcaccctagcattacttatatgatatgtctccatacccattacaatctccagcattccccctcaaacctaagaaatatgtctgataaaagagttactttgatagagtaaataataggagcttaaacccccttatttctaggactatgagaatcgaacccatccctgagaatccaaaattctccgtgccacctatcacaccccatcctaaagtaaggtcagctaaataagctatcgggcccataccccgaaaatgttggttatacccttcccgtactaattaatcccctggcccaacccgtcatctactctaccatctttgcaggcacactcatcacagcgctaagctcgcactgattttttacctgagtaggcctagaaataaacatgctagcttttattccagttctaaccaaaaaaataaaccctcgttccacagaagctgccatcaagtatttcctcacgcaagcaaccgcatccataatccttctaatagctatcctcttcaacaatatactctccggacaatgaaccataaccaatactaccaatcaatactcatcattaataatcataatagctatagcaataaaactaggaatagccccctttcacttctgagtcccagaggttacccaaggcacccctctgacatccggcctgcttcttctcacatgacaaaaactagcccccatctcaatcatataccaaatctctccctcactaaacgtaagccttctcctcactctctcaatcttatccatcatagcaggcagttgaggtggattaaaccaaacccagctacgcaaaatcttagcatactcctcaattacccacataggatgaataatagcagttctaccgtacaaccctaacataaccattcttaatttaactatttatattatcctaactactaccgcattcctactactcaacttaaactccagcaccacgaccctactactatctcgcacctgaaacaagctaacatgactaacacccttaattccatccaccctcctctccctaggaggcctgcccccgctaaccggctttttgcccaaatgggccattatcgaagaattcacaaaaaacaatagcctcatcatccccaccatcatagccaccatcaccctccttaacctctacttctacctacgcctaatctactccacctcaatcacactactccccatatctaacaacgtaaaaataaaatgacagtttgaacatacaaaacccaccccattcctccccacactcatcgcccttaccacgctactcctacctatctccccttttatactaataatcttatagaaatttaggttaaatacagaccaagagccttcaaagccctcagtaagttgcaatacttaatttctgtaacagctaaggactgcaaaaccccactctgcatcaactgaacgcaaatcagccactttaattaagctaagcccttactagaccaatgggacttaaacccacaaacacttagttaacagctaagcaccctaatcaactggcttcaatctacttctcccgccgccgggaaaaaaggcgggagaagccccggcaggtttgaagctgcttcttcgaatttgcaattcaatatgaaaatcacctcggagctggtaaaaagaggcctaacccctgtctttagatttacagtccaatgcttcactcagccattttacctcacccccactgatgttcgccgaccgttgactattctctacaaaccacaaagacattggaacactatacctattattcggcgcatgagctggagtcctaggcacagctctaagcctccttattcgagccgagctgggccagccaggcaaccttctaggtaacgaccacatctacaacgttatcgtcacagcccatgcatttgtaataatcttcttcatagtaatacccatcataatcggaggctttggcaactgactagttcccctaataatcggtgcccccgatatggcgtttccccgcataaacaacataagcttctgactcttacctccctctctcctactcctgctcgcatctgctatagtggaggccggagcaggaacaggttgaacagtctaccctcccttagcagggaactactcccaccctggagcctccgtagacctaaccatcttctccttacacctagcaggtgtctcctctatcttaggggccatcaatttcatcacaacaattatcaatataaaaccccctgccataacccaataccaaacgcccctcttcgtctgatccgtcctaatcacagcagtcctacttctcctatctctcccagtcctagctgctggcatcactatactactaacagaccgcaacctcaacaccaccttcttcgaccccgccggaggaggagaccccattctataccaacacctattctgatttttcggtcaccctgaagtttatattcttatcctaccaggcttcggaataatctcccatattgtaacttactactccggaaaaaaagaaccatttggatacataggtatggtctgagctatgatatcaattggcttcctagggtttatcgtgtgagcacaccatatatttacagtaggaatagacgtagacacacgagcatatttcacctccgctaccataatcatcgctatccccaccggcgtcaaagtatttagctgactcgccacactccacggaagcaatatgaaatgatctgctgcagtgctctgagccctaggattcatctttcttttcaccgtaggtggcctgactggcattgtattagcaaactcatcactagacatcgtactacacgacacgtactacgttgtagcccacttccactatgtcctatcaataggagctgtatttgccatcataggaggcttcattcactgatttcccctattctcaggctacaccctagaccaaacctacgccaaaatccatttcactatcatattcatcggcgtaaatctaactttcttcccacaacactttctcggcctatccggaatgccccgacgttactcggactaccccgatgcatacaccacatgaaacatcctatcatctgtaggctcattcatttctctaacagcagtaatattaataattttcatgatttgagaagccttcgcttcgaagcgaaaagtcctaatagtagaagaaccctccataaacctggagtgactatatggatgccccccaccctaccacacattcgaagaacccgtatacataaaatctagacaaaaaaggaaggaatcgaaccccccaaagctggtttcaagccaaccccatggcctccatgactttttcaaaaaggtattagaaaaaccatttcataactttgtcaaagttaaattataggctaaatcctatatatcttaatggcacatgcagcgcaagtaggtctacaagacgctacttcccctatcatagaagagcttatcacctttcatgatcacgccctcataatcattttccttatctgcttcctagtcctgtatgcccttttcctaacactcacaacaaaactaactaatactaacatctcagacgctcaggaaatagaaaccgtctgaactatcctgcccgccatcatcctagtcctcatcgccctcccatccctacgcatcctttacataacagacgaggtcaacgatccctcccttaccatcaaatcaattggccaccaatggtactgaacctacgagtacaccgactacggcggactaatcttcaactcctacatacttcccccattattcctagaaccaggcgacctgcgactccttgacgttgacaatcgagtagtactcccgattgaagcccccattcgtataataattacatcacaagacgtcttgcactcatgagctgtccccacattaggcttaaaaacagatgcaattcccggacgtctaaaccaaaccactttcaccgctacacgaccgggggtatactacggtcaatgctctgaaatctgtggagcaaaccacagtttcatgcccatcgtcctagaattaattcccctaaaaatctttgaaatagggcccgtatttaccctatagcaccccctctaccccctctagagcccactgtaaagctaacttagcattaaccttttaagttaaagattaagagaaccaacacctctttacagtgaaatgccccaactaaatactaccgtatggcccaccataattacccccatactccttacactattcctcatcacccaactaaaaatattaaacacaaactaccacctacctccctcaccaaagcccataaaaataaaaaattataacaaaccctgagaaccaaaatgaacgaaaatctgttcgcttcattcattgcccccacaatcctaggcctacccgccgcagtactgatcattctatttccccctctattgatccccacctccaaatatctcatcaacaaccgactaatcaccacccaacaatgactaatcaaactaacctcaaaacaaatgataaccatacacaacactaaaggacgaacctgatctcttatactagtatccttaatcatttttattgccacaactaacctcctcggactcctgcctcactcatttacaccaaccacccaactatctataaacctagccatggccatccccttatgagcgggcgcagtgattataggctttcgctctaagattaaaaatgccctagcccacttcttaccacaaggcacacctacaccccttatccccatactagttattatcgaaaccatcagcctactcattcaaccaatagccctggccgtacgcctaaccgctaacattactgcaggccacctactcatgcacctaattggaagcgccaccctagcaatatcaaccattaaccttccctctacacttatcatcttcacaattctaattctactgactatcctagaaatcgctgtcgccttaatccaagcctacgttttcacacttctagtaagcctctacctgcacgacaacacataatgacccaccaatcacatgcctatcatatagtaaaacccagcccatgacccctaacaggggccctctcagccctcctaatgacctccggcctagccatgtgatttcacttccactccataacgctcctcatactaggcctactaaccaacacactaaccatataccaatgatggcgcgatgtaacacgagaaagcacataccaaggccaccacacaccacctgtccaaaaaggccttcgatacgggataatcctatttattacctcagaagtttttttcttcgcaggatttttctgagccttttaccactccagcctagcccctaccccccaattaggagggcactggcccccaacaggcatcaccccgctaaatcccctagaagtcccactcctaaacacatccgtattactcgcatcaggagtatcaatcacctgagctcaccatagtctaatagaaaacaaccgaaaccaaataattcaagcactgcttattacaattttactgggtctctattttaccctcctacaagcctcagagtacttcgagtctcccttcaccatttccgacggcatctacggctcaacattttttgtagccacaggcttccacggacttcacgtcattattggctcaactttcctcactatctgcttcatccgccaactaatatttcactttacatccaaacatcactttggcttcgaagccgccgcctgatactggcattttgtagatgtggtttgactatttctgtatgtctccatctattgatgagggtcttactcttttagtataaatagtaccgttaacttccaattaactagttttgacaacattcaaaaaagagtaataaacttcgccttaattttaataatcaacaccctcctagccttactactaataattattacattttgactaccacaactcaacggctacatagaaaaatccaccccttacgagtgcggcttcgaccctatatcccccgcccgcgtccctttctccataaaattcttcttagtagctattaccttcttattatttgatctagaaattgccctccttttacccctaccatgagccctacaaacaactaacctgccactaatagttatgtcatccctcttattaatcatcatcctagccctaagtctggcctatgagtgactacaaaaaggattagactgaaccgaattggtatatagtttaaacaaaacgaatgatttcgactcattaaattatgataatcatatttaccaaatgcccctcatttacataaatattatactagcatttaccatctcacttctaggaatactagtatatcgctcacacctcatatcctccctactatgcctagaaggaataatactatcgctgttcattatagctactctcataaccctcaacacccactccctcttagccaatattgtgcctattgccatactagtctttgccgcctgcgaagcagcggtgggcctagccctactagtctcaatctccaacacatatggcctagactacgtacataacctaaacctactccaatgctaaaactaatcgtcccaacaattatattactaccactgacatgactctccaaaaaacacataatttgaatcaacacaaccacccacagcctaattattagcatcatccctctactattttttaaccaaatcaacaacaacctatttagctgttccccaaccttttcctccgaccccctaacaacccccctcctaatactaactacctgactcctacccctcacaatcatggcaagccaacgccacttatccagtgaaccactatcacgaaaaaaactctacctctctatactaatctccctacaaatctccttaattataacattcacagccacagaactaatcatattttatatcttcttcgaaaccacacttatccccaccttggctatcatcacccgatgaggcaaccagccagaacgcctgaacgcaggcacatacttcctattctacaccctagtaggctcccttcccctactcatcgcactaatttacactcacaacaccctaggctcactaaacattctactactcactctcactgcccaagaactatcaaactcctgagccaacaacttaatatgactagcttacacaatagcttttatagtaaagatacctctttacggactccacttatgactccctaaagcccatgtcgaagcccccatcgctgggtcaatagtacttgccgcagtactcttaaaactaggcggctatggtataatacgcctcacactcattctcaaccccctgacaaaacacatagcctaccccttccttgtactatccctatgaggcataattataacaagctccatctgcctacgacaaacagacctaaaatcgctcattgcatactcttcaatcagccacatagccctcgtagtaacagccattctcatccaaaccccctgaagcttcaccggcgcagtcattctcataatcgcccacgggcttacatcctcattactattctgcctagcaaactcaaactacgaacgcactcacagtcgcatcataatcctctctcaaggacttcaaactctactcccactaatagctttttgatgacttctagcaagcctcgctaacctcgccttaccccccactattaacctactgggagaactctctgtgctagtaaccacgttctcctgatcaaatatcactctcctacttacaggactcaacatactagtcacagccctatactccctctacatatttaccacaacacaatggggctcactcacccaccacattaacaacataaaaccctcattcacacgagaaaacaccctcatgttcatacacctatcccccattctcctcctatccctcaaccccgacatcattaccgggttttcctcttgtaaatatagtttaaccaaaacatcagattgtgaatctgacaacagaggcttacgaccccttatttaccgagaaagctcacaagaactgctaactcatgcccccatgtctaacaacatggctttctcaacttttaaaggataacagctatccattggtcttaggccccaaaaattttggtgcaactccaaataaaagtaataaccatgcacactactataaccaccctaaccctgacttccctaattccccccatccttaccaccctcgttaaccctaacaaaaaaaactcatacccccattatgtaaaatccattgtcgcatccacctttattatcagtctcttccccacaacaatattcatgtgcctagaccaagaagttattatctcgaactgacactgagccacaacccaaacaacccagctctccctaagcttcaaactagactacttctccataatattcatccctgtagcattgttcgttacatggtccatcatagaattctcactgtgatatataaactcagacccaaacattaatcagttcttcaaatatctactcatcttcctaattaccatactaatcttagttaccgctaacaacctattccaactgttcatcggctgagagggcgtaggaattatatccttcttgctcatcagttgatgatacgcccgagcagatgccaacacagcagccattcaagcaatcctatacaaccgtatcggcgatatcggtttcatcctcgccttagcatgatttatcctacactccaactcatgagacccacaacaaatagcccttctaaacgctaatccaagcctcaccccactactaggcctcctcctagcagcagcaggcaaatcagcccaattaggtctccacccctgactcccctcagccatagaaggccccaccccagtctcagccctactccactcaagcactatagttgtagcaggaatcttcttactcatccgcttccaccccctagcagaaaatagcccactaatccaaactctaacactatgcttaggcgctatcaccactctgttcgcagcagtctgcgcccttacacaaaatgacatcaaaaaaatcgtagccttctccacttcaagtcaactaggactcataatagttacaatcggcatcaaccaaccacacctagcattcctgcacatctgtacccacgccttcttcaaagccatactatttatgtgctccgggtccatcatccacaaccttaacaatgaacaagatattcgaaaaataggaggactactcaaaaccatacctctcacttcaacctccctcaccattggcagcctagcattagcaggaatacctttcctcacaggtttctactccaaagaccacatcatcgaaaccgcaaacatatcatacacaaacgcctgagccctatctattactctcatcgctacctccctgacaagcgcctatagcactcgaataattcttctcaccctaacaggtcaacctcgcttccccacccttactaacattaacgaaaataaccccaccctactaaaccccattaaacgcctggcagccggaagcctattcgcaggatttctcattactaacaacatttcccccgcatcccccttccaaacaacaatccccctctacctaaaactcacagccctcgctgtcactttcctaggacttctaacagccctagacctcaactacctaaccaacaaacttaaaataaaatccccactatgcacattttatttctccaacatactcggattctaccctagcatcacacaccgcacaatcccctatctaggccttcttacgagccaaaacctgcccctactcctcctagacctaacctgactagaaaagctattacctaaaacaatttcacagcaccaaatctccacctccatcatcacctcaacccaaaaaggcataattaaactttacttcctctctttcttcttcccactcatcctaaccctactcctaatcacataacctattcccccgagcaatctcaattacaatatatacaccaacaaacaatgttcaaccagtaactactactaatcaacgcccataatcatacaaagcccccgcaccaataggatcctcccgaatcaaccctgacccctctccttcataaattattcagcttcctacactattaaagtttaccacaaccaccaccccatcatactctttcacccacagcaccaatcctacctccatcgctaaccccactaaaacactcaccaagacctcaacccctgacccccatgcctcaggatactcctcaatagccatcgctgtagtatatccaaagacaaccatcattccccctaaataaattaaaaaaactattaaacccatataacctcccccaaaattcagaataataacacacccgaccacaccgctaacaatcaatactaaacccccataaataggagaaggcttagaagaaaaccccacaaaccccattactaaacccacactcaacagaaacaaagcatacatcattattctcgcacggactacaaccacgaccaatgatatgaaaaaccatcgttgtatttcaactacaagaacaccaatgaccccaatacgcaaaactaaccccctaataaaattaattaaccactcattcatcgacctccccaccccatccaacatctccgcatgatgaaacttcggctcactccttggcgcctgcctgatcctccaaatcaccacaggactattcctagccatgcactactcaccagacgcctcaaccgccttttcatcaatcgcccacatcactcgagacgtaaattatggctgaatcatccgctaccttcacgccaatggcgcctcaatattctttatctgcctcttcctacacatcgggcgaggcctatattacggatcatttctctactcagaaacctgaaacatcggcattatcctcctgcttgcaactatagcaacagccttcataggctatgtcctcccgtgaggccaaatatcattctgaggggccacagtaattacaaacttactatccgccatcccatacattgggacagacctagttcaatgaatctgaggaggctactcagtagacagtcccaccctcacacgattctttacctttcacttcatcttgcccttcattattgcagccctagcagcactccacctcctattcttgcacgaaacgggatcaaacaaccccctaggaatcacctcccattccgataaaatcaccttccacccttactacacaatcaaagacgccctcggcttacttctcttccttctctccttaatgacattaacactattctcaccagacctcctaggcgacccagacaattataccctagccaaccccttaaacacccctccccacatcaagcccgaatgatatttcctattcgcctacacaattctccgatccgtccctaacaaactaggaggcgtccttgccctattactatccatcctcatcctagcaataatccccatcctccatatatccaaacaacaaagcataatatttcgcccactaagccaatcactttattgactcctagccgcagacctcctcattctaacctgaatcggaggacaaccagtaagctacccttttaccatcattggacaagtagcatccgtactatacttcacaacaatcctaatcctaataccaactatctccctaattgaaaacaaaatactcaaatgggcctgtccttgtagtataaactaatacaccagtcttgtaaaccggagatgaaaacctttttccaaggacaaatcagagaaaaagtctttaactccaccattagcacccaaagctaagattctaatttaaactattctctgttctttcatggggaagcagatttgggtaccacccaagtattgactcacccatcaacaaccgctatgtatttcgtacattactgccagccaccatgaatattgtacggtaccataaatacttgaccacctgtagtacataaaaacccaatccacatcaaaaccccctccccatgcttacaagcaagtacagcaatcaaccctcaactatcacacatcaactgcaactccaaagccacccctcacccactagaataccaacaaacctacccacccttaacagtacatagtacataaagccatttaccgtacatagcacattacagtcaaatcccttctcgtccccatggatgacccccctcagataggggtcccttgaccaccatcctccgtgaaatcaatatcccgcacaagagtgctactctcctcgctccgggcccataacacttgggggtagctaaagtgaactgtatccgacatctggttcctacttcagggccataaagcctaaatagcccacacgttccccttaaataagacatcacgatg

SEQ ID NO: 365 - DNA, 16570 bp, Homo sapiens mitochondrial
  3108: "n" refers to a nucleotide at position 3107 of the Cambridge Reference Sequence (CRS, Anderson et al. 1981 Nature 290:457-465), later determined to be absent from the human mtDNA sequence according to the revised CRS (rCRS, Andrews et al. 1999 Nature Genetics 23:147); "n" therefore represents a single nucleotide deletion at a position corresponding to nucleotide 3107 of SEQ ID NO:1 as provided herein.
gatcacaggtctatcaccctattaaccactcacgggagctctccatgcatttggtattttcgtctggggggtatgcacgcgatagcattgcgagacgctggagccggagcaccctatgtcgcagtatctgtctttgattcctgcctcatcctattatttatcgcacctacgttcaatattacaggcgaacatacctactaaagtgtgttaattaattaatgcttgtaggacataataataacaattgaatgtctgcacagccgctttccacacagacatcataacaaaaaatttccaccaaaccccccctcccccgccttctggccacagcacttaaacacatctctgccaaaccccaaaaacaaagaaccctaacaccagcctaaccagatttcaaattttatcttttggcggtatgcacttttaacagtcaccccccaactaacacattattttcccctcccactcccatactactaatctcatcaatacaacccccgcccatcctacccagcacacacacaccgctgctaaccccataccccgaaccaaccaaaccccaaagacaccccccacagtttatgtagcttacctcctcaaagcaatacactgaaaatgtttagacgggctcacatcaccccataaacaaataggtttggtcctagcctttctattagctcttagtaagattacacatgcaagcatccccgttccagtgagttcaccctctaaatcaccacgatcaaaagggacaagcatcaagcacgcagcaatgcagctcaaaacgcttagcctagccacacccccacgggaaacagcagtgattaacctttagcaataaacgaaagtttaactaagctatactaaccccagggttggtcaatttcgtgccagccaccgcggtcacacgattaacccaagtcaatagaagccggcgtaaagagtgttttagatcaccccctccccaataaagctaaaactcacctgagttgtaaaaaactccagttgacacaaaatagactacgaaagtggctttaacatatctgaacacacaatagctaagacccaaactgggattagataccccactatgcttagccctaaacctcaacagttaaatcaacaaaactgctcgccagaacactacgagccacagcttaaaactcaaaggacctggcggtgcttcatatccctctagaggagcctgttctgtaatcgataaaccccgatcaacctcaccacctcttgctcagcctatataccgccatcttcagcaaaccctgatgaaggctacaaagtaagcgcaagtacccacgtaaagacgttaggtcaaggtgtagcccatgaggtggcaagaaatgggctacattttctaccccagaaaactacgatagcccttatgaaacttaagggtcgaaggtggatttagcagtaaactgagagtagagtgcttagttgaacagggccctgaagcgcgtacacaccgcccgtcaccctcctcaagtatacttcaaaggacatttaactaaaacccctacgcatttatatagaggagacaagtcgtaacatggtaagtgtactggaaagtgcacttggacgaaccagagtgtagcttaacacaaagcacccaacttacacttaggagatttcaacttaacttgaccgctctgagctaaacctagccccaaacccactccaccttactaccagacaaccttagccaaaccatttacccaaataaagtataggcgatagaaattgaaacctggcgcaatagatatagtaccgcaagggaaagatgaaaaattataaccaagcataatatagcaaggactaacccctataccttctgcataatgaattaactagaaataactttgcaaggagagccaaagctaagacccccgaaaccagacgagctacctaagaacagctaaaagagcacacccgtctatgtagcaaaatagtgggaagatttataggtagaggcgacaaacctaccgagcctggtgatagctggttgtccaagatagaatcttagttcaactttaaatttgcccacagaaccctctaaatccccttgtaaatttaactgttagtccaaagaggaacagctctttggacactaggaaaaaaccttgtagagagagtaaaaaatttaacacccatagtaggcctaaaagcagccaccaattaagaaagcgttcaagctcaacacccactacctaaaaaatcccaaacatataactgaactcctcacacccaattggaccaatctatcaccctatagaagaactaatgttagtataagtaacatgaaaacattctcctccgcataagcctgcgtcagattaaaacactgaactgacaattaacagcccaatatctacaatcaaccaacaagtcattattaccctcactgtcaacccaacacaggcatgctcataaggaaaggttaaaaaaagtaaaaggaactcggcaaatcttaccccgcctgtttaccaaaaacatcacctctagcatcaccagtattagaggcaccgcctgcccagtgacacatgtttaacggccgcggtaccctaaccgtgcaaaggtagcataatcacttgttccttaaatagggacctgtatgaatggctccacgagggttcagctgtctcttacttttaaccagtgaaattgacctgcccgtgaagaggcgggcataacacagcaagacgagaagaccctatggagctttaatttattaatgcaaacagtacctaacaaacccacaggtcctaaactaccaaacctgcattaaaaatttcggttggggcgacctcggagcagaacccaacctccgagcagtacatgctaagacttcaccagtcaaagcgaactactatactcaattgatccaataacttgaccaacggaacaagttaccctagggataacagcgcaatcctattctagagtccatatcaacaatagggtttacgacctcgatgttggatcaggacatcccgatggtgcagccgctattaaaggttcgtttgttcaacgattaaagtcctacgtgatctgagttcagaccggagtaatccaggtcggtttctatctacnttcaaattcctccctgtacgaaaggacaagagaaataaggcctacttcacaaagcgccttcccccgtaaatgatatcatctcaacttagtattatacccacacccacccaagaacagggtttgttaagatggcagagcccggtaatcgcataaaacttaaaactttacagtcagaggttcaattcctcttcttaacaacatacccatggccaacctcctactcctcattgtacccattctaatcgcaatggcattcctaatgcttaccgaacgaaaaattctaggctatatacaactacgcaaaggccccaacgttgtaggcccctacgggctactacaacccttcgctgacgccataaaactcttcaccaaagagcccctaaaacccgccacatctaccatcaccctctacatcaccgccccgaccttagctctcaccatcgctcttctactatgaacccccctccccatacccaaccccctggtcaacctcaacctaggcctcctatttattctagccacctctagcctagccgtttactcaatcctctgatcagggtgagcatcaaactcaaactacgccctgatcggcgcactgcgagcagtagcccaaacaatctcatatgaagtcaccctagccatcattctactatcaacattactaataagtggctcctttaacctctccacccttatcacaacacaagaacacctctgattactcctgccatcatgacccttggccataatatgatttatctccacactagcagagaccaaccgaacccccttcgaccttgccgaaggggagtccgaactagtctcaggtttcaacatcgaatacgccgcaggccccttcgccctattcttcatagccgaatacacaaacattattataataaacaccctcaccactacaatcttcctaggaacaacatatgacgcactctcccctgaactctacacaacatattttgtcaccaagaccctacttctaacctccctgttcttatgaattcgaacagcatacccccgattccgctacgaccaactcatacacctcctatgaaaaaacttcctaccactcaccctagcattacttatatgatatgtctccatacccattacaatctccagcattccccctcaaacctaagaaatatgtctgataaaagagttactttgatagagtaaataataggagcttaaacccccttatttctaggactatgagaatcgaacccatccctgagaatccaaaattctccgtgccacctatcacaccccatcctaaagtaaggtcagctaaataagctatcgggcccataccccgaaaatgttggttatacccttcccgtactaattaatcccctggcccaacccgtcatctactctaccatctttgcaggcacactcatcacagcgctaagctcgcactgattttttacctgagtaggcctagaaataaacatgctagcttttattccagttctaaccaaaaaaataaaccctcgttccacagaagctgccatcaagtatttcctcacgcaagcaaccgcatccataatccttctaatagctatcctcttcaacaatatactctccggacaatgaaccataaccaatactaccaatcaatactcatcattaataatcataatggctatagcaataaaactaggaatagccccctttcacttctgagtcccagaggttacccaaggcacccctctgacatccggcctgcttcttctcacatgacaaaaactagcccccatctcaatcatataccaaatctctccctcactaaacgtaagccttctcctcactctctcaatcttatccatcatagcaggcagttgaggtggattaaaccaaacccagctacgcaaaatcttagcatactcctcaattacccacataggatgaataatagcagttctaccgtacaaccctaacataaccattcttaatttaactatttatattatcctaactactaccgcattcctactactcaacttaaactccagcaccacgaccctactactatctcgcacctgaaacaagctaacatgactaacacccttaattccatccaccctcctctccctaggaggcctgcccccgctaaccggctttttgcccaaatgggccattatcgaagaattcacaaaaaacaatagcctcatcatccccaccatcatagccaccatcaccctccttaacctctacttctacctacgcctaatctactccacctcaatcacactactccccatatctaacaacgtaaaaataaaatgacagtttgaacatacaaaacccaccccattcctccccacactcatcgcccttaccacgctactcctacctatctccccttttatactaataatcttatagaaatttaggttaaatacagaccaagagccttcaaagccctcagtaagttgcaatacttaatttctgtaacagctaaggactgcaaaaccccactctgcatcaactgaacgcaaatcagccactttaattaagctaagcccttactagaccaatgggacttaaacccacaaacacttagttaacagctaagcaccctaatcaactggcttcaatctacttctcccgccgccgggaaaaaaggcgggagaagccccggcaggtttgaagctgcttcttcgaatttgcaattcaatatgaaaatcacctcggagctggtaaaaagaggcctaacccctgtctttagatttacagtccaatgcttcactcagccattttacctcacccccactgatgttcgccgaccgttgactattctctacaaaccacaaagacattggaacactatacctattattcggcgcatgagctggagtcctaggcacagctctaagcctccttattcgagccgagctgggccagccaggcaaccttctaggtaacgaccacatctacaacgttatcgtcacagcccatgcatttgtaataatcttcttcatagtaatacccatcataatcggaggctttggcaactgactagttcccctaataatcggtgcccccgatatggcgtttccccgcataaacaacataagcttctgactcttacctccctctctcctactcctgctcgcatctgctatagtggaggccggagcaggaacaggttgaacagtctaccctcccttagcagggaactactcccaccctggagcctccgtagacctaaccatcttctccttacacctagcaggtgtctcctctatcttaggggccatcaatttcatcacaacaattatcaatataaaaccccctgccataacccaataccaaacgcccctcttcgtctgatccgtcctaatcacagcagtcctacttctcctatctctcccagtcctagctgctggcatcactatactactaacagaccgcaacctcaacaccaccttcttcgaccccgccggaggaggagaccccattctataccaacacctattctgatttttcggtcaccctgaagtttatattcttatcctaccaggcttcggaataatctcccatattgtaacttactactccggaaaaaaagaaccatttggatacataggtatggtctgagctatgatatcaattggcttcctagggtttatcgtgtgagcacaccatatatttacagtaggaatagacgtagacacacgagcatatttcacctccgctaccataatcatcgctatccccaccggcgtcaaagtatttagctgactcgccacactccacggaagcaatatgaaatgatctgctgcagtgctctgagccctaggattcatctttcttttcaccgtaggtggcctgactggcattgtattagcaaactcatcactagacatcgtactacacgacacgtactacgttgtagcccacttccactatgtcctatcaataggagctgtatttgccatcataggaggcttcattcactgatttcccctattctcaggctacaccctagaccaaacctacgccaaaatccatttcactatcatattcatcggcgtaaatctaactttcttcccacaacactttctcggcctatccggaatgccccgacgttactcggactaccccgatgcatacaccacatgaaacatcctatcatctgtaggctcattcatttctctaacagcagtaatattaataattttcatgatttgagaagccttcgcttcgaagcgaaaagtcctaatagtagaagaaccctccataaacctggagtgactatatggatgccccccaccctaccacacattcgaagaacccgtatacataaaatctagacaaaaaaggaaggaatcgaaccccccaaagctggtttcaagccaaccccatggcctccatgactttttcaaaaaggtattagaaaaaccatttcataactttgtcaaagttaaattataggctaaatcctatatatcttaatggcacatgcagcgcaagtaggtctacaagacgctacttcccctatcatagaagagcttatcacctttcatgatcacgccctcataatcattttccttatctgcttcctagtcctgtatgcccttttcctaacactcacaacaaaactaactaatactaacatctcagacgctcaggaaatagaaaccgtctgaactatcctgcccgccatcatcctagtcctcatcgccctcccatccctacgcatcctttacataacagacgaggtcaacgatccctcccttaccatcaaatcaattggccaccaatggtactgaacctacgagtacaccgactacggcggactaatcttcaactcctacatacttcccccattattcctagaaccaggcgacctgcgactccttgacgttgacaatcgagtagtactcccgattgaagcccccattcgtataataattacatcacaagacgtcttgcactcatgagctgtccccacattaggcttaaaaacagatgcaattcccggacgtctaaaccaaaccactttcaccgctacacgaccgggggtatactacggtcaatgctctgaaatctgtggagcaaaccacagtttcatgcccatcgtcctagaattaattcccctaaaaatctttgaaatagggcccgtatttaccctatagcaccccctctaccccctctagagcccactgtaaagctaacttagcattaaccttttaagttaaagattaagagaaccaacacctctttacagtgaaatgccccaactaaatactaccgtatggcccaccataattacccccatactccttacactattcctcatcacccaactaaaaatattaaacacaaactaccacctacctccctcaccaaagcccataaaaataaaaaattataacaaaccctgagaaccaaaatgaacgaaaatctgttcgcttcattcattgcccccacaatcctaggcctacccgccgcagtactgatcattctatttccccctctattgatccccacctccaaatatctcatcaacaaccgactaatcaccacccaacaatgactaatcaaactaacctcaaaacaaatgataaccatacacaacactaaaggacgaacctgatctcttatactagtatccttaatcatttttattgccacaactaacctcctcggactcctgcctcactcatttacaccaaccacccaactatctataaacctagccatggccatccccttatgagcgggcgcagtgattataggctttcgctctaagattaaaaatgccctagcccacttcttaccacaaggcacacctacaccccttatccccatactagttattatcgaaaccatcagcctactcattcaaccaatagccctggccgtacgcctaaccgctaacattactgcaggccacctactcatgcacctaattggaagcgccaccctagcaatatcaaccattaaccttccctctacacttatcatcttcacaattctaattctactgactatcctagaaatcgctgtcgccttaatccaagcctacgttttcacacttctagtaagcctctacctgcacgacaacacataatgacccaccaatcacatgcctatcatatagtaaaacccagcccatgacccctaacaggggccctctcagccctcctaatgacctccggcctagccatgtgatttcacttccactccataacgctcctcatactaggcctactaaccaacacactaaccatataccaatgatggcgcgatgtaacacgagaaagcacataccaaggccaccacacaccacctgtccaaaaaggccttcgatacgggataatcctatttattacctcagaagtttttttcttcgcaggatttttctgagccttttaccactccagcctagcccctaccccccaattaggagggcactggcccccaacaggcatcaccccgctaaatcccctagaagtcccactcctaaacacatccgtattactcgcatcaggagtatcaatcacctgagctcaccatagtctaatagaaaacaaccgaaaccaaataattcaagcactgcttattacaattttactgggtctctattttaccctcctacaagcctcagagtacttcgagtctcccttcaccatttccgacggcatctacggctcaacattttttgtagccacaggcttccacggacttcacgtcattattggctcaactttcctcactatctgcttcatccgccaactaatatttcactttacatccaaacatcactttggcttcgaagccgccgcctgatactggcattttgtagatgtggtttgactatttctgtatgtctccatctattgatgagggtcttactcttttagtataaatagtaccgttaacttccaattaactagttttgacaacattcaaaaaagagtaataaacttcgccttaattttaataatcaacaccctcctagccttactactaataattattacattttgactaccacaactcaacggctacatagaaaaatccaccccttacgagtgcggcttcgaccctatatcccccgcccgcgtccctttctccataaaattcttcttagtagctattaccttcttattatttgatctagaaattgccctccttttacccctaccatgagccctacaaacaactaacctgccactaatagttatgtcatccctcttattaatcatcatcctagccctaagtctggcctatgagtgactacaaaaaggattagactgaaccgaattggtatatagtttaaacaaaacgaatgatttcgactcattaaattatgataatcatatttaccaaatgcccctcatttacataaatattatactagcatttaccatctcacttctaggaatactagtatatcgctcacacctcatatcctccctactatgcctagaaggaataatactatcgctgttcattatagctactctcataaccctcaacacccactccctcttagccaatattgtgcctattgccatactagtctttgccgcctgcgaagcagcggtgggcctagccctactagtctcaatctccaacacatatggcctagactacgtacataacctaaacctactccaatgctaaaactaatcgtcccaacaattatattactaccactgacatgactttccaaaaaacacataatttgaatcaacacaaccacccacagcctaattattagcatcatccctctactattttttaaccaaatcaacaacaacctatttagctgttccccaaccttttcctccgaccccctaacaacccccctcctaatactaactacctgactcctacccctcacaatcatggcaagccaacgccacttatccagtgaaccactatcacgaaaaaaactctacctctctatactaatctccctacaaatctccttaattataacattcacagccacagaactaatcatattttatatcttcttcgaaaccacacttatccccaccttggctatcatcacccgatgaggcaaccagccagaacgcctgaacgcaggcacatacttcctattctacaccctagtaggctcccttcccctactcatcgcactaatttacactcacaacaccctaggctcactaaacattctactactcactctcactgcccaagaactatcaaactcctgagccaacaacttaatatgactagcttacacaatagcttttatagtaaagatacctctttacggactccacttatgactccctaaagcccatgtcgaagcccccatcgctgggtcaatagtacttgccgcagtactcttaaaactaggcggctatggtataatacgcctcacactcattctcaaccccctgacaaaacacatagcctaccccttccttgtactatccctatgaggcataattataacaagctccatctgcctacgacaaacagacctaaaatcgctcattgcatactcttcaatcagccacatagccctcgtagtaacagccattctcatccaaaccccctgaagcttcaccggcgcagtcattctcataatcgcccacgggcttacatcctcattactattctgcctagcaaactcaaactacgaacgcactcacagtcgcatcataatcctctctcaaggacttcaaactctactcccactaatagctttttgatgacttctagcaagcctcgctaacctcgccttaccccccactattaacctactgggagaactctctgtgctagtaaccacgttctcctgatcaaatatcactctcctacttacaggactcaacatactagtcacagccctatactccctctacatatttaccacaacacaatggggctcactcacccaccacattaacaacataaaaccctcattcacacgagaaaacaccctcatgttcatacacctatcccccattctcctcctatccctcaaccccgacatcattaccgggttttcctcttgtaaatatagtttaaccaaaacatcagattgtgaatctgacaacagaggcttacgaccccttatttaccgagaaagctcacaagaactgctaactcatgcccccatgtctaacaacatggctttctcaacttttaaaggataacagctatccattggtcttaggccccaaaaattttggtgcaactccaaataaaagtaataaccatgcacactactataaccaccctaaccctgacttccctaattccccccatccttaccaccctcgttaaccctaacaaaaaaaactcatacccccattatgtaaaatccattgtcgcatccacctttattatcagtctcttccccacaacaatattcatgtgcctagaccaagaagttattatctcgaactgacactgagccacaacccaaacaacccagctctccctaagcttcaaactagactacttctccataatattcatccctgtagcattgttcgttacatggtccatcatagaattctcactgtgatatataaactcagacccaaacattaatcagttcttcaaatatctactcatcttcctaattaccatactaatcttagttaccgctaacaacctattccaactgttcatcggctgagagggcgtaggaattatatccttcttgctcatcagttgatgatacgcccgagcagatgccaacacagcagccattcaagcaatcctatacaaccgtatcggcgatatcggtttcatcctcgccttagcatgatttatcctacactccaactcatgagacccacaacaaatagcccttctaaacgctaatccaagcctcaccccactactaggcctcctcctagcagcagcaggcaaatcagcccaattaggtctccacccctgactcccctcagccatagaaggccccaccccagtctcagccctactccactcaagcactatagttgtagcaggaatcttcttactcatccgcttccaccccctagcagaaaatagcccactaatccaaactctaacactatgcttaggcgctatcaccactctgttcgcagcagtctgcgcccttacacaaaatgacatcaaaaaaatcgtagccttctccacttcaagtcaactaggactcataatagttacaatcggcatcaaccaaccacacctagcattcctgcacatctgtacccacgccttcttcaaagccatactatttatgtgctccgggtccatcatccacaaccttaacaatgaacaagatattcgaaaaataggaggactactcaaaaccatacctctcacttcaacctccctcaccattggcagcctagcattagcaggaatacctttcctcacaggtttctactccaaagaccacatcatcgaaaccgcaaacatatcatacacaaacgcctgagccctatctattactctcatcgctacctccctgacaagcgcctatagcactcgaataattcttctcaccctaacaggtcaacctcgcttccccacccttactaacattaacgaaaataaccccaccctactaaaccccattaaacgcctggcagccggaagcctattcgcaggatttctcattactaacaacatttcccccgcatcccccttccaaacaacaatccccctctacctaaaactcacagccctcgctgtcactttcctaggacttctaacagccctagacctcaactacctaaccaacaaacttaaaataaaatccccactatgcacattttatttctccaacatactcggattctaccctagcatcacacaccgcacaatcccctatctaggccttcttacgagccaaaacctgcccctactcctcctagacctaacctgactagaaaagctattacctaaaacaatttcacagcaccaaatctccacctccatcatcacctcaacccaaaaaggcataattaaactttacttcctctctttcttcttcccactcatcctaaccctactcctaatcacataacctattcccccgagcaatctcaattacaatatatacaccaacaaacaatgttcaaccagtaactactactaatcaacgcccataatcatacaaagcccccgcaccaataggatcctcccgaatcaaccctgacccctctccttcataaattattcagcttcctacactattaaagtttaccacaaccaccaccccatcatactctttcacccacagcaccaatcctacctccatcgctaaccccactaaaacactcaccaagacctcaacccctgacccccatgcctcaggatactcctcaatagccatcgctgtagtatatccaaagacaaccatcattccccctaaataaattaaaaaaactattaaacccatataacctcccccaaaattcagaataatagcacacccgaccacaccgctaacaatcaatactaaacccccataaataggagaaggcttagaagaaaaccccacaaaccccattactaaacccacactcaacagaaacaaagcatacatcattattctcgcacggactacaaccacgaccaatgatatgaaaaaccatcgttgtatttcaactacaagaacaccaatgaccccaatacgcaaaactaaccccctaataaaattaattaaccactcattcatcgacctccccaccccatccaacatctccgcatgatgaaacttcggctcactccttggcgcctgcctgatcctccaaatcaccacaggactattcctagccatgcactactcaccagacgcctcaaccgccttttcatcaatcgcccacatcactcgagacgtaaattatggctgaatcatccgctaccttcacgccaatggcgcctcaatattctttatctgcctcttcctacacatcgggcgaggcctatattacggatcatttctctactcagaaacctgaaacatcggcattatcctcctgcttgcaactatagcaacagccttcataggctatgtcctcccgtgaggccaaatatcattctgaggggccacagtaattacaaacttactatccgccatcccatacattgggacagacctagttcaatgaatctgaggaggctactcagtagacagtcccaccctcacacgattctttacctttcacttcatcttgcccttcattattgcagccctagcagcactccacctcctattcttgcacgaaacgggatcaaacaaccccctaggaatcacctcccattccgataaaatcaccttccacccttactacacaatcaaagacgccctcggcttacttctcttccttctctccttaatgacattaacactattctcaccagacctcctaggcgacccagacaattataccctagccaaccccttaaacacccctccccacatcaagcccgaatgatatttcctattcgcctacacaattctccgatccgtccctaacaaactaggaggcgtccttgccctattactatccatcctcatcctagcaataatccccatcctccatatatccaaacaacaaagcataatatttcgcccactaagccaatcactttattgactcctagccgcagacctcctcattctaacctgaatcggaggacaaccagtaagctacccttttaccatcattggacaagtagcatccgtactatacttcacaacaatcctaatcctaataccaactatctccctaattgaaaacaaaatactcaaatgggcctgtccttgtagtataaactaatacaccagtcttgtaaaccggagatgaaaacctttttccaaggacaaatcagagaaaaagtctttaactccaccattagcacccaaagctaagattctaatttaaactattctctgttctttcatggggaagcagatttgggtaccacccaagtattgactcacccatcaacaaccgctatgtatttcgtacattactgccagccaccatgaatattgtacggtaccataaatacttgaccacctgtagtacataaaaacccaatccacatcaaaaccccctccccatgcttacaagcaagtacagcaatcaaccctcaactatcacacatcaactgcaactccaaagccacccctcacccactaggataccaacaaacttacccacccttaacagtacatagtacataaagccatttaccgtacatagcacattacagtcaaatcccttctcgtccccatggatgacccccctcagataggggtcccttgaccaccatcctccgtgaaatcaatatcccgcacaagagtgctactctcctcgctccgggcccataacacttgggggtagctaaagtgaactgtatccgacatctggttcctacttcagggccataaagcctaaatagcccacacgttccccttaaataagacatcacgatg
